(19) United States
(12) Patent Application Publication
(10) Pub. No.: US 2017/0071208 A1
(43) Pub. Date: Mar. 16, 2017

(54) COMPOSITIONS FOR MOSQUITO CONTROL AND USES OF SAME

(71) Applicant: Forrest Innovations Ltd., Caesarea (IL)

(72) Inventors: Nitzan PALDI, Moshav Bar Giora (IL); Humberto Freire BONCRISTIANI JUNIOR, Odenton, MD (US); Eyal MAORI, Rishon-LeZion (IL); Avital WEISS, Karkur (IL); Emerson Soares BERNARDES, Sao Paulo (BR)

(21) Appl. No.: 15/308,394

(22) PCT Filed: May 4, 2015
(86) PCT No.: PCT/IL2015/050468

§ 371 Date: Nov. 2, 2016

Related U.S. Application Data
(60) Provisional application No. 61/988,235, filed on May 4, 2014.
(60) Provisional application No. 61/988,246, filed on May 4, 2014.
(60) Provisional application No. 61/988,237, filed on May 4, 2014.
(60) Provisional application No. 61/988,236, filed on May 4, 2014.
(60) Provisional application No. 61/988,234, filed on May 4, 2014.

(51) Int. Cl. A01N 57/16; A01N 25/10; C12N 15/113

(52) U.S. Cl. CPC A01N 57/16; C12N 15/113; A01N 25/10

(57) ABSTRACT

A composition-of-matter for mosquito control is provided. The composition comprises a cell which comprises an exogenous naked dsRNA which specifically down-regulates expression of a gene being endogenous to a mosquito or which specifically down-regulated expression of a gene being endogenous to a mosquito pathogen. Further provided is a composition-of-matter for mosquito control, comprising a cell comprising a nucleic acid larvicide. Also provided are methods of producing and using the compositions.

### FIELD AND BACKGROUND OF THE INVENTION

[0001] The present invention, in some embodiments thereof, relates to compositions for mosquito control and uses of same.

[0002] Mosquitoes are the major vectors for a number of human and animal diseases, including malaria, yellow fever and dengue fever. Over 1 million people die from mosquito-borne diseases every year, and hundreds of millions more experience pain and suffering from illnesses transmitted by mosquitoes.

[0003] There is neither specific medication nor vaccine for Dengue. The only way currently to control the disease is to control the mosquito, Aedes aegypti, which spreads the disease. There is no cure for yellow fever but there is a vaccine; however it is expensive and not available to protect other parts of the world. There is no currently available drug regimen guarantees 100% protection against Malaria, and prevention of infection requires taking antimalarial medication as directed in addition to prevention of mosquito bites. Antimalarials do not actually prevent the disease but only act in the bloodstream to suppress clinical symptoms by inhibiting parasite development in red blood cells.

[0004] In order to prevent human disease caused by the viruses and parasites mentioned above, a systematic mosquito surveillance system is required. Nowadays, it is accepted that the success of such actions depends on the implementation of an integrated mosquito management program (IMM).

[0005] The aim of these programs is to optimize the control of mosquitoes in an economical and environmentally friendly way. Specifically, Integrated Mosquito Management is a comprehensive mosquito prevention/control strategy that utilizes all available mosquito control methods singly or in combination to exploit the known vulnerabilities of mosquitoes in order to reduce their numbers to tolerable levels while maintaining a quality environment. IMM does not emphasize mosquito elimination or eradication. Integrated mosquito management methods are specifically tailored to safely counter each stage of the mosquito life cycle. Prudent mosquito management practices for the control of immature mosquitoes (larvae and pupae) include such methods as the use of biological controls (native, noninvasive predators), source reduction (water or vegetation management or other compatible land management uses), water sanitation practices as well as the use of registered larvicides. When source elimination or larval control measures are not feasible or are clearly inadequate, or when faced with imminent mosquito-borne disease, application of registered adulticides may be needed. However, larvicides/adulticides efficacy is now threatened by the rise of resistance in target populations. Such phenomenon is occurring worldwide in all major disease vector mosquito species and spreads at a rapid rate [Harris et al. (2010) Am. J. Trop. Med. Hyg. 83, 277e284; Marcombe et al. (2009a) Am. J. Trop. Med. Hyg. 80, 745e751; Marcombe et al. (2009b) BMC Genomics 10, 494; Ranson et al. (2009) Malar. J. 8, 299].

[0006] Larviciding is an ecologically safe preventive method used to interrupt the development of larvae or pupa into adult mosquitoes. Larviciding is also a general term for killing immature mosquitoes by applying agents, collectively called larvicides, to control mosquito larvae and/or pupae. Larvicides may be grouped into two broad categories: biorational pesticides (biopesticides) and conventional, broad-spectrum chemical pesticides.

[0007] Biochemical agents such as Insect Growth Regulators (IGRS) controls insects by interrupting their life cycle, rather than through direct toxicity. Based on this mode of action, the U.S. Environmental Protection Agency (EPA) considers it to be a biochemical pesticide. The IGRS mimics naturally occurring insect biochemicals that are responsible for insect development. Through the mimicry, IGRS keeps the mosquito larvae from developing into adults that would emerge from the pupae. It is able to exert this effect at very small concentrations. The first IGRS, which contained several methoprene isomers, was registered in 1975 [Henrick, (2007) Methoprene. In: Floore, T.G. (Ed.). Biorational Control of Mosquitoes. Bulletin of the American Mosquito Control Association No. 7. St Louis, Mo.: Allen Press]. Methoprene products currently are the only IGRS registered for use in the USA. Methoprene is a juvenile hormone (JH) analog, which mimicries the natural hormone from insects. JH is involved in the regulation of physiological processes in insects including mating and metamorphosis. Therefore, these chemicals interfere with normal insect growth and maturation and induce abnormal larval growth patterns.

[0008] Resistance has been defined as ‘the developed ability in a strain of insects to tolerate doses of toxicants that would prove lethal to the majority of individuals in a normal population of the same species’ [Clark & Yamaguchi, (2002) Scope and Status of Pesticide Resistance. In Agrochemical Resistance: Extent, Mechanism and Detection, eds. J. M Clark & I. Yamaguchi, pp 1-22. Washington, D.C.: American Chemical Society]. In a susceptible population, individuals with resistant genes to a given insecticide are rare, and usually range between 10⁻⁵ and 10⁻⁸ in number, but widespread use of a toxicant favors the prevalence of the resistant individuals. These individuals multiply fast in the absence of intraspecific competition and, over a number of generations, quickly become the dominant proportion of the population. Hence, the insecticide is no longer effective and the insects are considered to be resistant.

[0009] In addition to pesticides and insecticides, chemicals commonly used in agriculture also include fertilizers, herbicides, fungicides and various adjuvants that increase their efficiency. Although these compounds are usually non-toxic to insects, their presence in breeding sites has been shown to affect tolerance to insecticides via the modulation of their detoxification system. For instance, Chironomus tentans larvae exposed to the herbicide alachlor respond by enhanced GST activities [Li et al. (2009) Insect Biochem. Mol. Biol., 39, 745e754]. Ae. albopictus larvae exposed for 48 h to the fungicides triadimefon, diniconazole and pentachlorophenol showed an increased tolerance to carbaryl [Suwanchaichinda and Brattsten, (2001) Pestic. Biochem. Physiol., 70, 63e73]. The strong effect observed with pentachlorophenol was further linked to a strong induction of P450s. Poupardin et al. [(2008) Insect Biochem. Mol. Biol. 38, 540e551; (2010) Insect Mol. Biol., 19, 185e193] demonstrated that exposing Ae. aegypti larvae to a sub-lethal dose of copper sulphate, frequently used in agriculture as a fungicide, enhance their tolerance to the pyrethroid permethrin. This effect was correlated to an elevation of P450 activities and the induction of CYP genes preferentially transcribed in detoxification tissues and showing high homology to known pyrethroid metabolizers. Similarly, exposing Ae. Aegypti larvae to the herbicide glyphosate, the active molecule of Roundup, led to a significant increase of their tolerance to permethrin together with the induction of multiple detoxification genes [(Riaz et al. (2009) Aquat. Toxicol., 93, 61e69].

[0010] Mosquito resistance has also been described against biolarvicides. Specifically, the development of resistance in Culex quinquefasciatus to the Biopesticide Bacillus sphaericus (B.s.) has been noted by Rodcharoen et al., Journal of Economic Entomology, Vol. 87, No. 5, 1994, pp. 1133-1140. In addition, resistance to methoprene was soon demonstrated in several species [Dyte, (1972) Nature, 238(5358):48-9; Cerf & Georghiou, (1972) Nature, 239(5372):401-2].

[0011] One method of introducing dsRNA to the larvae is by dehydration. Specifically, larvae are dehydrated in a NaCl solution and then rehydrated in water containing double-stranded RNA. This process is suggested to induce gene silencing in mosquito larvae.

### SUMMARY OF THE INVENTION

[0012] According to an aspect of some embodiments of the present invention there is provided a composition-of-matter for mosquito control, comprising a cell comprising an exogenous naked dsRNA which specifically down-regulates expression of a gene being endogenous to a mosquito or which specifically down-regulated expression of a gene being endogenous to a mosquito pathogen.

[0013] According to an aspect of some embodiments of the present invention there is provided a composition-of-matter for mosquito control, comprising a cell comprising a nucleic acid larvicide.

[0014] According to an aspect of some embodiments of the present invention there is provided a composition-of-matter for mosquito control, comprising a cell comprising a nucleic acid larvicide affecting fertility or fecundity of a female mosquito.

[0015] According to an aspect of some embodiments of the present invention there is provided a composition-of-matter for mosquito control comprising a nucleic acid larvicide that targets a piRNA pathway gene and/or a sterility gene.

[0016] According to an aspect of some embodiments of the present invention there is provided a composition-of-matter for mosquito control comprising a nucleic acid larvicide that targets a gene comprising Aub (AAEL007698) and Argonaute-3 (AAEL007823).

[0017] According to some embodiments of the invention, the nucleic acid larvicide comprises at least one dsRNA.

[0018] According to some embodiments of the invention, the composition-of-matter comprises a dsRNA which comprises SEQ ID NO: 1858 and a dsRNA which comprises SEQ ID NO: 1823.

[0019] According to an aspect of some embodiments of the present invention there is provided a method of producing a larvicidal composition, the method comprising introducing into a cell a nucleic acid larvicide, thereby producing the larvicide.

[0020] According to an aspect of some embodiments of the present invention there is provided a method of producing a larvicidal composition, the method comprising introducing into a cell a nucleic acid larvicide affecting fertility or fecundity of a female mosquito, thereby producing the larvicide.

[0021] According to some embodiments of the invention, the introducing is effected by electroporation.

[0022] According to some embodiments of the invention, the introducing is effected by particle bombardment.

[0023] According to some embodiments of the invention, the introducing is effected by chemical-based transfection.

[0024] According to some embodiments of the invention, the nucleic acid larvicide down-regulates a target gene selected from the group consisting of:

[0025] (i) affecting larval survival;

[0026] (ii) interfering with metamorphosis of larval stage to adulthood;

[0027] (iii) affecting susceptibility of mosquito larvae to a larvicide;

[0028] (iv) affecting susceptibility of an adult mosquito to an adulticide/insecticide; and

[0029] (v) affecting fertility or fecundity of a male or female mosquito.

[0030] According to some embodiments of the invention, the target gene is selected from the group consisting of 1-427, 430-1813, 1826-1832.

[0031] According to some embodiments of the invention, the target gene is selected from the group consisting of P-glycoprotein (AAEL010379), Argonaute-3 (AAEL007823), Cytochrome p450 (CYP9J26), Sodium channel (AAEL008297), Aub (AAEL007698), AeSCP-2 (AF510492.1), AeAct-4 (AY531222.2), AAEL002000, AAEL005747, AAEL005656, AAEL017015, AAEL005212, AAEL005922, AAEL000903 and AAEL005049.

[0032] According to some embodiments of the invention, the target gene comprises Aub (AAEL007698) and Argonaute-3 (AAEL007823).

[0033] According to some embodiments of the invention, the nucleic acid larvicide which down-regulates the target gene is a dsRNA.

[0034] According to some embodiments of the invention, the dsRNA comprises SEQ ID NOs: 1858 and 1823.

[0035] According to some embodiments of the invention, the cell is an algal cell.

[0036] According to some embodiments of the invention, the cell is a microbial cell.

[0037] According to some embodiments of the invention, the cell is a bacterial cell.

[0038] According to some embodiments of the invention, the composition further comprises a food-bait.

[0039] According to some embodiments of the invention, the composition is formulated in a formulation selected from the group consisting of technical powder, wettable powder, dust, pellet, briquette, tablet and granule.

[0040] According to some embodiments of the invention, the granule is selected from the group consisting of an impregnated granule, dry flowable, wettable granule and water dispersible granule.

[0041] According to some embodiments of the invention, the composition is formulated as a non-aqueous or aqueous suspension concentrate.

[0042] According to some embodiments of the invention, the composition is formulated as a semi-solid form.

[0043] According to some embodiments of the invention, the semi-solid form comprises an agarose.

[0044] According to some embodiments of the invention, the cell is lyophilized.

[0045] According to some embodiments of the invention, the cell is non-transgenic.

[0046] According to some embodiments of the invention, the composition-of-matter or method further comprises an RNA-binding protein.

[0047] According to some embodiments of the invention, the nucleic acid larvicide comprises a dsRNA.

[0048] According to some embodiments of the invention, the dsRNA is a naked dsRNA.

[0049] According to some embodiments of the invention, the dsRNA comprises a carrier.

[0050] According to some embodiments of the invention, the carrier comprises a polyethyleneimine (PEI).

[0051] According to some embodiments of the invention, the dsRNA is effected at a dose of 0.001-1 μg/μL for soaking or at a dose of 1 pg to 10 μg/larvae for feeding.

[0052] According to some embodiments of the invention, the dsRNA is selected from the group consisting of SEQ ID NOs: 1822-1825 and 1857-1868.

[0053] According to some embodiments of the invention, the dsRNA is selected from the group consisting of siRNA, shRNA and miRNA.

[0054] According to some embodiments of the invention, the cell is devoid of a heterologous promoter for driving expression of the dsRNA in the plant.

[0055] According to some embodiments of the invention, the nucleic acid larvicide is greater than 15 base pairs in length.

[0056] According to some embodiments of the invention, the nucleic acid larvicide is 19 to 25 base pairs in length.

[0057] According to some embodiments of the invention, the nucleic acid larvicide is 30-100 base pairs in length.

[0058] According to some embodiments of the invention, the nucleic acid larvicide is 100-800 base pairs in length.

[0059] According to some embodiments of the invention, the composition further comprises at least one of a surface-active agent, an inert carrier vehicle, a preservative, a humectant, a feeding stimulant, an attractant, an encapsulating agent, a binder, an emulsifier, a dye, an ultra-violet protector, a buffer, a flow agent or fertilizer, micronutrient donors, or other preparations that influence the growth of the plant.

[0060] According to some embodiments of the invention, the composition of matter has an inferior impact on an adult mosquito as compared to the larvae.

[0061] According to some embodiments of the invention, the composition further comprises a chemical larvicide or a biochemical larvicide or a combination of same.

[0062] According to some embodiments of the invention, the larvicide is selected from the group consisting of Temephos, Diflubenzuron, methoprene, Bacillus sphaericus, and Bacillus thuringiensis israelensis.

[0063] According to some embodiments of the invention, the larvicide comprises an adulticide.

[0064] According to some embodiments of the invention, the adulticide is selected from the group consisting of deltamethrin, malathion, naled, chlorpyrifos, permethrin, resmethrin and sumithrin.

[0065] According to an aspect of some embodiments of the present invention there is provided a method of controlling or exterminating mosquitoes, the method comprising feeding larvae of the mosquitoes with an effective amount of the composition-of-matter of some embodiments of the invention, thereby controlling or exterminating the mosquitoes.

[0066] According to some embodiments of the invention, the mosquitoes comprise female mosquitoes capable of transmitting a disease to a mammalian organism.

[0067] According to some embodiments of the invention, the mosquitoes are of a species selected from the group consisting of Aedes aegypti and Anopheles gambiae.

[0068] Unless otherwise defined, all technical and/or scientific terms used herein have the same meaning as commonly understood by one of ordinary skill in the art to which the invention pertains. Although methods and materials similar or equivalent to those described herein can be used in the practice or testing of embodiments of the invention, exemplary methods and/or materials are described below. In case of conflict, the patent specification, including definitions, will control. In addition, the materials, methods, and examples are illustrative only and are not intended to be necessarily limiting.

### BRIEF DESCRIPTION OF THE SEVERAL VIEWS OF THE DRAWINGS

[0069] Some embodiments of the invention are herein described, by way of example only, with reference to the accompanying drawings. With specific reference now to the drawings in detail, it is stressed that the particulars shown are by way of example and for purposes of illustrative discussion of embodiments of the invention. In this regard, the description taken with the drawings makes apparent to those skilled in the art how embodiments of the invention may be practiced.

[0070] In the drawings:

[0071] FIG. 1 is a flowchart illustration depicting introduction of dsRNA into mosquito larvae via soaking with “naked” dsRNA. In short, third instar larvae were treated (in groups of 100 larvae) in a final volume of 3 mL of dsRNA solution in autoclaved water with 0.5 μg/μL dsRNA. The control group was kept in 3 ml sterile water only. Larvae were soaked in the dsRNA solutions for 24 hr at 27° C., and then transferred into new containers (300 larvae/1500 mL of chlorine-free tap water), which were also maintained at 27° C., and were provided with lab dog/cat diet (Purina Mills) suspended in water as a source of food on a daily basis. As pupae developed, they were transferred to individual vials to await eclosion and sex sorting. For bioassays purpose only females up to five days old were used. Then, mosquitoes were subjected to pyrethroid adulticide assay.

[0072] FIG. 2 is a flowchart illustration depicting introduction of dsRNA into mosquito larvae via soaking with “naked” dsRNA plus additional larvae feeding with food-containing dsRNA. After soaking in the dsRNA solutions for 24 hr at 27° C. (as indicated in FIG. 1 above), the larvae were transferred into new containers (300 larvae/1500 mL of chlorine-free tap water), and were provided agarose cubes containing 300 μg of dsRNA once a day for a total of four days. The larvae were reared until adult stage. For bioassays purpose only females up to five days old are used. Then, mosquitoes were subjected to pyrethroid adulticide assay.

[0073] FIG. 3 is a flowchart illustration depicting introduction of dsRNA into mosquito larvae via feeding with food-containing dsRNA only. Third instar larvae were fed (in groups of 300 larvae) in a final volume of 1500 mL of chlorine-free tap water with agarose cubes containing 300 μg of dsRNA once a day for a total of four days. The larvae were reared until adult stage. For bioassays purpose only females up to five days old are used. Then, mosquitoes were subjected to pyrethroid adulticide assay.

[0074] FIG. 4 is a flowchart illustration depicting dsRNA production.

[0075] FIGS. 5A-C are graphs illustrating the dose-response curves for 3- to 5-day-old Aedes aegypti female mosquitoes on insecticide-susceptible Rockefeller strain (FIG. 5A) and on insecticide-resistant Rio de Janeiro strain (FIG. 5B). Mosquitoes were exposed to different concentrations of deltamethrin in 250-mL glass bottles for up to 24 hours and the percentage of mortality for each time point is shown. FIG. 5C, comparison of the mortality rates of female mosquitoes from Rockefeller (Rock) and Rio de Janeiro (RJ) strains exposed to 2 μg/mL of deltamethrin for different time-points. Data represent mean values of three replicates with standard deviation.

[0076] FIGS. 6A-B are photographs illustrating allele specific PCR for genotyping kdr mutations in the Aedes aegypti Rio de Janeiro strain. FIGS. 6A-B represent reactions for the 1016 and 1534 mutation sites, respectively. Amplicons were resolved in a 10% polyacrylamide gel electrophoresis and stained with Gel Red. FIG. 6A, amplicons of approximately 80 and 100 bp correspond to alleles 1016 Val⁺ and 1016 Ile^{kdr}, respectively. FIG. 6B, amplicons of 90 and 110 bp correspond to alleles 1534 Phe⁺ and 1534 Cys^{kdr}, respectively. Rockefeller Ae. aegypti mosquito strain was used as positive homozygous dominant control for both mutation sites. C−: negative control.

[0077] FIGS. 7A-C are graphs illustrating that sodium channel gene silencing on Ae. aegypti mosquitoes (RJ strain) results in increased susceptibility to Pyrethroid adulticide. FIG. 7A, larvae from Ae. aegypti RJ strain (3^{rd} instar) were soaked for 24 hours in 0.5 μg/μL of sodium channel dsRNA or only in water, and then reared until adult stage. Adult females were exposed to deltamethrin (0.5 μg/bottle) for different time-points, as indicated, and mortality rates for each time point is shown. Data show the mean±standard deviation of four replicates, and is representative of 3 independent experiments. FIG. 7B, adult mosquitoes (males and females) previously soaked with sodium channel dsRNA or only water were collected before the treatment with deltamethrin and analyzed for sodium channel mRNA expression using qPCR method. FIG. 7C, live and immediately dead female mosquitoes were collected after exposure to deltamethrin and the mRNA expression of sodium channel was determined by qPCR analysis. ***p<0.0001; ****p<0.00001.

[0078] FIG. 8 is a graph illustrating that sodium channel gene silencing on A. aegypti mosquitoes (RJ strain) results in increased susceptibility to Pyrethroid adulticide. Larvae from Ae. aegypti RJ strain (3^{rd} instar) were soaked for 24 hours in 0.5 μg/μL of sodium channel dsRNA or only in water, and then were fed 4 times with food plus agarose 2% containing dsRNA until they reach pupa stage. After emergence, adult females were exposed to deltamethrin (0.5 μg/bottle) for different time-points, as indicated, and mortality rates for each time point is shown. Data show the mean±standard deviation of four replicates, and is representative of 3 independent experiments. *p<0.01; ***p<0.0001.

[0079] FIG. 9 is a graph illustrating that feeding CYP9J29 dsRNA to larvae affects the susceptibility of adult Ae. aegypti mosquitoes to Pyrethroid adulticide. Larvae from A. aegypti RJ strain (3^{rd} instar) were soaked for 24 hours in 0.1 μg/μL of target #3 (CYP9J26) dsRNA or only in water; and then were fed 4 times with food plus agarose 2% containing dsRNA until they reach pupa stage. Adult females were exposed to deltamethrin (0.5 μg/bottle) for different time-points, as indicated, and then percentage of mortality for each time point is shown. Data represent the mean±standard deviation of four replicates. **p<0.001.

[0080] FIGS. 10A-C are graphs illustrating gene silencing in A. aegypti larvae. 3^{rd} instar larvae from Ae. aegypti were soaked for 24 hours in 0.5 μg/mL of (FIG. 10A) P-glycoprotein (PgP); (FIG. 10B) Ago-3 or (FIG. 10C) sodium channel dsRNA. Larvae soaked only in water were used as control. At 6, 24 and 48 hours after the end of dsRNA treatment, larvae were collected and analysed for PgP, Ago-3 and Sodium channel mRNA expression by qPCR. Data represent the mean±standard deviation of four replicates. *p<0.01 **p<0.001; ***p<0.0001; ****p<0.00001.

[0081] FIGS. 11A-B are graphs illustrating P-glycoprotein and Ago-3 expression in Ae. aegypti adult mosquitoes soaked with dsRNA. Third instar larvae from Ae. aegypti were soaked for 24 hours in 0.5 μg/mL of (FIG. 11A) P-glycoprotein (PgP) and (FIG. 11B) Ago-3, and then reared until adult stage. Adult mosquitoes (males and females) previously soaked with the indicated dsRNA or only water were collected and analyzed for PgP and Ago-3 mRNA expression using qPCR method. Data represent the mean±standard deviation of five replicates. **p<0.001.

[0082] FIG. 12 is a flowchart illustration depicting introduction of dsRNA into mosquito larvae via soaking with different doses of “naked” dsRNA plus additional larvae feeding with food-containing dsRNA. Step a) 100 larvae from A. aegypti Rockefeller strain (3^{rd} instar) were soaked for 24 hours with the respective dsRNAs (concentration range from 0.02-0.5 μg/μL) or only in water and were then fed 2 times with food plus agarose 2% containing dsRNA until they reach adult stage (Step b). Step c) The adults arising were allowed to copulate for 3-5 days. Step d) mosquitoes were fed with defibrinated sheep blood. Step e) after blood feeding 15 fully-engorged females were transferred into 3 small cages to be assayed for oviposition. Step f) the total number of laid eggs and the percentage of hatched eggs were counted. FIGS. 13A-B are graphs illustrating larvae from Ae. aegypti Rockefeller strain (3^{rd} instar) soaked for 24 hours in 0.5 μg/μL of Aubergine (Aub) or Argonaute-3 (Ago) dsRNAs or water only. After soaking, larvae were separated in 3 different cages (containing 100 larvae each) and were treated twice with agarose plug containing dsRNA. The adults arising were allowed to copulate for 3-5 days and then fed with defibrinated sheep blood. After blood feeding 15 fully-engorged females were transferred into small cages to be assayed for oviposition. (FIG. 13A) The total number of laid eggs and the percentage of hatched eggs were counted (FIG. 13B).

[0083] FIGS. 14A-B are graphs illustrating larvae from Ae. aegypti Rockefeller strain (3^{rd} instar) soaked for 24 hours in 0.02 μg/μL of AeAct-4 dsRNA or water only. After soaking, larvae were separated in 3 different cages (containing 100 larvae each) and were treated twice with agarose plug containing dsRNA. The adults arising were allowed to copulate for 3-5 days and then fed with defibrinated sheep blood. After blood feeding 15 fully-engorged females were transferred into small cages to be assayed for oviposition. (FIG. 14A) The total number of laid eggs and the percentage of hatched eggs were counted (FIG. 14B).

[0084] FIGS. 15A-B are graphs illustrating Larvae from A. aegypti Rockefeller strain (3^{rd} instar) soaked for 24 hours in 0.05 μg/μL of AAEL005922 dsRNA or 0.06 μg/μL of AAEL000903 dsRNA or water only. After soaking, larvae were separated in 3 different cages (containing 100 larvae each) and were treated twice with agarose plug containing dsRNA. The adults arising were allowed to copulate for 3-5 days and then fed with defibrinated sheep blood. After blood feeding 15 fully-engorged females were transferred into small cages to be assayed for oviposition. (FIG. 15A) The total number of laid eggs and the percentage of hatched eggs were counted (FIG. 15B).

[0085] FIGS. 16A-B are graphs illustrating larvae from Ae. aegypti Rockefeller strain (3^{rd} instar) soaked for 24 hours in 0.06 μg/μL of AAEL017015 dsRNA, or 0.06 μg/μL of AAEL005212 dsRNA, 0.5 μg/μL of Aubergine (Aub)+Argonaute-3 (Ago) dsRNA or water only. After soaking, larvae were separated in 3 different cages (containing 100 larvae each) and treated twice with agarose plug containing dsRNA. The adults arising were allowed to copulate for 3-5 days and then fed with defibrinated sheep blood. After blood feeding 15 fully-engorged females were transferred into small cages to be assayed for oviposition. (FIG. 16A) The total number of laid eggs and the percentage of hatched eggs were counted (FIG. 16B).

### DESCRIPTION OF SPECIFIC EMBODIMENTS OF THE INVENTION

[0086] The present invention, in some embodiments thereof, relates to compositions for mosquito control and uses of same.

[0087] Before explaining at least one embodiment of the invention in detail, it is to be understood that the invention is not necessarily limited in its application to the details set forth in the following description or exemplified by the Examples. The invention is capable of other embodiments or of being practiced or carried out in various ways.

[0088] It is understood that any Sequence Identification Number (SEQ ID NO) disclosed in the instant application can refer to either a DNA sequence or a RNA sequence, depending on the context where that SEQ ID NO is mentioned, even if that SEQ ID NO is expressed only in a DNA sequence format or a RNA sequence format. For example, SEQ ID NO: 1822 is expressed in a DNA sequence format (e.g., reciting T for thymine), but it can refer to either a DNA sequence that corresponds to an endo 1,4 beta gluconase nucleic acid sequence, or the RNA sequence of an RNA molecule nucleic acid sequence. Similarly, though some sequences are expressed in a RNA sequence format (e.g., reciting U for uracil), depending on the actual type of molecule being described, it can refer to either the sequence of a RNA molecule comprising a dsRNA, or the sequence of a DNA molecule that corresponds to the RNA sequence shown. In any event, both DNA and RNA molecules having the sequences disclosed with any substitutes are envisioned.

[0089] While reducing the present invention to practice, the present inventors have uncovered that feeding dsRNA to mosquito larvae is an effective method for silencing gene expression in adult mosquitoes.

[0090] Specifically, the present inventors have shown that feeding mosquito larvae with dsRNA targeting specific genes for two to four days (via agarose cubes, until they reach pupa stage) with or without previous soaking with dsRNA for 24 hours (e.g. sodium channel, PgP, ago-3 and Cytochrome p450) efficiently decreases gene expression (FIGS. 10A-C) and results in higher susceptibility (FIGS. 8, 9) in adult mosquitoes. Importantly, female mosquitoes showed a decreased expression in the mRNA level for sodium channel before deltamethrin treatment (FIG. 7B) and dead female mosquitoes previously treated with dsRNA showed a striking decrease in mRNA expression level for sodium channel (FIG. 7C). Furthermore, it was illustrated that feeding mosquito larvae with dsRNA significantly reduced the number of hatchings of eggs of adult female mosquitoes (FIGS. 13A-B, 14A-B, 15A-B and 16A-B).

[0091] According to an aspect of the invention there is provided a composition-of-matter for mosquito control, comprising a cell comprising an exogenous naked dsRNA which specifically down-regulates expression of a gene being endogenous to a mosquito or which specifically down-regulated expression of a gene being endogenous to a mosquito pathogen.

[0092] As used herein the term “exogenous” refers to an externally added nucleic acid molecule which is not naturally occurring in the cell.

[0093] According to an aspect of the invention there is provided a composition-of-matter for mosquito control, comprising a cell which comprises a nucleic acid larvicide.

[0094] According to another aspect of the invention there is provided a composition-of-matter for mosquito control, comprising a cell comprising a nucleic acid larvicide affecting fertility or fecundity of a female mosquito.

[0095] The term “mosquito” or “mosquitoes” as used herein refers to an insect of the family Culicidae. The mosquito of the invention may include an adult mosquito, a mosquito larva, a pupa or an egg thereof.

[0096] An adult mosquito is defined as any of slender, long-legged insect that has long proboscis and scales on most parts of the body. The adult females of many species of mosquitoes are blood-eating pests. In feeding on blood, adult female mosquitoes transmit harmful diseases to humans and other mammals.

[0097] A mosquito larvae is defined as any of an aquatic insect which does not comprise legs, comprises a distinct head bearing mouth brushes and antennae, a bulbous thorax that is wider than the head and abdomen, a posterior anal papillae and either a pair of respiratory openings (in the subfamily Anophelinae) or an elongate siphon (in the subfamily Culicinae) borne near the end of the abdomen.

[0098] Typically, a mosquito's life cycle includes four separate and distinct stages: egg, larva, pupa, and adult. Thus, a mosquito's life cycle begins when eggs are laid on a water surface (e.g. Culex, Culiseta, and Anopheles species) or on damp soil that is flooded by water (e.g. Aedes species). Most eggs hatch into larvae within 48 hours. The larvae live in the water feeding on microorganisms and organic matter and come to the surface to breathe. They shed their skin four times growing larger after each molting and on the fourth molt the larva changes into a pupa. The pupal stage is a resting, non-feeding stage of about two days. At this time the mosquito turns into an adult. When development is complete, the pupal skin splits and the mosquito emerges as an adult.

[0099] According to one embodiment, the mosquitoes are of the sub-families Anophelinae and Culicinae. According to one embodiment, the mosquitoes are of the genus Culex, Culiseta, Anopheles and Aedes. Exemplary mosquitoes include, but are not limited to, Aedes species e.g. Aedes aegypti, Aedes albopictus, Aedes polynesiensis, Aedes australis, Aedes cantator, Aedes cinereus, Aedes rusticus, Aedes vexans; Anopheles species e.g. Anopheles gambiae, Anopheles freeborni, Anopheles arabiensis, Anopheles funestus, Anopheles gambiae Anopheles moucheti, Anopheles balabacensis, Anopheles baimaii, Anopheles culicifacies, Anopheles dirus, Anopheles latens, Anopheles leucosphyrus, Anopheles maculatus, Anopheles minimus, Anopheles fluviatilis s.l., Anopheles sundaicus Anopheles superpictus, Anopheles farauti, Anopheles punctulatus, Anopheles sergentii, Anopheles stephensi, Anopheles sinensis, Anopheles atroparvus, Anopheles pseudopunctipennis, Anopheles bellator and Anopheles cruzii; Culex species e.g. C. annulirostris, C. antennatus, C. jenseni, C. pipiens, C. pusillus, C. quinquefasciatus, C. rajah, C. restuans, C. salinarius, C. tarsalis, C. territans, C. theileri and C. tritaeniorhynchus; and Culiseta species e.g. Culiseta incidens, Culiseta impatiens, Culiseta inornata and Culiseta particeps.

[0100] According to one embodiment, the mosquitoes are capable of transmitting disease-causing pathogens. The pathogens transmitted by mosquitoes include viruses, protozoa, worms and bacteria.

[0101] Non-limiting examples of viral pathogens which may be transmitted by mosquitoes include the arbovirus pathogens such as Alphaviruses pathogens (e.g. Eastern Equine encephalitis virus, Western Equine encephalitis virus, Venezuelan Equine encephalitis virus, Ross River virus, Sindbis Virus and Chikungunya virus), Flavivirus pathogens (e.g. Japanese Encephalitis virus, Murray Valley Encephalitis virus, West Nile Fever virus, Yellow Fever virus, Dengue Fever virus, St. Louis encephalitis virus, and Tick-borne encephalitis virus), Bunyavirus pathogens (e.g. La Crosse Encephalitis virus, Rift Valley Fever virus, and Colorado Tick Fever virus) and Orbivirus (e.g. Bluetongue disease virus).

[0102] Non-limiting examples of worm pathogens which may be transmitted by mosquitoes include nematodes e.g. filarial nematodes such as Wuchereria bancrofti, Brugia malayi, Brugia pahangi, Brugia timori and heartworm (Dirofilaria immitis)).

[0103] Non-limiting examples of bacterial pathogens which may be transmitted by mosquitoes include gram negative and gram positive bacteria including Yersinia pestis, Borellia spp, Rickettsia spp, and Erwinia carotovora.

[0104] Non-limiting examples of protozoa pathogens which may be transmitted by mosquitoes include the Malaria parasite of the genus Plasmodium e.g. Plasmodium falciparum, Plasmodium vivax, Plasmodium ovale, Plasmodium malariae, Plasmodium berghei, Plasmodium gallinaceum, and Plasmodium knowlesi.

[0105] According to one embodiment, the mosquito comprises a female mosquito being capable of transmitting a disease to a mammalian organism.

[0106] Non-limiting examples of mosquitoes and the pathogens which they transmit include species of the genus Anopheles (e.g. Anopheles gambiae) which transmit malaria parasites as well as microfilariae, arboviruses (including encephalitis viruses) and some species also transmit Wuchereria bancrofti; species of the genus Culex (e.g. C. pipiens) which transmit West Nile virus, filariasis, Japanese encephalitis, St. Louis encephalitis and avian malaria; species of the genus Aedes (e.g. Aedes aegypti, Aedes albopictus and Aedes polynesiensis) which transmit nematode worm pathogens (e.g. heartworm (Dirofilaria immitis)), arbovirus pathogens such as Alphaviruses pathogens that cause diseases such as Eastern Equine encephalitis, Western Equine encephalitis, Venezuelan equine encephalitis and Chikungunya disease; Flavivirus pathogens that cause diseases such as Japanese encephalitis, Murray Valley Encephalitis, West Nile fever, Yellow fever, Dengue fever, and Bunyavirus pathogens that cause diseases such as LaCrosse encephalitis, Rift Valley Fever, and Colorado tick fever.

[0107] According to one embodiment, pathogens that may be transmitted by Aedes aegypti are Dengue virus, Yellow fever virus, Chikungunya virus and heartworm (Dirofilaria immitis).

[0108] According to one embodiment, pathogens that may be transmitted by Aedes albopictus include West Nile Virus, Yellow Fever virus, St. Louis Encephalitis virus, Dengue virus, and Chikungunya fever virus.

[0109] According to one embodiment, pathogens that may be transmitted by Anopheles gambiae include malaria parasites of the genus Plasmodium such as, but not limited to, Plasmodium falciparum, Plasmodium vivax, Plasmodium ovale, Plasmodium malariae, Plasmodium berghei, Plasmodium gallinaceum, and Plasmodium knowlesi.

[0110] As used herein the phrase “mosquito control” refers to managing the population of mosquitoes to reduce their damage to human health, economies, and enjoyment. According to some embodiments of the invention, mosquito management is typically effected using larvicidally effective compositions and compositions having mosquito “aversion activity” which causes a mosquito to avoid deleterious behavior such as a mosquito biting.

[0111] As used herein, the term “larvicidal” or “larvicidal activity” refers to the ability of interfering with a mosquito life cycle resulting in an overall reduction in the mosquito population. The larvicidal composition acts (down-regulates gene expression) at the larval stage. The activity of the larvicidal composition may be manifested immediately (e.g., by affecting larval survival) or only at later stages, as described below. For example, the term larvicidal includes inhibition of a mosquito from progressing from one form to a more mature form, e.g., transition between various larval instars or transition from larva to pupa or pupa to adult. Alternatively or additionally, the term larvicidal affects mosquito fertility or fecundity. Hence the down-regulation of the target gene may induce male or female sterility. Further, the term “larvicidal” is intended to encompass, for example, anti-mosquito activity during all phases of a mosquito life cycle; thus, for example, the term includes larvacidal, ovicidal, and adulticidal activity. According to a specific embodiment all of which stem from the activity at the larval stage. Alternatively or additionally, larvicide encompasses both “larva-specific” larvicides, and non-specific larvicides.”

[0112] According to one embodiment the larvicide may affect fertility or fecundity of a female mosquito. Affecting the fertility or fecundity of a mosquito typically does not kill the mosquito but affects the amount or quality of eggs the mosquito lays, as well as the ability to produce viable and/or fertile progeny. Thus, fertility refers to the ability of a population of female mosquitoes to yield eggs. Fecundity refers to a reduction in the number of progeny produced from the eggs.

[0113] Thus, fertility refers to the “ability” of a male and a female to reproduce a viable offspring.

[0114] The female mosquito may lay a reduced amount of eggs as compared to a female mosquito not affected by the larvicide composition of the invention. Alternatively, the quality of the eggs laid by the female mosquito may be damaged, e.g. the eggs may not hatch or may hatch at a reduced amount (e.g. 10%, 20%, 30%, 40%, 50%, 60%, 70%, 80%, 90% or 100% reduction in hatching as compared to eggs of a female mosquito not affected by the larvicide composition of the invention).

[0115] A population of female mosquitoes receiving the larvicide composition of the invention is considered to have sufficiently decreased fertility or fecundity if at least 30%, 40%, 50%, 60%, 70%, 80%, 90% or 100% of the females in the population are infertile, e.g., unable to produce viable eggs.

[0116] Thus, the larvicide of the invention may generate a biased population of adult mosquitoes.

[0117] In addition the term may refer to rendering a mosquito at any stage, including adulthood, more susceptible to a pesticide as compared to the susceptibility of a mosquito of the same species and developmental stage which hasn't been treated with the nucleic acid larvicide.

[0118] As used herein, the term “larvicidally effective” is used to indicate an amount or concentration of the nucleic acid larvicide which is sufficient to reduce the number of mosquitoes in a geographic locus as compared to a corresponding geographic locus in the absence of the amount or concentration of the composition.

[0119] Thus the nucleic acid larvicide of some embodiments of the invention down-regulates a target gene selected from the group consisting of:

[0120] (i) affecting larval survival;

[0121] (ii) interfering with metamorphosis of larval stage to adulthood;

[0122] (iii) affecting susceptibility of mosquito larvae to a larvicide;

[0123] (iv) affecting susceptibility of an adult mosquito to an adulticide/insecticide; and

[0124] (v) affecting fertility or fecundity of a male or female mosquito.

[0125] As used herein the term “affecting” or “interfering” refers to a gene which plays a role in the above mentioned biological activity. According to a specific embodiment, the target gene is a non-redundant gene, that is, its activity is not compensated by another gene in a pathway. When needed, down-regulation of a plurality of genes (e.g., in a pathway) participating in at least one of the above-mentioned activities is contemplated (as further described hereinbelow). Alternatively, according to a specific embodiment, the plurality of target genes are from groups (i) and (ii), (i) and (iii), (i) and (iv), (i) and (v), (ii) and (iii), (ii) and (iv), (ii) and (v), (iii) and (v) and (iv) and (v) and more.

[0126] The target gene may comprise a nucleic acid sequence which is transcribed to an mRNA which codes for a polypeptide.

[0127] Alternatively, the target gene can be a non-coding gene such as a miRNA or a siRNA.

[0128] According to a specific embodiment, the target gene is endogenous to the larvae.

[0129] According to a specific embodiment, the target gene is endogenous to the pathogen.

[0130] As used herein “endogenous” refers to a gene which expression (mRNA or protein) takes place in the larvae or the pathogen. Typically, the endogenous gene is naturally expressed in the larvae or the pathogen.

[0131] Below provided are exemplary genes. Orthologs and homologs are also contemplated according to the present teachings.

[0132] Homologous sequences include both orthologous and paralogous sequences. The term “paralogous” relates to gene-duplications within the genome of a species leading to paralogous genes. The term “orthologous” relates to homologous genes in different organisms due to ancestral relationship. Thus, orthologs are evolutionary counterparts derived from a single ancestral gene in the last common ancestor of given two species (Koonin E V and Galperin M Y (Sequence—Evolution—Function: Computational Approaches in Comparative Genomics. Boston: Kluwer Academic; 2003. Chapter 2, Evolutionary Concept in Genetics and Genomics. Available from: ncbi (dot) nlm (dot) nih (dot) gov/books/NBK20255) and therefore have great likelihood of having the same function.

[0133] The term “ortholog” (also called orthologous genes) refers to genes in different species derived from a common ancestry (due to speciation).

[0134] According to a specific embodiment, the homolog sequences are at least 60%, 65%, 70%, 75%, 80%, 85%, 90%, 95% or even identical to the sequences (nucleic acid or amino acid sequences) provided hereinbelow.

[0135] The nucleic acid agent will be selected according to the target larvae and hence target genes. Exemplary target genes of the invention include adulticide/larvicide targets and fertility/fecundity targets.

[0136] Exemplary target genes of the invention are listed in Tables 1-5 below.

TABLE 1

| Seq ID | Gene Symbol |
|---|---|
| 302 | AAEL001340 |
| 303 | AAEL001606 |
| 304 | AAEL002425 |
| 305 | AAEL002792 |
| 306 | AAEL003660 |
| 307 | AAEL004696 |
| 308 | AAEL004974 |
| 309 | AAEL006254 |
| 310 | AAEL006488 |
| 311 | AAEL006492 |
| 312 | AAEL008042 |
| 313 | AAEL008587 |
| 314 | AAEL008844 |
| 315 | AAEL008924 |
| 316 | AAEL008958 |
| 317 | AAEL009114 |
| 318 | AAEL009174 |
| 319 | AAEL009340 |
| 320 | AAEL009969 |
| 321 | AAEL010565 |
| 322 | AAEL010789 |
| 323 | AAEL010792 |
| 324 | AAEL011474 |
| 325 | AAEL011478 |
| 326 | AAEL011663 |
| 327 | AAEL011757 |
| 328 | AAEL011921 |
| 329 | AAEL014330 |
| 330 | AGAP000460 |
| 331 | AGAP000460 |
| 332 | AGAP000460 |
| 333 | AGAP000471 |
| 334 | AGAP000471 |
| 335 | AGAP000471 |
| 336 | AGAP000662 |
| 337 | AGAP000662 |
| 338 | AGAP000662 |
| 339 | AGAP001177 |
| 340 | AGAP001177 |
| 341 | AGAP001177 |
| 342 | AGAP001179 |
| 343 | AGAP001179 |
| 344 | AGAP001179 |
| 345 | AGAP001271 |
| 346 | AGAP001271 |
| 347 | AGAP001271 |
| 348 | AGAP001278 |
| 349 | AGAP001278 |
| 350 | AGAP001278 |
| 351 | AGAP001293 |
| 352 | AGAP001293 |
| 353 | AGAP001293 |
| 354 | AGAP001335 |
| 355 | AGAP001335 |
| 356 | AGAP001335 |
| 357 | AGAP001337 |
| 358 | AGAP001337 |
| 359 | AGAP001337 |
| 360 | AGAP001339 |
| 361 | AGAP001339 |
| 362 | AGAP001339 |
| 363 | AGAP001367 |
| 364 | AGAP001367 |
| 365 | AGAP001367 |
| 366 | AGAP001388 |
| 367 | AGAP001388 |
| 368 | AGAP001388 |
| 369 | AGAP001463 |
| 370 | AGAP001463 |
| 371 | AGAP001463 |
| 372 | AGAP001478 |
| 373 | AGAP001478 |
| 374 | AGAP001478 |
| 375 | AGAP001481 |
| 376 | AGAP001481 |
| 377 | AGAP001481 |
| 378 | AGAP001498 |
| 379 | AGAP001498 |
| 380 | AGAP001498 |
| 381 | AGAP002471 |
| 382 | AGAP002471 |
| 383 | AGAP002471 |
| 384 | AGAP002801 |
| 385 | AGAP004050 |
| 386 | AGAP004416 |
| 387 | AGAP004416 |
| 388 | AGAP004416 |
| 389 | AGAP004645 |
| 390 | AGAP004930 |
| 391 | AGAP006887 |
| 392 | AGAP006887 |
| 393 | AGAP006887 |
| 394 | AGAP007963 |
| 395 | AGAP008806 |
| 396 | CPIJ001185 |
| 397 | CPIJ001186 |
| 398 | CPIJ001187 |
| 399 | CPIJ001560 |
| 400 | CPIJ003158 |
| 401 | CPIJ003766 |
| 402 | CPIJ004057 |
| 403 | CPIJ004058 |
| 404 | CPIJ004318 |
| 405 | CPIJ005975 |
| 406 | CPIJ005976 |
| 407 | CPIJ007071 |
| 408 | CPIJ007072 |
| 409 | CPIJ007101 |
| 410 | CPIJ007172 |
| 411 | CPIJ007789 |
| 412 | CPIJ008481 |
| 413 | CPIJ008673 |
| 414 | CPIJ009011 |
| 415 | CPIJ009270 |
| 416 | CPIJ011557 |
| 417 | CPIJ011558 |
| 418 | CPIJ011708 |
| 419 | CPIJ012810 |
| 420 | CPIJ013126 |
| 421 | CPIJ015620 |
| 422 | CPIJ015622 |
| 423 | CPIJ017065 |
| 424 | CPIJ017887 |
| 425 | CPIJ019248 |
| 426 | CPIJ019249 |
| 427 | FBgn0127180 |

TABLE 2A

| | Seq | | |
|---|---|---|---|
| | ID | Gene Symbol | Annotation |
| Enzymes | 55 | AAEL012664 | prolylcarboxypeptidase, putative |
| | 56 | AAEL002909 | lysosomal acid lipase, putative |
| | 57 | AAEL005127 | ribonuclease UK114, putative |
| | 58 | AAEL012636 | cytochrome b5, putative |
| | 59 | AAEL010276 | aminomethyltransferase |
| | 60 | AAEL013640 | lung carbonyl reductase |
| | 61 | AAEL005416 | oxidase/peroxidase |
| | 62 | AAEL013499 | prophenoloxidase |
| | 63 | AAEL003716 | ribonuclease UK114, putative |
| | 64 | AAEL012579 | aspartate aminotransferase |
| | 65 | AAEL002600 | serine protease |
| | 66 | AAEL005610 | mitochondrial ATP synthase b |
| | | | chain |
| | 67 | AAEL006446 | trehalose-6-phosphate synthase |
| | 68 | AAEL008770 | proteasome subunit beta type |
| | 69 | AAEL001427 | short-chain dehydrogenase |
| | 70 | AAEL013279 | peptidyl-prolyl cis-trans isomerase |
| | | | (cyclophilin) |
| | 71 | AAEL009875 | alanine aminotransferase |
| | 72 | AAEL005793 | AMP dependent ligase |
| | 73 | AAEL007868 | ubiquinol-cytochrome c reductase |
| | | | complex 14 kd protein |
| | 74 | AAEL008072 | NADH-plastoquinone |
| | | | oxidoreductase |
| | 75 | AAEL009324 | hydroxyacyl dehydrogenase |
| | 76 | AAEL008217 | serine-type enodpeptidase, |
| | 77 | AAEL014944 | cytochrome c oxidase polypeptide |
| | 78 | AAEL010819 | vacuolar ATP synthase subunit H |
| | 79 | AAEL010500 | glutathione-s-transferase theta, gst |
| Transport | 80 | AAEL005929 | ATP-binding cassette transporter |
| | 81 | AAEL008381 | oligopeptide transporter |
| | 82 | AAEL001626 | zinc/iron transporter |
| | 83 | AAEL012702 | ATP-binding cassette sub-family |
| | | | A member 3, putative |
| others | 84 | AAEL015515 | antibacterial peptide, putative |
| | 85 | AAEL002295 | leucine-rich transmembrane |
| | | | protein |
| | 86 | AAEL009556 | Niemann-Pick Type C-2, putative |
| | 87 | AAEL005159 | latent nuclear antigen, putative |
| | 88 | AAEL007325 | Mob3B protein, putative |
| | 89 | AAEL000679 | NEDD8, putative |
| | 90 | AAEL009209 | galactose-specific C-type lectin, |
| | | | putative |
| | 91 | AAEL001826 | odorant-binding protein 56a, |
| | | | putative |
| | 92 | AAEL002961 | Osiris, putative |
| | 93 | AAEL006830 | yellow protein precursor |
| | 94 | AAEL005772 | odorant-binding protein 99c, |
| | | | putative |
| | 95 | AAEL002813 | coupling factor, putative |
| | 96 | AAEL011090 | complement component |
| | 97 | AAEL012230 | flagellar protein, putative |
| Hypothetical | 98 | AAEL011252 | conserved hypothetical protein |
| proteins | 99 | AAEL014506 | conserved hypothetical protein |
| | 100 | AAEL003216 | conserved hypothetical protein |
| | 101 | AAEL003241 | conserved hypothetical protein |
| | 102 | AAEL007507 | conserved hypothetical protein |
| | 103 | AAEL003064 | conserved hypothetical protein |
| | 104 | AAEL010678 | conserved hypothetical protein |
| | 105 | AAEL000269 | conserved hypothetical protein |
| | 106 | AAEL006053 | conserved hypothetical protein |
| | 107 | AAEL008750 | conserved hypothetical protein |
| | 108 | AAEL010128 | conserved hypothetical protein |
| | 109 | AAEL002898 | conserved hypothetical protein |
| | 110 | AAEL007631 | conserved hypothetical protein |
| | 111 | AAEL003479 | conserved hypothetical protein |
| | 112 | AAEL013777 | conserved hypothetical protein |
| | 113 | AAEL003428 | conserved hypothetical protein |
| | 114 | AAEL014529 | conserved hypothetical protein |
| | 115 | AAEL012645 | conserved hypothetical protein |
| | 116 | AAEL004809 | conserved hypothetical protein |
| | 117 | AAEL004343 | conserved hypothetical protein |
| | 118 | AAEL003160 | conserved hypothetical protein |
| | 119 | AAEL012357 | conserved hypothetical protein |
| | 120 | AAEL009009 | conserved hypothetical protein |
| | 121 | AAEL013793 | conserved hypothetical protein |
| | 122 | AAEL002623 | conserved hypothetical protein |
| | 123 | AAEL010163 | conserved hypothetical protein |
| | 124 | AAEL002449 | conserved hypothetical protein |
| | 125 | AAEL002302 | conserved hypothetical protein |
| | 126 | AAEL008039 | conserved hypothetical protein |
| | 127 | AAEL008073 | conserved hypothetical protein |
| | 128 | AAEL007444 | conserved hypothetical protein |
| | 129 | AAEL005171 | conserved hypothetical protein |
| | 130 | AAEL006771 | conserved hypothetical protein |
| | 131 | AAEL015140 | conserved hypothetical protein |
| | 132 | AAEL001851 | conserved hypothetical protein |
| | 133 | AAEL005558 | conserved hypothetical protein |
| | 134 | AAEL002933 | conserved hypothetical protein |
| | 135 | AAEL003225 | conserved hypothetical protein |
| | 136 | AAEL001692 | conserved hypothetical protein |
| | 137 | AAEL007592 | conserved hypothetical protein |
| | 138 | AAEL005457 | conserved hypothetical protein |
| | 139 | AAEL006494 | conserved hypothetical protein |
| | 140 | AAEL013780 | conserved hypothetical protein |
| | 141 | AAEL009257 | conserved hypothetical protein |
| | 142 | AAEL000445 | conserved hypothetical protein |
| | 143 | AAEL002955 | conserved hypothetical protein |
| | 144 | AAEL002875 | conserved hypothetical protein |
| | 145 | AAEL000304 | conserved hypothetical protein |
| | 146 | AAEL000792 | conserved hypothetical protein |
| | 147 | AAEL003936 | conserved hypothetical protein |
| | 148 | AAEL006686 | conserved hypothetical protein |
| | 149 | AAEL001677 | conserved hypothetical protein |
| | 150 | AAEL000419 | conserved hypothetical protein |
| | 151 | AAEL007648 | conserved hypothetical protein |
| | 152 | AAEL006270 | conserved hypothetical protein |
| | 153 | AAEL013377 | conserved hypothetical protein |
| | 154 | AAEL002619 | conserved hypothetical protein |
| | 155 | AAEL012866 | conserved hypothetical protein |
| | 156 | AAEL014445 | conserved hypothetical protein |
| | 157 | AAEL001065 | conserved hypothetical protein |
| | 158 | AAEL011333 | conserved hypothetical protein |
| | 159 | AAEL011078 | conserved hypothetical protein |
| | 160 | AAEL010315 | conserved hypothetical protein |
| | 161 | AAEL005270 | conserved hypothetical protein |
| | 162 | AAEL004449 | conserved hypothetical protein |
| | 163 | AAEL000896 | conserved hypothetical protein |
| | 164 | AAEL010724 | conserved hypothetical protein |
| | 165 | AAEL008802 | conserved hypothetical protein |

TABLE 2B

| | Gene symbol | Gene Name |
|---|---|---|
| 430 | AAEL000043 | gustatory receptor 64e, putative |
| 431 | AAEL000020 | conserved hypothetical protein |
| 432 | AAEL000005 | hypothetical protein |
| 433 | AAEL000049 | three prime repair exonuclease 1, putative |
| 434 | AAEL000053 | myotubularin |
| 435 | AAEL000033 | conserved hypothetical protein |
| 436 | AAEL000046 | conserved hypothetical protein |
| 437 | AAEL000054 | mixed-lineage leukemia protein, mll |
| 438 | AAEL000011 | conserved hypothetical protein |
| 439 | AAEL000055 | conserved hypothetical protein |
| 440 | AAEL000543 | C-Type Lectin (CTL) - mannose binding. |
| 441 | AAEL000559 | glycosyl transferase |
| 442 | AAEL000562 | conserved hypothetical protein |
| 443 | AAEL000554 | fasciclin, putative |
| 444 | AAEL014092 | conserved hypothetical protein |
| 445 | AAEL014105 | hypothetical protein |
| 446 | AAEL014110 | sulfite reductase |
| 447 | AAEL003935 | conserved hypothetical protein |
| 448 | AAEL003940 | hypothetical protein |
| 449 | AAEL014125 | nk homeobox protein |
| 450 | AAEL014128 | hypothetical protein |
| 451 | AAEL003971 | conserved hypothetical protein |
| 452 | AAEL003959 | short-chain dehydrogenase |
| 453 | AAEL014161 | amino acids transporter |
| 454 | AAEL014163 | conserved hypothetical protein |
| 455 | AAEL014183 | hypothetical protein |
| 456 | AAEL003983 | adenylate cyclase |
| 457 | AAEL003979 | deadenylation factor EDEN-BP, putative |
| 458 | AAEL014196 | conserved hypothetical protein |
| 459 | AAEL003988 | hypothetical protein |
| 460 | AAEL003986 | conserved hypothetical protein |
| 461 | AAEL014222 | low-density lipoprotein receptor (ldl) |
| 462 | AAEL014229 | conserved hypothetical protein |
| 463 | AAEL014237 | conserved hypothetical protein |
| 464 | AAEL014250 | insect replication protein a |
| 465 | AAEL004030 | conserved hypothetical protein |
| 466 | AAEL004018 | conserved hypothetical protein |
| 467 | AAEL014257 | hypothetical protein |
| 468 | AAEL014268 | hypothetical protein |
| 469 | AAEL014271 | conserved hypothetical protein |
| 470 | AAEL014272 | molybdopterin cofactor sulfurase (mosc) |
| 471 | AAEL014276 | conserved hypothetical protein |
| 472 | AAEL014283 | conserved hypothetical protein |
| 473 | AAEL014291 | hypothetical protein |
| 474 | AAEL004055 | conserved hypothetical protein |
| 475 | AAEL004076 | Ubiquitin-like modifier-activating enzyme 5 |
| | | (Ubiquitin-activating enzyme 5) |
| 476 | AAEL004068 | hypothetical protein |
| 477 | AAEL014302 | conserved hypothetical protein |
| 478 | AAEL014306 | hypothetical protein |
| 479 | AAEL014304 | hypothetical protein |
| 480 | AAEL014318 | conserved hypothetical protein |
| 481 | AAEL014314 | DNA primase |
| 482 | AAEL014317 | conserved hypothetical protein |
| 483 | AAEL014316 | conserved hypothetical protein |
| 484 | AAEL014319 | hypothetical protein |
| 485 | AAEL004084 | conserved hypothetical protein |
| 486 | AAEL004094 | pou domain |
| 487 | AAEL004104 | hypothetical protein |
| 488 | AAEL014324 | conserved hypothetical protein |
| 489 | AAEL004130 | conserved hypothetical protein |
| 490 | AAEL004129 | conserved hypothetical protein |
| 491 | AAEL014341 | metallocarboxypeptidase, putative |
| 492 | AAEL014342 | hypothetical protein |
| 493 | AAEL004190 | hypothetical protein |
| 494 | AAEL004178 | ribose-phosphate pyrophosphokinase 1, |
| 495 | AAEL004172 | tubulin alpha chain |
| 496 | AAEL004176 | microtubule binding protein, putative |
| 497 | AAEL004150 | fibrinogen and fibronectin |
| 498 | AAEL004188 | conserved hypothetical protein |
| 499 | AAEL004191 | selenocysteine-specific elongation factor |
| 500 | AAEL014367 | hypothetical protein |
| 501 | AAEL014373 | GPCR Dopamine Family |
| 502 | AAEL014389 | conserved hypothetical protein |
| 503 | AAEL000584 | sex-determining region y protein, sry |
| 504 | AAEL000589 | serine/threonine protein kinase |
| 505 | AAEL000585 | hypothetical protein |
| 506 | AAEL017305 | odorant receptor |
| 507 | AAEL014402 | conserved hypothetical protein |
| 508 | AAEL014411 | cytochrome P450 |
| 509 | AAEL004234 | conserved hypothetical protein |
| 510 | AAEL014428 | ABC transporter |
| 511 | AAEL014431 | conserved hypothetical protein |
| 512 | AAEL014441 | conserved hypothetical protein |
| 513 | AAEL004253 | hypothetical protein |
| 514 | AAEL004300 | conserved hypothetical protein |
| 515 | AAEL004302 | conserved hypothetical protein |
| 516 | AAEL004296 | conserved hypothetical protein |
| 517 | AAEL004317 | hypothetical protein |
| 518 | AAEL004315 | hypothetical protein |
| 519 | AAEL004348 | NF-180, putative |
| 520 | AAEL004328 | origin recognition complex subunit |
| 521 | AAEL014524 | DNA replication licensing factor MCM4 |
| 522 | AAEL014533 | conserved hypothetical protein |
| 523 | AAEL014536 | embryonic ectoderm development protein |
| 524 | AAEL014548 | Thioredoxin Peroxidase. |
| 525 | AAEL014557 | homeobox protein cdx |
| 526 | AAEL004386 | heme peroxidase |
| 527 | AAEL004390 | heme peroxidase |
| 528 | AAEL004399 | GPCR Glycoprotein Hormone Family |
| 529 | AAEL017431 | hypothetical protein |
| 530 | AAEL004388 | heme peroxidase |
| 531 | AAEL004396 | GPCR Octopamine/Tyramine Family |
| 532 | AAEL014572 | tetraspanin 97e |
| 533 | AAEL017559 | hypothetical protein |
| 534 | AAEL014577 | conserved hypothetical protein |
| 535 | AAEL014589 | reticulocalbin |
| 536 | AAEL004416 | histone deacetylase |
| 537 | AAEL004443 | nitrilase, putative |
| 538 | AAEL004437 | dual-specificity protein phosphatase, putative |
| 539 | AAEL004429 | conserved hypothetical protein |
| 540 | AAEL014627 | short-chain dehydrogenase |
| 541 | AAEL014633 | conserved hypothetical protein |
| 542 | AAEL000604 | hypothetical protein |
| 543 | AAEL000601 | hypothetical protein |
| 544 | AAEL004482 | conserved hypothetical protein |
| 545 | AAEL004462 | hypothetical protein |
| 546 | AAEL004468 | hypothetical protein |
| 547 | AAEL004479 | organic cation transporter |
| 548 | AAEL004486 | valacyclovir hydrolase |
| 549 | AAEL004510 | hypothetical protein |
| 550 | AAEL004493 | ribosome biogenesis protein tsr1 (20S rRNA |
| | | accumulation protein 1) |
| 551 | AAEL017243 | hypothetical protein |
| 552 | AAEL004518 | Clip-Domain Serine Protease family C |
| 553 | AAEL004537 | hypothetical protein |
| 554 | AAEL004539 | hypothetical protein |
| 555 | AAEL014693 | conserved hypothetical protein |
| 556 | AAEL004559 | synaptosomal associated protein |
| 557 | AAEL004562 | DNA polymerase eta |
| 558 | AAEL004592 | tyrosine-protein kinase src64b |
| 559 | AAEL004598 | hypothetical protein |
| 560 | AAEL014744 | conserved hypothetical protein |
| 561 | AAEL004627 | hypothetical protein |
| 562 | AAEL004635 | hypothetical protein |
| 563 | AAEL004638 | conserved hypothetical protein |
| 564 | AAEL004645 | hypothetical protein |
| 565 | AAEL004650 | hypothetical protein |
| 566 | AAEL017478 | hypothetical protein |
| 567 | AAEL004623 | band 4.1-like protein 5, putative |
| 568 | AAEL004642 | hypothetical protein |
| 569 | AAEL014756 | hypothetical protein |
| 570 | AAEL004680 | nuclear lamin L1 alpha, putative |
| 571 | AAEL004698 | DNA primase large subunit |
| 572 | AAEL004697 | synoviolin |
| 573 | AAEL014791 | hypothetical protein |
| 574 | AAEL014800 | conserved hypothetical protein |
| 575 | AAEL014814 | conserved hypothetical protein |
| 576 | AAEL017122 | hypothetical protein |
| 577 | AAEL017102 | hypothetical protein |
| 578 | AAEL014823 | conserved hypothetical protein |
| 579 | AAEL014825 | conserved hypothetical protein |
| 580 | AAEL014835 | conserved hypothetical protein |
| 581 | AAEL004777 | Glycoprotein Hormone Family |
| 582 | AAEL017453 | hypothetical protein |
| 583 | AAEL004748 | pupal cuticle protein, putative |
| 584 | AAEL004771 | pupal cuticle protein, putative |
| 585 | AAEL004782 | pupal cuticle protein, putative |
| 586 | AAEL014844 | conserved hypothetical protein |
| 587 | AAEL000666 | pmp22 peroxisomal membrane protein, putative |
| 588 | AAEL000672 | cyclin a |
| 589 | AAEL000664 | hypothetical protein |
| 590 | AAEL000662 | conserved hypothetical protein |
| 591 | AAEL000649 | conserved hypothetical protein |
| 592 | AAEL000658 | conserved hypothetical protein |
| 593 | AAEL000675 | hypothetical protein |
| 594 | AAEL004796 | hypothetical protein |
| 595 | AAEL004789 | hypothetical protein |
| 596 | AAEL004818 | conserved hypothetical protein |
| 597 | AAEL004805 | potassium-dependent sodium-calcium exchanger, |
| | | putative |
| 598 | AAEL004821 | potassium-dependent sodium-calcium exchanger, |
| | | putative |
| 599 | AAEL004842 | conserved hypothetical protein |
| 600 | AAEL004837 | hypothetical protein |
| 601 | AAEL004850 | hypothetical protein |
| 602 | AAEL004835 | conserved hypothetical protein |
| 603 | AAEL004858 | conserved hypothetical protein |
| 604 | AAEL004841 | conserved hypothetical protein |
| 605 | AAEL004882 | conserved hypothetical protein |
| 606 | AAEL004892 | conserved hypothetical protein |
| 607 | AAEL004864 | hypothetical protein |
| 608 | AAEL014904 | DEAD box ATP-dependent RNA helicase |
| 609 | AAEL014908 | conserved hypothetical protein |
| 610 | AAEL014911 | synaptic vesicle protein |
| 611 | AAEL017811 | RNase MRP |
| 612 | AAEL014918 | lysosomal acid lipase, putative |
| 613 | AAEL014924 | cytochrome P450 |
| 614 | AAEL014925 | conserved hypothetical protein |
| 615 | AAEL004914 | conserved hypothetical protein |
| 616 | AAEL004903 | conserved hypothetical protein |
| 617 | AAEL014927 | sodium/chloride dependent transporter |
| 618 | AAEL016998 | hypothetical protein |
| 619 | AAEL014946 | protease U48 caax prenyl protease rce1 |
| 620 | AAEL014956 | internalin A, putative |
| 621 | AAEL004955 | hypothetical protein |
| 622 | AAEL004949 | elongase, putative |
| 623 | AAEL004976 | conserved hypothetical protein |
| 624 | AAEL004970 | conserved hypothetical protein |
| 625 | AAEL005006 | cytochrome P450 |
| 626 | AAEL005000 | conserved hypothetical protein |
| 627 | AAEL005007 | hypothetical protein |
| 628 | AAEL005009 | groucho protein (enhancer of split) |
| 629 | AAEL014984 | adult cuticle protein, putative |
| 630 | AAEL014986 | conserved hypothetical protein |
| 631 | AAEL014992 | rab gdp/GTP exchange factor |
| 632 | AAEL014989 | peptidoglycan recognition protein-1, putative |
| 633 | AAEL005040 | conserved hypothetical protein |
| 634 | AAEL005033 | conserved hypothetical protein |
| 635 | AAEL015011 | hypothetical protein |
| 636 | AAEL000692 | partner of sld5 |
| 637 | AAEL005078 | zinc finger protein |
| 638 | AAEL005049 | heterogeneous nuclear ribonucleoprotein |
| 639 | AAEL005070 | conserved hypothetical protein |
| 640 | AAEL005087 | hypothetical protein |
| 641 | AAEL015018 | toll |
| 642 | AAEL015035 | transcription enhancer factor, putative |
| 643 | AAEL015038 | palmitoyl-protein thioesterase |
| 644 | AAEL015047 | hypothetical protein |
| 645 | AAEL005123 | hypothetical protein |
| 646 | AAEL005110 | conserved hypothetical protein |
| 647 | AAEL005115 | hypothetical protein |
| 648 | AAEL005128 | hypothetical protein |
| 649 | AAEL005103 | conserved hypothetical protein |
| 650 | AAEL005145 | conserved hypothetical protein |
| 651 | AAEL015071 | gustatory receptor 64a, putative |
| 652 | AAEL005212 | hypothetical protein |
| 653 | AAEL005197 | conserved hypothetical protein |
| 654 | AAEL005175 | lipin |
| 655 | AAEL005217 | membrin |
| 656 | AAEL005215 | conserved hypothetical protein |
| 657 | AAEL005235 | conserved hypothetical protein |
| 658 | AAEL005238 | mck1 |
| 659 | AAEL015083 | conserved hypothetical protein |
| 660 | AAEL015080 | conserved hypothetical protein |
| 661 | AAEL005241 | lateral signaling target protein 2 |
| 662 | AAEL005259 | conserved hypothetical protein |
| 663 | AAEL005261 | conserved hypothetical protein |
| 664 | AAEL015107 | conserved hypothetical protein |
| 665 | AAEL005286 | hypothetical protein |
| 666 | AAEL015119 | cuticle protein, putative |
| 667 | AAEL000749 | conserved hypothetical protein |
| 668 | AAEL005326 | conserved hypothetical protein |
| 669 | AAEL005312 | conserved hypothetical protein |
| 670 | AAEL015136 | Niemann-Pick Type C-2, putative |
| 671 | AAEL005348 | hypothetical protein |
| 672 | AAEL005351 | leucine-rich transmembrane protein |
| 673 | AAEL005362 | hypothetical protein |
| 674 | AAEL005364 | adaptin, alpha/gamma/epsilon |
| 675 | AAEL015161 | conserved hypothetical protein |
| 676 | AAEL005383 | Adenosine monophosphate-protein transferase |
| | | FICD homolog (EC 2.7.7.n1) |
| 677 | AAEL005420 | p15-2a protein, putative |
| 678 | AAEL017015 | hypothetical protein |
| 679 | AAEL005430 | hypothetical protein |
| 680 | AAEL005439 | mical |
| 681 | AAEL005452 | conserved hypothetical protein |
| 682 | AAEL005474 | hypothetical protein |
| 683 | AAEL000773 | kinesin heavy chain |
| 684 | AAEL000754 | conserved hypothetical protein |
| 685 | AAEL000779 | hypothetical protein |
| 686 | AAEL000776 | conserved hypothetical protein |
| 687 | AAEL000790 | conserved hypothetical protein |
| 688 | AAEL000793 | venom allergen |
| 689 | AAEL000769 | arginine/serine-rich splicing factor |
| 690 | AAEL005513 | mothers against dpp protein |
| 691 | AAEL015222 | adult cuticle protein, putative |
| 692 | AAEL015232 | GTP-binding protein rit |
| 693 | AAEL005549 | hypothetical protein |
| 694 | AAEL005588 | conserved hypothetical protein |
| 695 | AAEL005584 | hypothetical protein |
| 696 | AAEL015243 | hypothetical protein |
| 697 | AAEL005638 | conserved hypothetical protein |
| 698 | AAEL005637 | vegetatible incompatibility protein HET-E-1, |
| | | putative |
| 699 | AAEL017446 | gustatory receptor Gr33a |
| 700 | AAEL005656 | myosin heavy chain, nonmuscle or smooth |
| | | muscle |
| 701 | AAEL015270 | hypothetical protein |
| 702 | AAEL005668 | conserved hypothetical protein |
| 703 | AAEL000816 | carbonic anhydrase |
| 704 | AAEL000805 | conserved hypothetical protein |
| 705 | AAEL000819 | hypothetical protein |
| 706 | AAEL000800 | microsomal dipeptidase |
| 707 | AAEL005707 | gonadotropin inducible transcription factor |
| 708 | AAEL005684 | chitinase |
| 709 | AAEL005724 | conserved hypothetical protein |
| 710 | AAEL005716 | conserved hypothetical protein |
| 711 | AAEL005721 | conserved hypothetical protein |
| 712 | AAEL015293 | zinc finger protein |
| 713 | AAEL005786 | conserved hypothetical protein |
| 714 | AAEL005775 | cytochrome P450 |
| 715 | AAEL005796 | eukaryotic translation initiation factor 4e type |
| 716 | AAEL005804 | hypothetical protein |
| 717 | AAEL005805 | alanyl aminopeptidase |
| 718 | AAEL005808 | alanyl aminopeptidase |
| 719 | AAEL005853 | amino acid transporter |
| 720 | AAEL005856 | signal recognition particle receptor alpha subunit |
| | | (sr-alpha) |
| 721 | AAEL005859 | amino acid transporter |
| 722 | AAEL000903 | Enhancer of yellow 2 transcription factor |
| 723 | AAEL000912 | conserved hypothetical protein |
| 724 | AAEL000889 | hypothetical protein |
| 725 | AAEL000884 | eukaryotic translation initiation factor 2 alpha |
| | | kinase 1 (heme-regulated eukaryotic initiation |
| | | factor eif-2-alpha kinase) |
| 726 | AAEL000905 | hypothetical protein |
| 727 | AAEL000923 | conserved hypothetical protein |
| 728 | AAEL005938 | hypothetical protein |
| 729 | AAEL005936 | conserved hypothetical protein |
| 730 | AAEL005932 | conserved hypothetical protein |
| 731 | AAEL005924 | hypothetical protein |
| 732 | AAEL017009 | odorant receptor |
| 733 | AAEL005922 | hypothetical protein |
| 734 | AAEL005916 | hypothetical protein |
| 735 | AAEL015327 | conserved hypothetical protein |
| 736 | AAEL015330 | hypothetical protein |
| 737 | AAEL015336 | conserved hypothetical protein |
| 738 | AAEL005990 | adrenodoxin reductase, putative |
| 739 | AAEL006010 | conserved hypothetical protein |
| 740 | AAEL005998 | rap GTPase-activating protein |
| 741 | AAEL006031 | conserved hypothetical protein |
| 742 | AAEL006023 | Vanin-like protein 1 precursor, putative |
| 743 | AAEL006030 | hypothetical protein |
| 744 | AAEL006037 | hypothetical protein |
| 745 | AAEL006045 | reticulon/nogo receptor |
| 746 | AAEL006055 | potassium channel interacting protein |
| 747 | AAEL006084 | conserved hypothetical protein |
| 748 | AAEL006091 | rab6 |
| 749 | AAEL006098 | conserved hypothetical protein |
| 750 | AAEL000938 | conserved hypothetical protein |
| 751 | AAEL000945 | conserved hypothetical protein |
| 752 | AAEL000971 | smile protein |
| 753 | AAEL000973 | conserved hypothetical protein |
| 754 | AAEL000932 | conserved hypothetical protein |
| 755 | AAEL000953 | conserved hypothetical protein |
| 756 | AAEL000964 | regulatory factor X-associated ankyrin-containing |
| | | protein, putative |
| 757 | AAEL000934 | clathrin light chain |
| 758 | AAEL006111 | hypothetical protein |
| 759 | AAEL006140 | mitosis inhibitor protein kinase |
| 760 | AAEL006138 | hypothetical protein |
| 761 | AAEL006130 | hypothetical protein |
| 762 | AAEL006208 | conserved hypothetical protein |
| 763 | AAEL006211 | conserved hypothetical protein |
| 764 | AAEL006219 | heparan sulphate 2-o-sulfotransferase |
| 765 | AAEL006239 | glycerol kinase |
| 766 | AAEL006243 | hypothetical protein |
| 767 | AAEL006241 | sugar transporter |
| 768 | AAEL015376 | conserved hypothetical protein |
| 769 | AAEL006258 | pickpocket |
| 770 | AAEL015380 | conserved hypothetical protein |
| 771 | AAEL006277 | conserved hypothetical protein |
| 772 | AAEL006279 | hypothetical protein |
| 773 | AAEL006262 | mitochondrial carrier protein |
| 774 | AAEL006298 | conserved hypothetical protein |
| 775 | AAEL006303 | integral membrane protein, Tmp21-I (p23), |
| | | putative |
| 776 | AAEL006286 | conserved hypothetical protein |
| 777 | AAEL000113 | conserved hypothetical protein |
| 778 | AAEL000128 | P130 |
| 779 | AAEL000141 | immunophilin FKBP46, putative |
| 780 | AAEL000154 | conserved hypothetical protein |
| 781 | AAEL000999 | DNA replication licensing factor MCM7 |
| 782 | AAEL017422 | hypothetical protein |
| 783 | AAEL000974 | zinc finger protein |
| 784 | AAEL000980 | hypothetical protein |
| 785 | AAEL006308 | px serine/threonine kinase (pxk) |
| 786 | AAEL006321 | 1-acylglycerol-3-phosphate acyltransferase |
| 787 | AAEL006309 | conserved hypothetical protein |
| 788 | AAEL006341 | conserved hypothetical protein |
| 789 | AAEL006326 | deoxyribonuclease I, putative |
| 790 | AAEL006340 | conserved hypothetical protein |
| 791 | AAEL006360 | conserved hypothetical protein |
| 792 | AAEL006370 | amsh |
| 793 | AAEL006371 | oviductin |
| 794 | AAEL006392 | hypothetical protein |
| 795 | AAEL006405 | hypothetical protein |
| 796 | AAEL006450 | integral membrane protein, putative |
| 797 | AAEL006447 | GATA transcription factor (GATAb) |
| 798 | AAEL006460 | par-6 gamma |
| 799 | AAEL006455 | calcium-activated potassium channel |
| 800 | AAEL006498 | long wavelength sensitive opsin |
| 801 | AAEL006523 | crk |
| 802 | AAEL006538 | peroxisomal membrane protein 2, pxmp2 |
| 803 | AAEL006556 | hypothetical protein |
| 804 | AAEL006564 | mitochondrial RNA splicing protein |
| 805 | AAEL006581 | juvenile hormone-inducible protein, putative |
| 806 | AAEL015414 | hypothetical protein |
| 807 | AAEL006603 | conserved hypothetical protein |
| 808 | AAEL006660 | conserved hypothetical protein |
| 809 | AAEL006657 | hypothetical protein |
| 810 | AAEL006656 | conserved hypothetical protein |
| 811 | AAEL006654 | conserved hypothetical protein |
| 812 | AAEL006662 | hypothetical protein |
| 813 | AAEL006672 | conserved hypothetical protein |
| 814 | AAEL006684 | Putative oxidoreductase GLYR1 homolog |
| | | (EC 1.—.—.—)(Glyoxylate reductase |
| | | 1 homolog)(Nuclear protein NP60 homolog) |
| 815 | AAEL006704 | fibrinogen and fibronectin |
| 816 | AAEL006694 | hypothetical protein |
| 817 | AAEL017095 | hypothetical protein |
| 818 | AAEL006706 | conserved hypothetical protein |
| 819 | AAEL006713 | U2 snrnp auxiliary factor, small subunit |
| 820 | AAEL006727 | multisynthetase complex, auxiliary protein, |
| | | p38, putative |
| 821 | AAEL001093 | PHD finger protein |
| 822 | AAEL001053 | hypothetical protein |
| 823 | AAEL001088 | beta-1,3-galactosyltransferase |
| 824 | AAEL001067 | hypothetical protein |
| 825 | AAEL006761 | hypothetical protein |
| 826 | AAEL006766 | hypothetical protein |
| 827 | AAEL006777 | hypothetical protein |
| 828 | AAEL006759 | hypothetical protein |
| 829 | AAEL006768 | hypothetical protein |
| 830 | AAEL006801 | conserved hypothetical protein |
| 831 | AAEL017112 | hypothetical protein |
| 832 | AAEL006823 | AMP dependent ligase |
| 833 | AAEL006847 | conserved hypothetical protein |
| 834 | AAEL006876 | igf2 mRNA binding protein, putative |
| 835 | AAEL006906 | NBP2b protein, putative |
| 836 | AAEL006923 | conserved hypothetical protein |
| 837 | AAEL006931 | hypothetical protein |
| 838 | AAEL006934 | Mediator of RNA polymerase II transcription |
| | | subunit 19 (Mediator complex subunit 19) |
| 839 | AAEL006939 | smaug protein |
| 840 | AAEL001148 | homeobox protein |
| 841 | AAEL001137 | hypothetical protein |
| 842 | AAEL001121 | n-acetylgalactosaminyltransferase |
| 843 | AAEL001116 | hypothetical protein |
| 844 | AAEL001125 | p15-2b protein, putative |
| 845 | AAEL001113 | inorganic phosphate cotransporter, putative |
| 846 | AAEL006972 | hepatocellular carcinoma-associated antigen |
| 847 | AAEL006961 | lipase |
| 848 | AAEL006982 | lipase |
| 849 | AAEL006998 | conserved hypothetical protein |
| 850 | AAEL006997 | hypothetical protein |
| 851 | AAEL006986 | conserved hypothetical protein |
| 852 | AAEL007007 | DNA replication licensing factor MCM2 |
| 853 | AAEL007053 | hypothetical protein |
| 854 | AAEL007046 | mitochondrial brown fat uncoupling protein |
| 855 | AAEL007056 | btf |
| 856 | AAEL007073 | hypothetical protein |
| 857 | AAEL007075 | conserved hypothetical protein |
| 858 | AAEL007071 | conserved hypothetical protein |
| 859 | AAEL017835 | 18S_rRNA |
| 860 | AAEL007095 | adult cuticle protein, putative |
| 861 | AAEL007101 | adult cuticle protein, putative |
| 862 | AAEL007091 | single-stranded DNA-binding protein mssp-1 |
| 863 | AAEL007093 | conserved hypothetical protein |
| 864 | AAEL007097 | 4-nitrophenylphosphatase |
| 865 | AAEL007128 | sugar transporter |
| 866 | AAEL017220 | hypothetical protein |
| 867 | AAEL007134 | hypothetical protein |
| 868 | AAEL001176 | s-adenosylmethionine decarboxylase |
| 869 | AAEL017083 | hypothetical protein |
| 870 | AAEL001180 | hypothetical protein |
| 871 | AAEL001162 | conserved hypothetical protein |
| 872 | AAEL001169 | Ribosome biogenesis protein BOP1 homolog |
| 873 | AAEL017069 | hypothetical protein |
| 874 | AAEL001158 | fructose-1,6-bisphosphatase |
| 875 | AAEL001157 | light protein |
| 876 | AAEL007171 | protein phosphatase 2c |
| 877 | AAEL007152 | hypothetical protein |
| 878 | AAEL007158 | nnp-1 protein (novel nuclear protein 1) (nop52) |
| 879 | AAEL007162 | autophagy related gene |
| 880 | AAEL007173 | conserved hypothetical protein |
| 881 | AAEL007198 | Osiris, putative |
| 882 | AAEL007221 | brain-specific homeobox protein, putative |
| 883 | AAEL007229 | conserved hypothetical protein |
| 884 | AAEL007262 | hypothetical protein |
| 885 | AAEL007261 | conserved hypothetical protein |
| 886 | AAEL007270 | hypothetical protein |
| 887 | AAEL015464 | histone H1, putative |
| 888 | AAEL007287 | conserved hypothetical protein |
| 889 | AAEL007290 | conserved hypothetical protein |
| 890 | AAEL007308 | glycosyltransferase |
| 891 | AAEL007298 | conserved hypothetical protein |
| 892 | AAEL007323 | deoxyuridine 5′-triphosphate nucleotidohydrolase |
| 893 | AAEL007339 | conserved hypothetical protein |
| 894 | AAEL007333 | hypothetical protein |
| 895 | AAEL001201 | hypothetical protein |
| 896 | AAEL007399 | conserved hypothetical protein |
| 897 | AAEL007432 | serine collagenase 1 precursor, putative |
| 898 | AAEL007427 | zinc finger protein |
| 899 | AAEL007438 | dipeptidyl-peptidase |
| 900 | AAEL007448 | dipeptidyl-peptidase |
| 901 | AAEL017387 | hypothetical protein |
| 902 | AAEL007445 | conserved hypothetical protein |
| 903 | AAEL007441 | translocon-associated protein, gamma subunit |
| 904 | AAEL007447 | hypothetical protein |
| 905 | AAEL007457 | insect origin recognition complex subunit |
| 906 | AAEL007456 | zinc finger protein, putative |
| 907 | AAEL007464 | hypothetical protein |
| 908 | AAEL007470 | staufen |
| 909 | AAEL007458 | amino acid transporter |
| 910 | AAEL007476 | makorin |
| 911 | AAEL007484 | protein transport protein sec23 |
| 912 | AAEL001231 | MIND-MELD/ADAM |
| 913 | AAEL001226 | conserved hypothetical protein |
| 914 | AAEL007523 | peroxisomal n1-acetyl-spermine/spermidine |
| | | oxidase |
| 915 | AAEL007543 | hypothetical protein |
| 916 | AAEL007554 | conserved hypothetical protein |
| 917 | AAEL007563 | Dual Oxidase: Peroxidase and NADPH- |
| | | Oxidase domains. |
| 918 | AAEL007581 | Rfc5p, putative |
| 919 | AAEL007584 | conserved hypothetical protein |
| 920 | AAEL007604 | odorant-binding protein 56a, putative |
| 921 | AAEL007612 | hypothetical protein |
| 922 | AAEL007611 | hypothetical protein |
| 923 | AAEL001240 | GPCR Orphan/Putative Class B Family |
| 924 | AAEL007639 | conserved hypothetical protein |
| 925 | AAEL007657 | low-density lipoprotein receptor (ldl) |
| 926 | AAEL007656 | receptor for activated C kinase, putative |
| 927 | AAEL007658 | partitioning defective 3, par-3 |
| 928 | AAEL007674 | conserved hypothetical protein |
| 929 | AAEL007677 | phospholysine phosphohistidine inorganic |
| | | pyrophosphate phosphatase |
| 930 | AAEL007692 | conserved hypothetical protein |
| 931 | AAEL007726 | hypothetical protein |
| 932 | AAEL017004 | hypothetical protein |
| 933 | AAEL007737 | hypothetical protein |
| 934 | AAEL007757 | conserved hypothetical protein |
| 935 | AAEL007761 | chloride intracellular channel |
| 936 | AAEL007769 | hypothetical protein |
| 937 | AAEL007768 | TOLL pathway signaling. |
| 938 | AAEL007767 | Protein kintoun |
| 939 | AAEL001246 | Thymidylate kinase, putative |
| 940 | AAEL007813 | hypothetical protein |
| 941 | AAEL017497 | hypothetical protein |
| 942 | AAEL007810 | conserved hypothetical protein |
| 943 | AAEL007819 | hypothetical protein |
| 944 | AAEL017434 | hypothetical protein |
| 945 | AAEL007835 | serine/threonine protein kinase |
| 946 | AAEL007828 | palmitoyl-protein thioesterase |
| 947 | AAEL015517 | conserved hypothetical protein |
| 948 | AAEL007859 | conserved hypothetical protein |
| 949 | AAEL007862 | conserved hypothetical protein |
| 950 | AAEL007855 | hypothetical protein |
| 951 | AAEL007867 | hypothetical protein |
| 952 | AAEL007870 | hypothetical protein |
| 953 | AAEL007873 | hypothetical protein |
| 954 | AAEL007875 | hypothetical protein |
| 955 | AAEL007907 | serine/threonine protein kinase |
| 956 | AAEL007899 | spermatogenesis associated factor |
| 957 | AAEL007896 | hypothetical protein |
| 958 | AAEL007912 | conserved hypothetical protein |
| 959 | AAEL007926 | retinoid-inducible serine carboxypeptidase |
| | | (serine carboxypeptidase |
| 960 | AAEL007922 | conserved hypothetical protein |
| 961 | AAEL007921 | zinc finger protein |
| 962 | AAEL001321 | transcription factor dp |
| 963 | AAEL001296 | hypothetical protein |
| 964 | AAEL007932 | hypothetical protein |
| 965 | AAEL007939 | conserved hypothetical protein |
| 966 | AAEL007959 | conserved hypothetical protein |
| 967 | AAEL007977 | hypothetical protein |
| 968 | AAEL007991 | conserved hypothetical protein |
| 969 | AAEL007987 | SEC63 protein, putative |
| 970 | AAEL007997 | conserved hypothetical protein |
| 971 | AAEL008001 | conserved hypothetical protein |
| 972 | AAEL008020 | sorting nexin |
| 973 | AAEL017171 | hypothetical protein |
| 974 | AAEL008043 | PNR-like nuclear receptor |
| 975 | AAEL008041 | bleomycin hydrolase |
| 976 | AAEL008050 | hypothetical protein |
| 977 | AAEL008074 | hypothetical protein |
| 978 | AAEL008057 | myosin light chain kinase |
| 979 | AAEL008065 | hypothetical protein |
| 980 | AAEL000208 | copii-coated vesicle membrane protein P24 |
| 981 | AAEL000186 | conserved hypothetical protein |
| 982 | AAEL000193 | histone-lysine n-methyltransferase |
| 983 | AAEL000185 | eukaryotic translation initiation factor |
| 984 | AAEL001327 | conserved hypothetical protein |
| 985 | AAEL001348 | conserved hypothetical protein |
| 986 | AAEL001357 | hypothetical protein |
| 987 | AAEL017348 | hypothetical protein |
| 988 | AAEL008088 | conserved hypothetical protein |
| 989 | AAEL017518 | hypothetical protein |
| 990 | AAEL008101 | hypothetical protein |
| 991 | AAEL008099 | procollagen-lysine,2-oxoglutarate |
| | | 5-dioxygenase |
| 992 | AAEL008126 | GPCR Latrophilin Family |
| 993 | AAEL008137 | hypothetical protein |
| 994 | AAEL008150 | hypothetical protein |
| 995 | AAEL008182 | conserved hypothetical protein |
| 996 | AAEL008184 | conserved hypothetical protein |
| 997 | AAEL008183 | t complex protein |
| 998 | AAEL008185 | conserved hypothetical protein |
| 999 | AAEL008189 | conserved hypothetical protein |
| 1000 | AAEL008220 | conserved hypothetical protein |
| 1001 | AAEL008233 | conserved hypothetical protein |
| 1002 | AAEL008236 | sidestep protein |
| 1003 | AAEL008224 | hypothetical protein |
| 1004 | AAEL008257 | heterogeneous nuclear ribonucleoprotein 27c |
| 1005 | AAEL008256 | cyclin A3, putative |
| 1006 | AAEL001372 | sentrin/sumo-specific protease senp7 |
| 1007 | AAEL008261 | hypothetical protein |
| 1008 | AAEL008320 | conserved hypothetical protein |
| 1009 | AAEL008322 | GPCR Frizzled/Smoothened Family |
| 1010 | AAEL008351 | POSSIBLE INTEGRAL MEMBRANE |
| | | EFFLUX PROTEIN EFPA, putative |
| 1011 | AAEL008356 | hypothetical protein |
| 1012 | AAEL008359 | hypothetical protein |
| 1013 | AAEL015551 | conserved hypothetical protein |
| 1014 | AAEL001399 | conserved hypothetical protein |
| 1015 | AAEL001437 | conserved hypothetical protein |
| 1016 | AAEL001439 | mitochondrial ribosomal protein, L22, putative |
| 1017 | AAEL008379 | P38 mapk |
| 1018 | AAEL008387 | atrial natriuretic peptide receptor |
| 1019 | AAEL008406 | cationic amino acid transporter |
| 1020 | AAEL008421 | cadherin |
| 1021 | AAEL017350 | hypothetical protein |
| 1022 | AAEL008444 | conserved hypothetical protein |
| 1023 | AAEL008461 | surfeit locus protein |
| 1024 | AAEL008476 | conserved hypothetical protein |
| 1025 | AAEL008500 | DEAD box ATP-dependent RNA helicase |
| 1026 | AAEL008503 | hypothetical protein |
| 1027 | AAEL001451 | DNA repair protein Rad62, putative |
| 1028 | AAEL001464 | conserved hypothetical protein |
| 1029 | AAEL008510 | sphingosine kinase a, b |
| 1030 | AAEL008511 | hypothetical protein |
| 1031 | AAEL008555 | conserved hypothetical protein |
| 1032 | AAEL008522 | conserved hypothetical protein |
| 1033 | AAEL008544 | zinc finger protein, putative |
| 1034 | AAEL008537 | transcription factor grauzone, putative |
| 1035 | AAEL008535 | conserved hypothetical protein |
| 1036 | AAEL008521 | conserved hypothetical protein |
| 1037 | AAEL017089 | hypothetical protein |
| 1038 | AAEL008533 | conserved hypothetical protein |
| 1039 | AAEL008547 | conserved hypothetical protein |
| 1040 | AAEL008526 | conserved hypothetical protein |
| 1041 | AAEL008570 | glycoprotein, putative |
| 1042 | AAEL008557 | conserved hypothetical protein |
| 1043 | AAEL008583 | conserved hypothetical protein |
| 1044 | AAEL008580 | conserved hypothetical protein |
| 1045 | AAEL008579 | zinc finger protein |
| 1046 | AAEL015565 | hypothetical protein |
| 1047 | AAEL008602 | conserved hypothetical protein |
| 1048 | AAEL008593 | NAD dependent epimerase/dehydratase |
| 1049 | AAEL008623 | conserved hypothetical protein |
| 1050 | AAEL008638 | cytochrome P450 |
| 1051 | AAEL001490 | acylphosphatase, putative |
| 1052 | AAEL001505 | conserved hypothetical protein |
| 1053 | AAEL001506 | U3 small nucleolar ribonucleoprotein |
| | | protein mpp10 |
| 1054 | AAEL001481 | hypothetical protein |
| 1055 | AAEL015571 | conserved hypothetical protein |
| 1056 | AAEL008678 | conserved hypothetical protein |
| 1057 | AAEL008675 | hypothetical protein |
| 1058 | AAEL008722 | hypothetical protein |
| 1059 | AAEL008724 | conserved hypothetical protein |
| 1060 | AAEL008729 | hypothetical protein |
| 1061 | AAEL008748 | hypothetical protein |
| 1062 | AAEL008759 | hypothetical protein |
| 1063 | AAEL008777 | proto-oncogene tyrosine-protein kinase abl1 |
| 1064 | AAEL008781 | serine-type enodpeptidase, |
| 1065 | AAEL008794 | conserved hypothetical protein |
| 1066 | AAEL008817 | hexamerin 2 beta |
| 1067 | AAEL008822 | conserved hypothetical protein |
| 1068 | AAEL008809 | pickpocket, putative |
| 1069 | AAEL008797 | hypothetical protein |
| 1070 | AAEL001525 | conserved hypothetical protein |
| 1071 | AAEL008839 | hypothetical protein |
| 1072 | AAEL008842 | hypothetical protein |
| 1073 | AAEL008863 | protein regulator of cytokinesis 1 prc1 |
| 1074 | AAEL008868 | conserved hypothetical protein |
| 1075 | AAEL008875 | conserved hypothetical protein |
| 1076 | AAEL008886 | conserved hypothetical protein |
| 1077 | AAEL008884 | hypothetical protein |
| 1078 | AAEL008900 | p15-2a protein, putative |
| 1079 | AAEL008894 | conserved hypothetical protein |
| 1080 | AAEL008915 | sodium-and chloride-activated ATP-sensitive |
| | | potassium channel |
| 1081 | AAEL008923 | ring finger protein |
| 1082 | AAEL001545 | conserved hypothetical protein |
| 1083 | AAEL001585 | predicted protein |
| 1084 | AAEL001595 | conserved hypothetical protein |
| 1085 | AAEL001569 | conserved hypothetical protein |
| 1086 | AAEL001576 | conserved hypothetical protein |
| 1087 | AAEL001588 | glutamate carboxypeptidase |
| 1088 | AAEL001581 | conserved hypothetical protein |
| 1089 | AAEL001559 | conserved hypothetical protein |
| 1090 | AAEL008942 | conserved hypothetical protein |
| 1091 | AAEL008939 | conserved hypothetical protein |
| 1092 | AAEL008983 | adult cuticle protein, putative |
| 1093 | AAEL009022 | adenylate cyclase type |
| 1094 | AAEL009021 | peptidylprolyl isomerase |
| 1095 | AAEL009023 | conserved hypothetical protein |
| 1096 | AAEL009057 | cyclin e |
| 1097 | AAEL009084 | slender lobes, putative |
| 1098 | AAEL009080 | importin 7, |
| 1099 | AAEL001614 | conserved hypothetical protein |
| 1100 | AAEL001622 | dual specificity mitogen-activated protein |
| | | kinase kinase MAPKK |
| 1101 | AAEL001609 | hypothetical protein |
| 1102 | AAEL009147 | conserved hypothetical protein |
| 1103 | AAEL009153 | M-type 9 protein, putative |
| 1104 | AAEL009160 | skp1 |
| 1105 | AAEL009163 | conserved hypothetical protein |
| 1106 | AAEL009167 | bone morphogenetic protein 5/7, bmp5/7 |
| 1107 | AAEL009187 | conserved hypothetical protein |
| 1108 | AAEL009189 | encore protein |
| 1109 | AAEL001663 | hypothetical protein |
| 1110 | AAEL001666 | conserved hypothetical protein |
| 1111 | AAEL001650 | conserved hypothetical protein |
| 1112 | AAEL009241 | translation initiation factor if-2 |
| 1113 | AAEL009233 | zinc metalloprotease |
| 1114 | AAEL009248 | conserved hypothetical protein |
| 1115 | AAEL009260 | conserved hypothetical protein |
| 1116 | AAEL009261 | hypothetical protein |
| 1117 | AAEL009263 | conserved hypothetical protein |
| 1118 | AAEL009262 | hypothetical protein |
| 1119 | AAEL009277 | hypothetical protein |
| 1120 | AAEL009290 | hypothetical protein |
| 1121 | AAEL009296 | histone H3, putative |
| 1122 | AAEL009309 | lipid depleted protein |
| 1123 | AAEL009322 | hypothetical protein |
| 1124 | AAEL001684 | boule protein, putative |
| 1125 | AAEL001700 | hypothetical protein |
| 1126 | AAEL001697 | adenylate cyclase, putative |
| 1127 | AAEL001703 | serine-type enodpeptidase, |
| 1128 | AAEL001691 | adenylate cyclase |
| 1129 | AAEL001693 | serine-type enodpeptidase, |
| 1130 | AAEL009335 | adhesion regulating molecule 1 (110 kda |
| | | cell membrane glycoprotein) |
| 1131 | AAEL009348 | conserved hypothetical protein |
| 1132 | AAEL009393 | conserved hypothetical protein |
| 1133 | AAEL009411 | DNA-binding protein smubp-2 |
| 1134 | AAEL009425 | hypothetical protein |
| 1135 | AAEL009442 | hypothetical protein |
| 1136 | AAEL015633 | conserved hypothetical protein |
| 1137 | AAEL009452 | hypothetical protein |
| 1138 | AAEL009456 | hypothetical protein |
| 1139 | AAEL009454 | conserved hypothetical protein |
| 1140 | AAEL009470 | conserved hypothetical protein |
| 1141 | AAEL009465 | replication factor c/DNA polymerase iii |
| | | gamma-tau subunit |
| 1142 | AAEL009463 | hypothetical protein |
| 1143 | AAEL009484 | conserved hypothetical protein |
| 1144 | AAEL000224 | serine protease |
| 1145 | AAEL000223 | alpha-glucosidase |
| 1146 | AAEL000235 | hypothetical protein |
| 1147 | AAEL001711 | activin receptor type I, putative |
| 1148 | AAEL001727 | hypothetical protein |
| 1149 | AAEL009510 | glucosamine-fructose-6-phosphate |
| | | aminotransferase |
| 1150 | AAEL009500 | conserved hypothetical protein |
| 1151 | AAEL009508 | zinc finger protein |
| 1152 | AAEL017066 | hypothetical protein |
| 1153 | AAEL009518 | timeout/timeless-2 |
| 1154 | AAEL009522 | hypothetical protein |
| 1155 | AAEL009533 | conserved hypothetical protein |
| 1156 | AAEL009551 | Toll-like receptor |
| 1157 | AAEL009576 | conserved hypothetical protein |
| 1158 | AAEL015640 | transcription factor IIIA, putative |
| 1159 | AAEL001745 | candidate tumor suppressor protein |
| 1160 | AAEL001734 | bric-a-brac |
| 1161 | AAEL009586 | hypothetical protein |
| 1162 | AAEL009600 | Ecdysone receptor isoform A Nuclear receptor |
| 1163 | AAEL009602 | conserved hypothetical protein |
| 1164 | AAEL009646 | conserved hypothetical protein |
| 1165 | AAEL009667 | conserved hypothetical protein |
| 1166 | AAEL017306 | hypothetical protein |
| 1167 | AAEL001781 | origin recognition complex subunit |
| 1168 | AAEL001785 | origin recognition complex subunit |
| 1169 | AAEL001788 | hypothetical protein |
| 1170 | AAEL009710 | adhesion regulating molecule 1 (110 kda cell |
| | | membrane glycoprotein) |
| 1171 | AAEL009709 | hypothetical protein |
| 1172 | AAEL009727 | conserved hypothetical protein |
| 1173 | AAEL009716 | hypothetical protein |
| 1174 | AAEL009729 | conserved hypothetical protein |
| 1175 | AAEL009739 | cbl-d |
| 1176 | AAEL009742 | Homeobox protein abdominal-A homolog |
| 1177 | AAEL009755 | conserved hypothetical protein |
| 1178 | AAEL009753 | sodium-dependent phosphate transporter |
| 1179 | AAEL009773 | geminin, putative |
| 1180 | AAEL009772 | conserved hypothetical protein |
| 1181 | AAEL009770 | ubiquitin-conjugating enzyme E2 i |
| 1182 | AAEL009798 | transcription factor IIIA, putative |
| 1183 | AAEL009799 | hypothetical protein |
| 1184 | AAEL001809 | conserved hypothetical protein |
| 1185 | AAEL017094 | hypothetical protein |
| 1186 | AAEL001795 | orfY, putative |
| 1187 | AAEL009854 | conserved hypothetical protein |
| 1188 | AAEL009834 | hypothetical protein |
| 1189 | AAEL009842 | galectin |
| 1190 | AAEL009845 | galectin |
| 1191 | AAEL009836 | conserved hypothetical protein |
| 1192 | AAEL009861 | conserved hypothetical protein |
| 1193 | AAEL009896 | hypothetical protein |
| 1194 | AAEL009894 | leucine-rich immune protein (Coil-less) |
| 1195 | AAEL009886 | kidney-specific Na—K—Cl cotransport protein |
| | | splice isoform A, putative |
| 1196 | AAEL009918 | conserved hypothetical protein |
| 1197 | AAEL009912 | conserved hypothetical protein |
| 1198 | AAEL009935 | conserved hypothetical protein |
| 1199 | AAEL001839 | zinc carboxypeptidase |
| 1200 | AAEL001842 | zinc carboxypeptidase |
| 1201 | AAEL017186 | hypothetical protein |
| 1202 | AAEL001877 | fucosyltransferase 11 (fut11) |
| 1203 | AAEL001858 | hypothetical protein |
| 1204 | AAEL001867 | sodium-dependent phosphate transporter |
| 1205 | AAEL001856 | adenosine kinase |
| 1206 | AAEL009972 | hypothetical protein |
| 1207 | AAEL009962 | hypothetical protein |
| 1208 | AAEL009984 | alanyl-tRNA synthetase |
| 1209 | AAEL009983 | GPCR Frizzled/Smoothened Family |
| 1210 | AAEL009999 | conserved hypothetical protein |
| 1211 | AAEL009998 | conserved hypothetical protein |
| 1212 | AAEL010007 | conserved hypothetical protein |
| 1213 | AAEL010011 | conserved hypothetical protein |
| 1214 | AAEL010001 | conserved hypothetical protein |
| 1215 | AAEL010014 | hypothetical protein |
| 1216 | AAEL010033 | DNA mismatch repair protein pms2 |
| 1217 | AAEL001890 | hypothetical protein |
| 1218 | AAEL001902 | glutamate decarboxylase |
| 1219 | AAEL001908 | hypothetical protein |
| 1220 | AAEL001904 | arp2/3 |
| 1221 | AAEL001900 | lactosylceramide 4-alpha-galactosyltransferase |
| | | (alpha-1,4-galactosyltransferase) |
| 1222 | AAEL010060 | signal recognition particle 68 kda protein |
| 1223 | AAEL010072 | hypothetical protein |
| 1224 | AAEL010080 | origin recognition complex subunit |
| 1225 | AAEL010094 | cyclin b |
| 1226 | AAEL010081 | conserved hypothetical protein |
| 1227 | AAEL010112 | conserved hypothetical protein |
| 1228 | AAEL010097 | conserved hypothetical protein |
| 1229 | AAEL010113 | conserved hypothetical protein |
| 1230 | AAEL010109 | conserved hypothetical protein |
| 1231 | AAEL010117 | fibrinogen and fibronectin |
| 1232 | AAEL010118 | kelch repeat protein |
| 1233 | AAEL010136 | hypothetical protein |
| 1234 | AAEL010155 | hypothetical protein |
| 1235 | AAEL010176 | conserved hypothetical protein |
| 1236 | AAEL010189 | Band 7 protein AAEL010189 |
| 1237 | AAEL001927 | hypothetical protein |
| 1238 | AAEL001917 | ribosome biogenesis protein brix |
| 1239 | AAEL001939 | hypothetical protein |
| 1240 | AAEL001933 | membrane associated ring finger 1, 8 |
| 1241 | AAEL010194 | hypothetical protein |
| 1242 | AAEL010242 | conserved hypothetical protein |
| 1243 | AAEL010226 | daughterless |
| 1244 | AAEL010229 | hypothetical protein |
| 1245 | AAEL010253 | conserved hypothetical protein |
| 1246 | AAEL010244 | abrupt protein |
| 1247 | AAEL010246 | conserved hypothetical protein |
| 1248 | AAEL010249 | conserved hypothetical protein |
| 1249 | AAEL010290 | short-chain dehydrogenase |
| 1250 | AAEL010289 | beta nu integrin subunit |
| 1251 | AAEL010292 | conserved hypothetical protein |
| 1252 | AAEL010294 | membrane-associated guanylate kinase (maguk) |
| 1253 | AAEL015673 | nucleolar complex protein |
| 1254 | AAEL002032 | hypothetical protein |
| 1255 | AAEL002033 | hypothetical protein |
| 1256 | AAEL002010 | conserved hypothetical protein |
| 1257 | AAEL001972 | TATA box binding protein (TBP)-associated |
| | | factor,, putative |
| 1258 | AAEL002006 | conserved hypothetical protein |
| 1259 | AAEL010311 | conserved hypothetical protein |
| 1260 | AAEL010318 | polyadenylate-binding protein |
| 1261 | AAEL010309 | hypothetical protein |
| 1262 | AAEL010319 | heat shock transcription factor (hsf) |
| 1263 | AAEL010343 | aryl hydrocarbon receptor nuclear translocator |
| | | (arnt protein) (hypoxia-inducible factor 1 beta) |
| 1264 | AAEL017368 | hypothetical protein |
| 1265 | AAEL010378 | conserved hypothetical protein |
| 1266 | AAEL010381 | glucosyl/glucuronosyl transferases |
| 1267 | AAEL010370 | aldehyde oxidase |
| 1268 | AAEL010420 | hypothetical protein |
| 1269 | AAEL010422 | replication-associated histone mRNA stem |
| | | loop-binding protein, putative |
| 1270 | AAEL010417 | conserved hypothetical protein |
| 1271 | AAEL010434 | Vitellogenin-A1 Precursor (VG)(PVG1) |
| | | [Contains Vitellin light chain(VL); |
| | | Vitellin heavy chain(VH)] |
| 1272 | AAEL010437 | heparan n-sulfatase |
| 1273 | AAEL010447 | hypothetical protein |
| 1274 | AAEL010446 | protein phosphatase 2c |
| 1275 | AAEL010454 | hypothetical protein |
| 1276 | AAEL010473 | NAD dependent epimerase/dehydratase |
| 1277 | AAEL002079 | TATA binding protein, putative |
| 1278 | AAEL002054 | hypothetical protein |
| 1279 | AAEL002058 | hypothetical protein |
| 1280 | AAEL002063 | cationic amino acid transporter |
| 1281 | AAEL010501 | zinc finger protein |
| 1282 | AAEL010490 | hypothetical protein |
| 1283 | AAEL010495 | hypothetical protein |
| 1284 | AAEL010509 | bridging integrator |
| 1285 | AAEL010503 | hypothetical protein |
| 1286 | AAEL010507 | hypothetical protein |
| 1287 | AAEL010510 | conserved hypothetical protein |
| 1288 | AAEL010538 | conserved hypothetical protein |
| 1289 | AAEL010546 | heat shock factor binding protein, putative |
| 1290 | AAEL010562 | hypothetical protein |
| 1291 | AAEL010587 | conserved hypothetical protein |
| 1292 | AAEL010588 | striatin, putative |
| 1293 | AAEL010578 | mixed-lineage leukemia protein, mll |
| 1294 | AAEL002128 | serine protease |
| 1295 | AAEL010631 | conserved hypothetical protein |
| 1296 | AAEL010623 | conserved hypothetical protein |
| 1297 | AAEL010627 | conserved hypothetical protein |
| 1298 | AAEL010638 | histone H1, putative |
| 1299 | AAEL010644 | ribonucleoside-diphosphate reductase large chain |
| 1300 | AAEL010664 | actin binding protein, putative |
| 1301 | AAEL010670 | lethal(2)essential for life protein, l2efl |
| 1302 | AAEL010679 | monocyte to macrophage differentiation protein |
| 1303 | AAEL010665 | developmentally regulated RNA-binding protein |
| 1304 | AAEL010674 | hypothetical protein |
| 1305 | AAEL010660 | alpha-B-crystallin, putative |
| 1306 | AAEL017191 | hypothetical protein |
| 1307 | AAEL010692 | OCP-II protein, putative |
| 1308 | AAEL010708 | hypothetical protein |
| 1309 | AAEL010709 | hypothetical protein |
| 1310 | AAEL000289 | conserved hypothetical protein |
| 1311 | AAEL000272 | conserved hypothetical protein |
| 1312 | AAEL000260 | conserved hypothetical protein |
| 1313 | AAEL002136 | hypothetical protein |
| 1314 | AAEL017571 | hypothetical protein |
| 1315 | AAEL010715 | hypothetical protein |
| 1316 | AAEL017338 | hypothetical protein |
| 1317 | AAEL010755 | hypothetical protein |
| 1318 | AAEL010748 | hypothetical protein |
| 1319 | AAEL010766 | inositol triphosphate 3-kinase c |
| 1320 | AAEL010784 | conserved hypothetical protein |
| 1321 | AAEL002184 | F-actin capping protein beta subunit |
| 1322 | AAEL002181 | cuticle protein, putative |
| 1323 | AAEL002219 | zinc finger protein, putative |
| 1324 | AAEL010829 | protein arginine n-methyltransferase |
| 1325 | AAEL010808 | conserved hypothetical protein |
| 1326 | AAEL010827 | programmed cell death protein 11 (pre-rRNA |
| | | processing protein rrp5) |
| 1327 | AAEL010841 | lupus la ribonucleoprotein |
| 1328 | AAEL010855 | cdc6 |
| 1329 | AAEL010877 | conserved hypothetical protein |
| 1330 | AAEL010901 | mannose binding lectin, putative |
| 1331 | AAEL010904 | rothmund-thomson syndrome DNA helicase |
| | | recq4 |
| 1332 | AAEL010907 | conserved hypothetical protein |
| 1333 | AAEL010908 | hypothetical protein |
| 1334 | AAEL010912 | dipeptidyl-peptidase |
| 1335 | AAEL002250 | terminal deoxycytidyl transferase rev1 |
| 1336 | AAEL010930 | l-asparaginase |
| 1337 | AAEL010945 | conserved hypothetical protein |
| 1338 | AAEL010965 | cubulin |
| 1339 | AAEL002303 | conserved hypothetical protein |
| 1340 | AAEL002319 | hypothetical protein |
| 1341 | AAEL002320 | hypothetical protein |
| 1342 | AAEL002307 | leucine-rich transmembrane protein |
| 1343 | AAEL011003 | hypothetical protein |
| 1344 | AAEL011013 | single-minded |
| 1345 | AAEL011043 | conserved hypothetical protein |
| 1346 | AAEL011062 | hypothetical protein |
| 1347 | AAEL002332 | hypothetical protein |
| 1348 | AAEL002354 | heme peroxidase |
| 1349 | AAEL011085 | conserved hypothetical protein |
| 1350 | AAEL011124 | PHD finger protein |
| 1351 | AAEL011138 | hypothetical protein |
| 1352 | AAEL011145 | ribosomal protein S6 kinase, 90 kD, polypeptide |
| 1353 | AAEL011161 | conserved hypothetical protein |
| 1354 | AAEL011173 | conserved hypothetical protein |
| 1355 | AAEL011172 | conserved hypothetical protein |
| 1356 | AAEL011175 | alkaline phosphatase |
| 1357 | AAEL011176 | hypothetical protein |
| 1358 | AAEL011178 | posterior sex combs protein |
| 1359 | AAEL002403 | hypothetical protein |
| 1360 | AAEL002376 | hypothetical protein |
| 1361 | AAEL002375 | NBP2b protein, putative |
| 1362 | AAEL011199 | conserved hypothetical protein |
| 1363 | AAEL011215 | F-box and WD40 domain protein 7 (fbw7) |
| 1364 | AAEL002423 | conserved hypothetical protein |
| 1365 | AAEL002417 | troponin t, invertebrate |
| 1366 | AAEL002429 | hypothetical protein |
| 1367 | AAEL011248 | innexin |
| 1368 | AAEL011253 | rho-GTPase-activating protein |
| 1369 | AAEL011264 | phosphatidylethanolamine-binding protein |
| 1370 | AAEL011276 | mitochondrial glutamate carrier protein |
| 1371 | AAEL011280 | voltage-dependent p/q type calcium channel |
| 1372 | AAEL011291 | protease m1 zinc metalloprotease |
| 1373 | AAEL011298 | hypothetical protein |
| 1374 | AAEL011303 | cell division protein ftsj |
| 1375 | AAEL011313 | epoxide hydrolase |
| 1376 | AAEL011330 | conserved hypothetical protein |
| 1377 | AAEL011326 | conserved hypothetical protein |
| 1378 | AAEL002453 | conserved hypothetical protein |
| 1379 | AAEL002442 | conserved hypothetical protein |
| 1380 | AAEL002443 | conserved hypothetical protein |
| 1381 | AAEL002454 | conserved hypothetical protein |
| 1382 | AAEL011358 | origin recognition complex subunit |
| 1383 | AAEL011357 | maintenance of killer 16 (mak16) protein |
| 1384 | AAEL011362 | hypothetical protein |
| 1385 | AAEL011400 | conserved hypothetical protein |
| 1386 | AAEL011422 | conserved hypothetical protein |
| 1387 | AAEL002473 | hypothetical protein |
| 1388 | AAEL002462 | hypothetical protein |
| 1389 | AAEL002477 | hypothetical protein |
| 1390 | AAEL017575 | hypothetical protein |
| 1391 | AAEL011473 | chromatin regulatory protein sir2 |
| 1392 | AAEL011498 | copper-zinc (Cu—Zn) superoxide dismutase |
| 1393 | AAEL011496 | chitinase |
| 1394 | AAEL016971 | hypothetical protein |
| 1395 | AAEL011516 | conserved hypothetical protein |
| 1396 | AAEL011515 | hypothetical protein |
| 1397 | AAEL011520 | sucrose transport protein |
| 1398 | AAEL011536 | phosphoglucomutase |
| 1399 | AAEL011527 | eukaryotic translation initiation factor |
| 1400 | AAEL011533 | hypothetical protein |
| 1401 | AAEL011532 | hypothetical protein |
| 1402 | AAEL011537 | hypothetical protein |
| 1403 | AAEL002529 | conserved hypothetical protein |
| 1404 | AAEL002503 | yippee protein |
| 1405 | AAEL002522 | adenosine deaminase acting on RNA (adar)-2 |
| 1406 | AAEL002497 | hypothetical protein |
| 1407 | AAEL011586 | hypothetical protein |
| 1408 | AAEL011592 | secreted mucin MUC17, putative |
| 1409 | AAEL011598 | hypothetical protein |
| 1410 | AAEL011596 | mitotic checkpoint serine/threonine-protein |
| | | kinase bub1 and bubr1 |
| 1411 | AAEL011597 | conserved hypothetical protein |
| 1412 | AAEL011615 | rab gdp/GTP exchange factor |
| 1413 | AAEL011633 | fibrinogen and fibronectin |
| 1414 | AAEL011631 | hypothetical protein |
| 1415 | AAEL011640 | hypothetical protein |
| 1416 | AAEL011635 | conserved hypothetical protein |
| 1417 | AAEL011648 | cyclin d |
| 1418 | AAEL011655 | aspartyl-tRNA synthetase |
| 1419 | AAEL011664 | conserved hypothetical protein |
| 1420 | AAEL011653 | thyroid hormone receptor interactor |
| 1421 | AAEL000322 | hypothetical protein |
| 1422 | AAEL000352 | hypothetical protein |
| 1423 | AAEL017203 | hypothetical protein |
| 1424 | AAEL000356 | cysteine-rich venom protein, putative |
| 1425 | AAEL000302 | cysteine-rich venom protein, putative |
| 1426 | AAEL000375 | cysteine-rich venom protein, putative |
| 1427 | AAEL000317 | cysteine-rich venom protein, putative |
| 1428 | AAEL000348 | conserved hypothetical protein |
| 1429 | AAEL000327 | Ecdysone-induced protein 78C Nuclear receptor |
| 1430 | AAEL000324 | tyrosine-protein kinase drl |
| 1431 | AAEL002557 | cationic amino acid transporter |
| 1432 | AAEL002541 | cystinosin |
| 1433 | AAEL002569 | serine/threonine kinase |
| 1434 | AAEL011696 | conserved hypothetical protein |
| 1435 | AAEL011686 | starch branching enzyme ii |
| 1436 | AAEL011695 | guanine nucleotide exchange factor |
| 1437 | AAEL011712 | diacylglycerol kinase, alpha, beta, gamma |
| 1438 | AAEL011726 | hypothetical protein |
| 1439 | AAEL011735 | conserved hypothetical protein |
| 1440 | AAEL011743 | hypothetical protein |
| 1441 | AAEL011754 | conserved hypothetical protein |
| 1442 | AAEL011765 | conserved hypothetical protein |
| 1443 | AAEL011767 | hypothetical protein |
| 1444 | AAEL011761 | cytochrome P450 |
| 1445 | AAEL011769 | cytochrome P450 |
| 1446 | AAEL011780 | DNA mismatch repair protein muts |
| 1447 | AAEL011809 | glucose dehydrogenase |
| 1448 | AAEL011811 | DNA replication licensing factor MCM3 |
| 1449 | AAEL002652 | hypothetical protein |
| 1450 | AAEL002635 | conserved hypothetical protein |
| 1451 | AAEL011846 | hypothetical protein |
| 1452 | AAEL011852 | hypothetical protein |
| 1453 | AAEL011859 | conserved hypothetical protein |
| 1454 | AAEL011862 | conserved hypothetical protein |
| 1455 | AAEL011868 | conserved hypothetical protein |
| 1456 | AAEL011870 | rap55 |
| 1457 | AAEL011875 | conserved hypothetical protein |
| 1458 | AAEL011872 | conserved hypothetical protein |
| 1459 | AAEL011892 | receptor for activated C kinase, putative |
| 1460 | AAEL011895 | odorant receptor |
| 1461 | AAEL017451 | hypothetical protein |
| 1462 | AAEL017179 | hypothetical protein |
| 1463 | AAEL017200 | hypothetical protein |
| 1464 | AAEL011958 | conserved hypothetical protein |
| 1465 | AAEL011979 | calmodulin |
| 1466 | AAEL017253 | hypothetical protein |
| 1467 | AAEL002690 | beat protein |
| 1468 | AAEL002681 | Vanin-like protein 1 precursor, putative |
| 1469 | AAEL011989 | signal peptide peptidase |
| 1470 | AAEL012014 | l-lactate dehydrogenase |
| 1471 | AAEL012020 | conserved hypothetical protein |
| 1472 | AAEL012013 | hypothetical protein |
| 1473 | AAEL012015 | DEAD box ATP-dependent RNA helicase |
| 1474 | AAEL012012 | conserved hypothetical protein |
| 1475 | AAEL012032 | hypothetical protein |
| 1476 | AAEL012028 | proacrosin, putative |
| 1477 | AAEL012030 | preproacrosin, putative |
| 1478 | AAEL012041 | sulphate transporter |
| 1479 | AAEL012055 | dfg10 protein |
| 1480 | AAEL012057 | enhancer of polycomb |
| 1481 | AAEL002719 | conserved hypothetical protein |
| 1482 | AAEL002700 | conserved hypothetical protein |
| 1483 | AAEL012130 | ordml, arthropod |
| 1484 | AAEL012142 | timeout/timeless-2 |
| 1485 | AAEL012137 | conserved hypothetical protein |
| 1486 | AAEL012141 | odorant receptor |
| 1487 | AAEL012155 | conserved hypothetical protein |
| 1488 | AAEL012164 | spaetzle-like cytokine |
| 1489 | AAEL012209 | ring finger protein |
| 1490 | AAEL017392 | hypothetical protein |
| 1491 | AAEL012214 | hypothetical protein |
| 1492 | AAEL012273 | conserved hypothetical protein |
| 1493 | AAEL012279 | Eukaryotic translation initiation factor 3 |
| | | subunit J (eIF3j) |
| 1494 | AAEL012288 | sugar transporter |
| 1495 | AAEL012295 | conserved hypothetical protein |
| 1496 | AAEL012293 | conserved hypothetical protein |
| 1497 | AAEL012300 | conserved hypothetical protein |
| 1498 | AAEL012312 | proliferation-associated 2g4 (pa2g4/ebp1) |
| 1499 | AAEL012314 | conserved hypothetical protein |
| 1500 | AAEL002793 | conserved hypothetical protein |
| 1501 | AAEL002785 | DNA polymerase epsilon subunit b |
| 1502 | AAEL002811 | conserved hypothetical protein |
| 1503 | AAEL002814 | hypothetical protein |
| 1504 | AAEL002810 | DNA replication licensing factor MCM5 |
| 1505 | AAEL002774 | slender lobes, putative |
| 1506 | AAEL012378 | serine-type protease inhibitor |
| 1507 | AAEL012392 | conserved hypothetical protein |
| 1508 | AAEL012388 | predicted protein |
| 1509 | AAEL002843 | conserved hypothetical protein |
| 1510 | AAEL002836 | carbon catabolite repressor protein |
| 1511 | AAEL002848 | tubulin beta chain |
| 1512 | AAEL002849 | zinc finger protein, putative |
| 1513 | AAEL012418 | deoxyribonuclease ii |
| 1514 | AAEL012427 | conserved hypothetical protein |
| 1515 | AAEL012430 | AMP dependent ligase |
| 1516 | AAEL012437 | hypothetical protein |
| 1517 | AAEL012441 | conserved hypothetical protein |
| 1518 | AAEL012458 | hypothetical protein |
| 1519 | AAEL012461 | monocarboxylate transporter |
| 1520 | AAEL012455 | alcohol dehydrogenase |
| 1521 | AAEL000402 | conserved hypothetical protein |
| 1522 | AAEL002867 | phenylalanyl-tRNA synthetase alpha chain |
| 1523 | AAEL002856 | conserved hypothetical protein |
| 1524 | AAEL002863 | zinc finger protein |
| 1525 | AAEL002855 | hypothetical protein |
| 1526 | AAEL002882 | conserved hypothetical protein |
| 1527 | AAEL002872 | cytochrome P450 |
| 1528 | AAEL012473 | vav1 |
| 1529 | AAEL012480 | sodium/calcium exchanger |
| 1530 | AAEL012499 | histone H2A |
| 1531 | AAEL012504 | hypothetical protein |
| 1532 | AAEL012526 | hypothetical protein |
| 1533 | AAEL012527 | conserved hypothetical protein |
| 1534 | AAEL012546 | DNA replication licensing factor MCM6 |
| 1535 | AAEL002889 | hypothetical protein |
| 1536 | AAEL002884 | hypothetical protein |
| 1537 | AAEL002905 | conserved hypothetical protein |
| 1538 | AAEL012566 | conserved hypothetical protein |
| 1539 | AAEL012586 | conserved hypothetical protein |
| 1540 | AAEL012600 | hypothetical protein |
| 1541 | AAEL012610 | conserved hypothetical protein |
| 1542 | AAEL012618 | conserved hypothetical protein |
| 1543 | AAEL012629 | deoxyuridine 5′-triphosphate nucleotidohydrolase |
| 1544 | AAEL002932 | conserved hypothetical protein |
| 1545 | AAEL002942 | hypothetical protein |
| 1546 | AAEL002947 | AMP dependent ligase |
| 1547 | AAEL012644 | conserved hypothetical protein |
| 1548 | AAEL012647 | conserved hypothetical protein |
| 1549 | AAEL012650 | conserved hypothetical protein |
| 1550 | AAEL012658 | rgs-gaip interacting protein gipc |
| 1551 | AAEL012684 | conserved hypothetical protein |
| 1552 | AAEL012682 | hypothetical protein |
| 1553 | AAEL012676 | conserved hypothetical protein |
| 1554 | AAEL012708 | conserved hypothetical protein |
| 1555 | AAEL012714 | hypothetical protein |
| 1556 | AAEL017254 | hypothetical protein |
| 1557 | AAEL002949 | Osiris, putative |
| 1558 | AAEL002958 | conserved hypothetical protein |
| 1559 | AAEL002991 | hypothetical protein |
| 1560 | AAEL003003 | glutamate-gated chloride channel |
| 1561 | AAEL002989 | hypothetical protein |
| 1562 | AAEL012811 | mitochondrial peptide chain release factor |
| 1563 | AAEL012810 | conserved hypothetical protein |
| 1564 | AAEL012802 | conserved hypothetical protein |
| 1565 | AAEL012812 | exosome complex exonuclease RRP41, putative |
| 1566 | AAEL012830 | anti-silencing protein |
| 1567 | AAEL012832 | cytochrome B561 |
| 1568 | AAEL012836 | cytochrome B561 |
| 1569 | AAEL012838 | conserved hypothetical protein |
| 1570 | AAEL012876 | conserved hypothetical protein |
| 1571 | AAEL012875 | snare protein sec22 |
| 1572 | AAEL003058 | glucosyl/glucuronosyl transferases |
| 1573 | AAEL003051 | conserved hypothetical protein |
| 1574 | AAEL012927 | hypothetical protein |
| 1575 | AAEL012927 | hypothetical protein |
| 1576 | AAEL012960 | importin alpha |
| 1577 | AAEL012979 | conserved hypothetical protein |
| 1578 | AAEL017272 | GPCR Serotonin Family |
| 1579 | AAEL012996 | rho guanine dissociation factor |
| 1580 | AAEL013004 | conserved hypothetical protein |
| 1581 | AAEL013024 | hypothetical protein |
| 1582 | AAEL003112 | conserved hypothetical protein |
| 1583 | AAEL013036 | conserved hypothetical protein |
| 1584 | AAEL013037 | conserved hypothetical protein |
| 1585 | AAEL013038 | hypothetical protein |
| 1586 | AAEL013051 | conserved hypothetical protein |
| 1587 | AAEL013054 | conserved hypothetical protein |
| 1588 | AAEL013045 | exosome complex exonuclease RRP41, putative |
| 1589 | AAEL013078 | glycosyltransferase |
| 1590 | AAEL013091 | hypothetical protein |
| 1591 | AAEL017424 | hypothetical protein |
| 1592 | AAEL003130 | bcr-associated protein, bap |
| 1593 | AAEL013112 | Peptidoglycan Recognition Protein (Long) |
| 1594 | AAEL013110 | conserved hypothetical protein |
| 1595 | AAEL013149 | conserved hypothetical protein |
| 1596 | AAEL013156 | hypothetical protein |
| 1597 | AAEL013148 | predicted protein |
| 1598 | AAEL013154 | hypothetical protein |
| 1599 | AAEL013160 | GPCR Frizzled/Smoothened Family |
| 1600 | AAEL013168 | arrowhead |
| 1601 | AAEL000470 | hypothetical protein |
| 1602 | AAEL000426 | hypothetical protein |
| 1603 | AAEL003172 | transcription factor IIIA, putative |
| 1604 | AAEL003158 | conserved hypothetical protein |
| 1605 | AAEL003168 | hypothetical protein |
| 1606 | AAEL013174 | conserved hypothetical protein |
| 1607 | AAEL013179 | 8-oxoguanine DNA glycosylase |
| 1608 | AAEL013190 | gustatory receptor Gr22 |
| 1609 | AAEL013212 | prefoldin, subunit, putative |
| 1610 | AAEL013216 | conserved hypothetical protein |
| 1611 | AAEL013226 | conserved hypothetical protein |
| 1612 | AAEL003186 | hypothetical protein |
| 1613 | AAEL003207 | hypothetical protein |
| 1614 | AAEL013240 | conserved hypothetical protein |
| 1615 | AAEL013248 | hypothetical protein |
| 1616 | AAEL013252 | hypothetical protein |
| 1617 | AAEL013249 | hypothetical protein |
| 1618 | AAEL013251 | hypothetical protein |
| 1619 | AAEL013291 | conserved hypothetical protein |
| 1620 | AAEL013288 | conserved hypothetical protein |
| 1621 | AAEL013285 | hypothetical protein |
| 1622 | AAEL003210 | tetraspanin 29fa |
| 1623 | AAEL003214 | salivary gland growth factor |
| 1624 | AAEL003267 | hypothetical protein |
| 1625 | AAEL013311 | hypothetical protein |
| 1626 | AAEL013312 | dual-specificity protein phosphatase, putative |
| 1627 | AAEL013325 | conserved hypothetical protein |
| 1628 | AAEL013344 | lethal(2)essential for life protein, l2efl |
| 1629 | AAEL013338 | lethal(2)essential for life protein, l2efl |
| 1630 | AAEL003312 | hypothetical protein |
| 1631 | AAEL003321 | hypothetical protein |
| 1632 | AAEL003285 | translocation associated membrane protein |
| 1633 | AAEL013400 | DEAD box ATP-dependent RNA helicase |
| 1634 | AAEL017652 | 18S_rRNA |
| 1635 | AAEL003355 | conserved hypothetical protein |
| 1636 | AAEL003343 | hypothetical protein |
| 1637 | AAEL003346 | heparan sulphate 2-o-sulfotransferase |
| 1638 | AAEL003327 | zinc finger protein |
| 1639 | AAEL013412 | conserved hypothetical protein |
| 1640 | AAEL013453 | sarcolemmal associated protein, putative |
| 1641 | AAEL013463 | nucleolar protein 10 |
| 1642 | AAEL017276 | hypothetical protein |
| 1643 | AAEL003377 | signal recognition particle |
| 1644 | AAEL003382 | Ro ribonucleoprotein autoantigen, putative |
| 1645 | AAEL013465 | conserved hypothetical protein |
| 1646 | AAEL013471 | hypothetical protein |
| 1647 | AAEL013490 | conserved hypothetical protein |
| 1648 | AAEL003435 | conserved hypothetical protein |
| 1649 | AAEL003404 | hypothetical protein |
| 1650 | AAEL013510 | smaug protein |
| 1651 | AAEL013521 | tryptophanyl-tRNA synthetase |
| 1652 | AAEL013539 | SH2/SH3 adaptor protein |
| 1653 | AAEL013546 | estrogen-related receptor (ERR) |
| 1654 | AAEL013562 | zinc finger protein, putative |
| 1655 | AAEL003454 | phocein protein, putative |
| 1656 | AAEL013564 | conserved hypothetical protein |
| 1657 | AAEL013569 | conserved hypothetical protein |
| 1658 | AAEL013593 | hypothetical protein |
| 1659 | AAEL003494 | goodpasture antigen-binding protein |
| 1660 | AAEL003493 | GDI interacting protein, putative |
| 1661 | AAEL003502 | hypothetical protein |
| 1662 | AAEL003507 | Toll-like receptor |
| 1663 | AAEL013601 | short-chain dehydrogenase |
| 1664 | AAEL013608 | sugar transporter |
| 1665 | AAEL013616 | hypothetical protein |
| 1666 | AAEL013635 | conserved hypothetical protein |
| 1667 | AAEL003544 | conserved hypothetical protein |
| 1668 | AAEL017367 | hypothetical protein |
| 1669 | AAEL003542 | conserved hypothetical protein |
| 1670 | AAEL003547 | hypothetical protein |
| 1671 | AAEL013653 | tata-box binding protein |
| 1672 | AAEL017342 | hypothetical protein |
| 1673 | AAEL013690 | DNA mismatch repair protein pms2 |
| 1674 | AAEL000487 | hypothetical protein |
| 1675 | AAEL000500 | conserved hypothetical protein |
| 1676 | AAEL003554 | leucine rich repeat protein |
| 1677 | AAEL013701 | meiotic recombination protein spo11 |
| 1678 | AAEL013724 | conserved hypothetical protein |
| 1679 | AAEL013726 | epsin 4/enthoprotin |
| 1680 | AAEL017141 | hypothetical protein |
| 1681 | AAEL013733 | Protein distal antenna |
| 1682 | AAEL013734 | hypothetical protein |
| 1683 | AAEL013738 | hypothetical protein |
| 1684 | AAEL003574 | hypothetical protein |
| 1685 | AAEL003571 | factor for adipocyte differentiation |
| 1686 | AAEL013761 | ADP-ribosylation factor, arf |
| 1687 | AAEL013778 | F-actin capping protein alpha |
| 1688 | AAEL013784 | hypothetical protein |
| 1689 | AAEL017560 | hypothetical protein |
| 1690 | AAEL003595 | protein serine/threonine kinase, putative |
| 1691 | AAEL013789 | conserved hypothetical protein |
| 1692 | AAEL013796 | conserved hypothetical protein |
| 1693 | AAEL013799 | hypothetical protein |
| 1694 | AAEL013805 | conserved hypothetical protein |
| 1695 | AAEL013806 | conserved hypothetical protein |
| 1696 | AAEL013809 | conserved hypothetical protein |
| 1697 | AAEL013813 | conserved hypothetical protein |
| 1698 | AAEL013830 | bmp-induced factor |
| 1699 | AAEL013832 | Homeobox protein abdominal-A homolog |
| 1700 | AAEL013838 | hypothetical protein |
| 1701 | AAEL003646 | conserved hypothetical protein |
| 1702 | AAEL003663 | hypothetical protein |
| 1703 | AAEL003688 | conserved hypothetical protein |
| 1704 | AAEL015684 | hypothetical protein |
| 1705 | AAEL003657 | zinc finger protein |
| 1706 | AAEL013852 | conserved hypothetical protein |
| 1707 | AAEL013850 | conserved hypothetical protein |
| 1708 | AAEL013860 | hypothetical protein |
| 1709 | AAEL013872 | hypothetical protein |
| 1710 | AAEL013896 | smad4 |
| 1711 | AAEL003767 | hypothetical protein |
| 1712 | AAEL013940 | chromatin assembly factor i P60 subunit |
| 1713 | AAEL013955 | conserved hypothetical protein |
| 1714 | AAEL003797 | hypothetical protein |
| 1715 | AAEL003804 | conserved hypothetical protein |
| 1716 | AAEL003775 | hypothetical protein |
| 1717 | AAEL003793 | hypothetical protein |
| 1718 | AAEL003791 | conserved hypothetical protein |
| 1719 | AAEL003792 | conserved hypothetical protein |
| 1720 | AAEL003807 | conserved hypothetical protein |
| 1721 | AAEL013958 | NBP2b protein, putative |
| 1722 | AAEL013968 | conserved hypothetical protein |
| 1723 | AAEL013965 | conserved hypothetical protein |
| 1724 | AAEL013975 | transcription factor IIIA, putative |
| 1725 | AAEL013989 | protein translocation complex beta subunit, |
| | | putative |
| 1726 | AAEL013998 | conserved hypothetical protein |
| 1727 | AAEL014001 | yellow protein precursor, putative |
| 1728 | AAEL003817 | kappa b-ras |
| 1729 | AAEL003824 | conserved hypothetical protein |
| 1730 | AAEL003861 | bmp-induced factor |
| 1731 | AAEL014020 | hypothetical protein |
| 1732 | AAEL014025 | cell division cycle 20 (cdc20) (fizzy) |
| 1733 | AAEL014033 | conserved hypothetical protein |
| 1734 | AAEL014036 | hypothetical protein |
| 1735 | AAEL014047 | hypothetical protein |
| 1736 | AAEL014055 | thymidine kinase |
| 1737 | AAEL014583 | 60S acidic ribosomal protein P2 |
| 1738 | AAEL005722 | 60S ribosomal protein L7a |
| 1739 | AAEL017931 | U1 spliceosomal RNA |
| 1740 | AAEL017646 | U1 spliceosomal RNA |
| 1741 | AAEL005266 | 40S ribosomal protein S14 |
| 1742 | AAEL004175 | 40S ribosomal protein S17 |
| 1743 | AAEL014562 | 60S ribosomal protein L12 |
| 1744 | AAEL006785 | 60S ribosomal protein L18a |
| 1745 | AAEL007715 | 60S ribosomal protein L21 |
| 1746 | AAEL007771 | 60S ribosomal protein L22 |
| 1747 | AAEL005817 | 60S ribosomal protein L26 |
| 1748 | AAEL006698 | 60S ribosomal protein L31 |
| 1749 | AAEL003942 | 60S ribosomal protein L44 L41 |
| 1750 | AAEL000987 | 60S ribosomal protein L8 |
| 1751 | AAEL007699 | 60S ribosomal protein L9 |
| 1752 | AAEL006511 | anopheles stephensi ubiquitin |
| 1753 | AAEL007698 | AUB |
| 1754 | AAEL005097 | cold induced protein (BnC24A) |
| 1755 | AAEL004851 | |
| 1756 | AAEL011424 | histone H3 |
| 1757 | AAEL000529 | hypothetical protein |
| 1758 | AAEL004060 | hypothetical protein |
| 1759 | AAEL004151 | hypothetical protein |
| 1760 | AAEL004249 | hypothetical protein |
| 1761 | AAEL004503 | hypothetical protein |
| 1762 | AAEL005451 | hypothetical protein |
| 1763 | AAEL001274 | hypothetical protein |
| 1764 | AAEL000766 | |
| 1765 | AAEL008969 | |
| 1766 | AAEL008994 | |
| 1767 | AAEL009151 | |
| 1768 | AAEL009185 | |
| 1769 | AAEL017468 | |
| 1770 | AAEL009188 | |
| 1771 | AAEL009201 | |
| 1772 | AAEL001673 | |
| 1773 | AAEL009341 | |
| 1774 | AAEL009403 | |
| 1775 | AAEL009496 | |
| 1776 | AAEL009825 | |
| 1777 | AAEL017413 | |
| 1778 | AAEL010299 | |
| 1779 | AAEL002047 | |
| 1780 | AAEL010573 | |
| 1781 | AAEL002372 | |
| 1782 | AAEL017231 | |
| 1783 | AAEL011447 | |
| 1784 | AAEL011471 | |
| 1785 | AAEL011504 | |
| 1786 | AAEL011587 | |
| 1787 | AAEL011656 | |
| 1788 | AAEL002639 | |
| 1789 | AAEL002832 | |
| 1790 | AAEL002881 | |
| 1791 | AAEL012944 | |
| 1792 | AAEL013221 | |
| 1793 | AAEL013272 | |
| 1794 | AAEL003396 | |
| 1795 | AAEL013533 | |
| 1796 | AAEL013536 | |
| 1797 | AAEL003582 | |
| 1798 | AAEL005027 | |
| 1799 | AAEL017536 | |
| 1800 | AAEL008353 | |
| 1801 | AAEL017198 | |
| 1802 | AAEL016995 | |
| 1803 | AAEL017590 | Ref Transcript AaegL3.1_AAEL017868-RA |
| 1804 | AAEL017868 | Ref Transcript AaegL3.1_AAEL017868-RA |
| 1805 | AAEL005629 | ribosomal protein L35 |
| 1806 | AAEL000010 | ribosomal protein L36 |
| 1807 | AAEL004325 | ribosomal protein L5 |
| 1808 | AAEL000068 | ribosomal protein S25 |
| 1809 | AAEL007824 | ribosomal protein S29 |
| 1810 | AAEL008297 | Sodium channel |
| 1811 | AAEL016638 | tRNA |
| 1812 | AAEL017826 | U1 spliceosomal RNA |
| 1813 | AAEL017609 | U1 spliceosomal RNA |
| 1826 | AAEL010379 | P-glycoprotein (PgP) |
| 1827 | AAEL007823 | Argonaute-3 |
| 1828 | JF924909.1 | Cytochrome p450 (CYP9J26) |

TABLE 3
(male sterility)

| Seq ID | Gene Symbol |
|---|---|
| 166 | AAEL000442 |
| 167 | AAEL000888 |
| 168 | AAEL001371 |
| 169 | AAEL002079 |
| 170 | AAEL003077 |
| 171 | AAEL004266 |
| 172 | AAEL004492 |
| 173 | AAEL004517 |
| 174 | AAEL004651 |
| 175 | AAEL004933 |
| 176 | AAEL005232 |
| 177 | AAEL007609 |
| 178 | AAEL008182 |
| 179 | AAEL008605 |
| 180 | AAEL009383 |
| 181 | AAEL010737 |
| 182 | AAEL011339 |
| 183 | AAEL011380 |
| 184 | AAEL011433 |
| 185 | AAEL012330 |
| 186 | AAEL012340 |
| 187 | AAEL012341 |
| 188 | AAEL012344 |
| 189 | AAEL012345 |
| 190 | AAEL012349 |
| 191 | AAEL012350 |
| 192 | AAEL012706 |
| 193 | AAEL012710 |
| 194 | AAEL012715 |
| 195 | AAEL014031 |
| 196 | AAEL014218 |
| 197 | AAEL014238 |
| 198 | AAEL014339 |
| 199 | AAEL014904 |
| 200 | AAEL014916 |
| 201 | AAEL014920 |
| 202 | AAEL014921 |
| 203 | AAEL015390 |
| 204 | AGAP000005 |
| 205 | AGAP000005 |
| 206 | AGAP000005 |
| 207 | AGAP000306 |
| 208 | AGAP000306 |
| 209 | AGAP000306 |
| 210 | AGAP000670 |
| 211 | AGAP000670 |
| 212 | AGAP000670 |
| 213 | AGAP001652 |
| 214 | AGAP001879 |
| 215 | AGAP001879 |
| 216 | AGAP001879 |
| 217 | AGAP002353 |
| 218 | AGAP002872 |
| 219 | AGAP002872 |
| 220 | AGAP002872 |
| 221 | AGAP003500 |
| 222 | AGAP003501 |
| 223 | AGAP003519 |
| 224 | AGAP003519 |
| 225 | AGAP003519 |
| 226 | AGAP003545 |
| 227 | AGAP003545 |
| 228 | AGAP003545 |
| 229 | AGAP003796 |
| 230 | AGAP004096 |
| 231 | AGAP004096 |
| 232 | AGAP004096 |
| 233 | AGAP004840 |
| 234 | AGAP004840 |
| 235 | AGAP004840 |
| 236 | AGAP005130 |
| 237 | AGAP005130 |
| 238 | AGAP005130 |
| 239 | AGAP005733 |
| 240 | AGAP005733 |
| 241 | AGAP005733 |
| 242 | AGAP006237 |
| 243 | AGAP006237 |
| 244 | AGAP006237 |
| 245 | AGAP007242 |
| 246 | AGAP007242 |
| 247 | AGAP007242 |
| 248 | AGAP008084 |
| 249 | AGAP008084 |
| 250 | AGAP008084 |
| 251 | AGAP008374 |
| 252 | AGAP008374 |
| 253 | AGAP008374 |
| 254 | AGAP008642 |
| 255 | AGAP008642 |
| 256 | AGAP008642 |
| 257 | AGAP009091 |
| 258 | AGAP009091 |
| 259 | AGAP009091 |
| 260 | AGAP009442 |
| 261 | AGAP009442 |
| 262 | AGAP009442 |
| 263 | AGAP010909 |
| 264 | AGAP010909 |
| 265 | AGAP010909 |
| 266 | AGAP010958 |
| 267 | AGAP012380 |
| 268 | AGAP012380 |
| 269 | AGAP012380 |
| 270 | CPIJ000025 |
| 271 | CPIJ000367 |
| 272 | CPIJ001133 |
| 273 | CPIJ001692 |
| 274 | CPIJ001739 |
| 275 | CPIJ001883 |
| 276 | CPIJ002710 |
| 277 | CPIJ002715 |
| 278 | CPIJ002718 |
| 279 | CPIJ002719 |
| 280 | CPIJ002726 |
| 281 | CPIJ002789 |
| 282 | CPIJ005348 |
| 283 | CPIJ005588 |
| 284 | CPIJ006105 |
| 285 | CPIJ007600 |
| 286 | CPIJ008100 |
| 287 | CPIJ008391 |
| 288 | CPIJ008494 |
| 289 | CPIJ008983 |
| 290 | CPIJ013307 |
| 291 | CPIJ013432 |
| 292 | CPIJ014043 |
| 293 | CPIJ014354 |
| 294 | CPIJ014659 |
| 295 | CPIJ014870 |
| 296 | CPIJ015607 |
| 297 | CPIJ015663 |
| 298 | CPIJ015791 |
| 299 | CPIJ018368 |
| 300 | CPIJ019419 |
| 301 | CPIJ019949 |

TABLE 4
(male sterility)

| Seq ID | Gene Symbol |
|---|---|
| 302 | AAEL001340 |
| 303 | AAEL001606 |
| 304 | AAEL002425 |
| 305 | AAEL002792 |
| 306 | AAEL003660 |
| 307 | AAEL004696 |
| 308 | AAEL004974 |
| 309 | AAEL006254 |
| 310 | AAEL006488 |
| 311 | AAEL006492 |
| 312 | AAEL008042 |
| 313 | AAEL008587 |
| 314 | AAEL008844 |
| 315 | AAEL008924 |
| 316 | AAEL008958 |
| 317 | AAEL009114 |
| 318 | AAEL009174 |
| 319 | AAEL009340 |
| 320 | AAEL009969 |
| 321 | AAEL010565 |
| 322 | AAEL010789 |
| 323 | AAEL010792 |
| 324 | AAEL011474 |
| 325 | AAEL011478 |
| 326 | AAEL011663 |
| 327 | AAEL011757 |
| 328 | AAEL011921 |
| 329 | AAEL014330 |
| 330 | AGAP000460 |
| 331 | AGAP000460 |
| 332 | AGAP000460 |
| 333 | AGAP000471 |
| 334 | AGAP000471 |
| 335 | AGAP000471 |
| 336 | AGAP000662 |
| 337 | AGAP000662 |
| 338 | AGAP000662 |
| 339 | AGAP001177 |
| 340 | AGAP001177 |
| 341 | AGAP001177 |
| 342 | AGAP001179 |
| 343 | AGAP001179 |
| 344 | AGAP001179 |
| 345 | AGAP001271 |
| 346 | AGAP001271 |
| 347 | AGAP001271 |
| 348 | AGAP001278 |
| 349 | AGAP001278 |
| 350 | AGAP001278 |
| 351 | AGAP001293 |
| 352 | AGAP001293 |
| 353 | AGAP001293 |
| 354 | AGAP001335 |
| 355 | AGAP001335 |
| 356 | AGAP001335 |
| 357 | AGAP001337 |
| 358 | AGAP001337 |
| 359 | AGAP001337 |
| 360 | AGAP001339 |
| 361 | AGAP001339 |
| 362 | AGAP001339 |
| 363 | AGAP001367 |
| 364 | AGAP001367 |
| 365 | AGAP001367 |
| 366 | AGAP001388 |
| 367 | AGAP001388 |
| 368 | AGAP001388 |
| 369 | AGAP001463 |
| 370 | AGAP001463 |
| 371 | AGAP001463 |
| 372 | AGAP001478 |
| 373 | AGAP001478 |
| 374 | AGAP001478 |
| 375 | AGAP001481 |
| 376 | AGAP001481 |
| 377 | AGAP001481 |
| 378 | AGAP001498 |
| 379 | AGAP001498 |
| 380 | AGAP001498 |
| 381 | AGAP002471 |
| 382 | AGAP002471 |
| 383 | AGAP002471 |
| 384 | AGAF002801 |
| 385 | AGAP004050 |
| 386 | AGAP004416 |
| 387 | AGAP004416 |
| 388 | AGAP004416 |
| 389 | AGAP004645 |
| 390 | AGAP004930 |
| 391 | AGAP006887 |
| 392 | AGAP006887 |
| 393 | AGAP006887 |
| 394 | AGAP007963 |
| 395 | AGAP008806 |
| 396 | CPIJ001185 |
| 397 | CPIJ001186 |
| 398 | CPIJ001187 |
| 399 | CPIJ001560 |
| 400 | CPIJ003158 |
| 401 | CPIJ003766 |
| 402 | CPIJ004057 |
| 403 | CPIJ004058 |
| 404 | CPIJ004318 |
| 405 | CPIJ005975 |
| 406 | CPIJ005976 |
| 407 | CPIJ007071 |
| 408 | CPIJ007072 |
| 409 | CPIJ007101 |
| 410 | CPIJ007172 |
| 411 | CPIJ007789 |
| 412 | CPIJ008481 |
| 413 | CPIJ008673 |
| 414 | CPIJ009011 |
| 415 | CPIJ009270 |
| 416 | CPIJ011557 |
| 417 | CPIJ011558 |
| 418 | CPIJ011708 |
| 419 | CPIJ012810 |
| 420 | CPIJ013126 |
| 421 | CPIJ015620 |
| 422 | CPIJ015622 |
| 423 | CPIJ017065 |
| 424 | CPIJ017887 |
| 425 | CPIJ019248 |
| 426 | CPIJ019249 |
| 427 | FBgn0127180 |

TABLE 5
(female sterility)

| SEQ ID | Name or access | |
|---|---|---|
| NO. | number | Description |
| 1829 | AeSCP-2 | Aedes aegypti sterol carrier protein-2 |
| | (AF510492.1) | |
| 1830 | AeAct-4 | Aedes aegypti pupal-specific flight |
| | (AY531222.2) | muscle actin mRNA, complete cds. |
| 1831 | AAEL002000 | Aedes aegypti zinc carboxypeptidase |
| | | partial mRNA |
| 1832 | AAEL005747 | Aedes aegypti hypothetical protein |
| | | partial mRNA (testicle target) |
| 700 | AAEL005656 | Aedes aegypti AAEL005656-RA partial |
| | | mRNA. |
| 678 | AAEL017015 | Aedes aegypti AAEL017015-RA mRNA |
| 652 | AAEL005212 | Aedes aegypti AAEL005212-RA mRNA. |
| 733 | AAEL005922 | Aedes aegypti AAEL005922-RA mRNA. |
| | | Aedes aegypti AAEL005922-RB partial |
| | | mRNA. |
| 722 | AAEL000903 | Aedes aegypti AAEL000903-RA |
| | | (ENY2_AEDAE), mRNA. |
| 638 | AAEL005049 | Aedes aegypti AAEL005049-RA mRNA. |
| 1753 | AAEL007698 | PIWI protein (Aub) |
| 1827 | AAEL007823 | PIWI protein (AGO3) |

[0137] As used herein, the term “downregulates an expression” or “downregulating expression” refers to causing, directly or indirectly, reduction in the transcription of a desired gene (as described herein), reduction in the amount, stability or translatability of transcription products (e.g. RNA) of the gene, and/or reduction in translation of the polypeptide(s) encoded by the desired gene.

[0138] Downregulating expression of a pathogen resistance gene product of a mosquito can be monitored, for example, by direct detection of gene transcripts (for example, by PCR), by detection of polypeptide(s) encoded by the gene (for example, by Western blot or immunoprecipitation), by detection of biological activity of polypeptides encode by the gene (for example, catalytic activity, ligand binding, and the like), or by monitoring changes in the mosquitoes (for example, reduced motility of the mosquito etc). Additionally or alternatively downregulating expression of a pathogen resistance gene product may be monitored by measuring pathogen levels (e.g. viral levels, bacterial levels etc.) in the mosquitoes as compared to wild type (i.e. control) mosquitoes not treated by the agents of the invention.

[0139] According to a specific embodiment the nucleic acid larvicide downregulates (reduces expression of) the target gene by at least 20%, 30%, 40%, 50%, or more, say 60%, 70%, 80%, 90% or more even 100%, as compared to the expression of the same target gene in an untreated control in the same species and developmental stage.

[0140] In some embodiments of the invention, the nucleic acid agent is a double stranded RNA (dsRNA). As used herein the term “dsRNA” relates to two strands of anti-parallel polyribonucleic acids held together by base pairing. The two strands can be of identical length or of different lengths provided there is enough sequence homology between the two strands that a double stranded structure is formed with at least 80%, 90%, 95% or 100% complementarity over the entire length. According to an embodiment of the invention, there are no overhangs for the dsRNA molecule. According to another embodiment of the invention, the dsRNA molecule comprises overhangs. According to other embodiments, the strands are aligned such that there are at least 1, 2, or 3 bases at the end of the strands which do not align (i.e., for which no complementary bases occur in the opposing strand) such that an overhang of 1, 2 or 3 residues occurs at one or both ends of the duplex when strands are annealed.

[0141] It will be noted that the dsRNA can be defined in terms of the nucleic acid sequence of the DNA encoding the target gene transcript, and it is understood that a dsRNA sequence corresponding to the coding sequence of a gene comprises an RNA complement of the gene's coding sequence, or other sequence of the gene which is transcribed into RNA.

[0142] The inhibitory RNA sequence can be greater than 90% identical, or even 100% identical, to the portion of the target gene transcript. Alternatively, the duplex region of the RNA may be defined functionally as a nucleotide sequence that is capable of hybridizing with a portion of the target gene transcript under stringent conditions (e.g., 400 mM NaCl, 40 mM PIPES pH 6.4, 1 mM EDTA, 60 degrees C. hybridization for 12-16 hours; followed by washing). The length of the double-stranded nucleotide sequences complementary to the target gene transcript may be at least about 18, 19, 21, 25, 50, 100, 200, 300, 400, 491, 500, 550, 600, 650, 700, 750, 800, 900, 1000 or more bases. In some embodiments of the invention, the length of the double-stranded nucleotide sequence is approximately from about 18 to about 1000, about 18 to about 750, about 18 to about 510, about 18 to about 400, about 18 to about 250 nucleotides in length.

[0143] The term “corresponds to” as used herein means a polynucleotide sequence homologous to all or a portion of a reference polynucleotide sequence. In contradistinction, the term “complementary to” is used herein to mean that the complementary sequence is homologous to all or a portion of a reference polynucleotide sequence. For example, the nucleotide sequence “TATAC” corresponds to a reference sequence “TATAC” and is complementary to a reference sequence “GTATA”.

[0144] The present teachings relate to various lengths of dsRNA, whereby the shorter version i.e., x is shorter or equals 50 bp (e.g., 17-50), is referred to as siRNA or miRNA. Longer dsRNA molecules of 51-600 are referred to herein as dsRNA, which can be further processed for siRNA molecules. According to some embodiments, the nucleic acid sequence of the dsRNA is greater than 15 base pairs in length. According to yet other embodiments, the nucleic acid sequence of the dsRNA is 19-25 base pairs in length, 30-100 base pairs in length, 100-250 base pairs in length or 100-500 base pairs in length. According to still other embodiments, the dsRNA is 500-800 base pairs in length, 700-800 base pairs in length, 300-600 base pairs in length, 350-500 base pairs in length or 400-450 base pairs in length. In some embodiments, the dsRNA is 400 base pairs in length. In some embodiments, the dsRNA is 750 base pairs in length.

[0145] The term “siRNA” refers to small inhibitory RNA duplexes (generally between 17-30 basepairs, but also longer e.g., 31-50 bp) that induce the RNA interference (RNAi) pathway. Typically, siRNAs are chemically synthesized as 21mers with a central 19 bp duplex region and symmetric 2-base 3′-overhangs on the termini, although it has been recently described that chemically synthesized RNA duplexes of 25-30 base length can have as much as a 100-fold increase in potency compared with 21mers at the same location. The observed increased potency obtained using longer RNAs in triggering RNAi is theorized to result from providing Dicer with a substrate (27mer) instead of a product (21mer) and that this improves the rate or efficiency of entry of the siRNA duplex into RISC.

[0146] It has been found that position of the 3′-overhang influences potency of an siRNA and asymmetric duplexes having a 3′-overhang on the antisense strand are generally more potent than those with the 3′-overhang on the sense strand (Rose et al., 2005). This can be attributed to asymmetrical strand loading into RISC, as the opposite efficacy patterns are observed when targeting the antisense transcript.

[0147] The strands of a double-stranded interfering RNA (e.g., an siRNA) may be connected to form a hairpin or stem-loop structure (e.g., an shRNA). Thus, as mentioned the RNA silencing agent of some embodiments of the invention may also be a short hairpin RNA (shRNA).

[0148] The term “shRNA”, as used herein, refers to an RNA agent having a stem-loop structure, comprising a first and second region of complementary sequence, the degree of complementarity and orientation of the regions being sufficient such that base pairing occurs between the regions, the first and second regions being joined by a loop region, the loop resulting from a lack of base pairing between nucleotides (or nucleotide analogs) within the loop region. The number of nucleotides in the loop is a number between and including 3 to 23, or 5 to 15, or 7 to 13, or 4 to 9, or 9 to 11. Some of the nucleotides in the loop can be involved in base-pair interactions with other nucleotides in the loop. Examples of oligonucleotide sequences that can be used to form the loop include 5′-UUCAAGAGA-3′ (Brummelkamp, T. R. et al. (2002) Science 296: 550, SEQ ID NO: 428) and 5′-UUUGUGUAG-3′ (Castanotto, D. et al. (2002) RNA 8:1454, SEQ ID NO: 429). It will be recognized by one of skill in the art that the resulting single chain oligonucleotide forms a stem-loop or hairpin structure comprising a double-stranded region capable of interacting with the RNAi machinery.

[0149] As used herein, the phrase “microRNA (also referred to herein interchangeably as “miRNA” or “miR”) or a precursor thereof” refers to a microRNA (miRNA) molecule acting as a post-transcriptional regulator. Typically, the miRNA molecules are RNA molecules of about 20 to 22 nucleotides in length which can be loaded into a RISC complex and which direct the cleavage of another RNA molecule, wherein the other RNA molecule comprises a nucleotide sequence essentially complementary to the nucleotide sequence of the miRNA molecule.

[0150] Typically, a miRNA molecule is processed from a “pre-miRNA” or as used herein a precursor of a pre-miRNA molecule by proteins, such as DCL proteins, present in any plant cell and loaded onto a RISC complex where it can guide the cleavage of the target RNA molecules.

[0151] Pre-microRNA molecules are typically processed from pri-microRNA molecules (primary transcripts). The single stranded RNA segments flanking the pre-microRNA are important for processing of the pri-miRNA into the pre-miRNA. The cleavage site appears to be determined by the distance from the stem-ssRNA junction (Han et al. 2006, Cell 125, 887-901, 887-901).

[0152] As used herein, a “pre-miRNA” molecule is an RNA molecule of about 100 to about 200 nucleotides, preferably about 100 to about 130 nucleotides which can adopt a secondary structure comprising an imperfect double stranded RNA stem and a single stranded RNA loop (also referred to as “hairpin”) and further comprising the nucleotide sequence of the miRNA (and its complement sequence) in the double stranded RNA stem. According to a specific embodiment, the miRNA and its complement are located about 10 to about 20 nucleotides from the free ends of the miRNA double stranded RNA stem. The length and sequence of the single stranded loop region are not critical and may vary considerably, e.g. between 30 and 50 nucleotides in length. The complementarity between the miRNA and its complement need not be perfect and about 1 to 3 bulges of unpaired nucleotides can be tolerated. The secondary structure adopted by an RNA molecule can be predicted by computer algorithms conventional in the art such as mFOLD. The particular strand of the double stranded RNA stem from the pre-miRNA which is released by DCL activity and loaded onto the RISC complex is determined by the degree of complementarity at the 5′ end, whereby the strand which at its 5′ end is the least involved in hydrogen bounding between the nucleotides of the different strands of the cleaved dsRNA stem is loaded onto the RISC complex and will determine the sequence specificity of the target RNA molecule degradation. However, if empirically the miRNA molecule from a particular synthetic pre-miRNA molecule is not functional (because the “wrong” strand is loaded on the RISC complex), it will be immediately evident that this problem can be solved by exchanging the position of the miRNA molecule and its complement on the respective strands of the dsRNA stem of the pre-miRNA molecule. As is known in the art, binding between A and U involving two hydrogen bounds, or G and U involving two hydrogen bounds is less strong that between G and C involving three hydrogen bounds.

[0153] Naturally occurring miRNA molecules may be comprised within their naturally occurring pre-miRNA molecules but they can also be introduced into existing pre-miRNA molecule scaffolds by exchanging the nucleotide sequence of the miRNA molecule normally processed from such existing pre-miRNA molecule for the nucleotide sequence of another miRNA of interest. The scaffold of the pre-miRNA can also be completely synthetic. Likewise, synthetic miRNA molecules may be comprised within, and processed from, existing pre-miRNA molecule scaffolds or synthetic pre-miRNA scaffolds. Some pre-miRNA scaffolds may be preferred over others for their efficiency to be correctly processed into the designed microRNAs, particularly when expressed as a chimeric gene wherein other DNA regions, such as untranslated leader sequences or transcription termination and polyadenylation regions are incorporated in the primary transcript in addition to the pre-microRNA.

[0154] According to the present teachings, the dsRNA molecules may be naturally occurring or synthetic.

[0155] The dsRNA can be a mixture of long and short dsRNA molecules such as, dsRNA, siRNA, siRNA+dsRNA, siRNA+miRNA, or a combination of same.

[0156] The nucleic acid larvicide is designed for specifically targeting a target gene of interest. It will be appreciated that the nucleic acid larvicide can be used to downregulate one or more target genes (e.g., belonging to groups (i) to (iv), as described above). If a number of target genes are targeted, a heterogenic composition which comprises a plurality of nucleic acid larvicides for targeting a number of target genes is used. Alternatively the plurality of nucleic acid larvicides are separately formulated. According to a specific embodiment, a number of distinct nucleic acid larvicide molecules for a single target are used, which may be separately or simultaneously (i.e., co-formulation) applied.

[0157] For example, in order to silence the expression of an mRNA of interest, synthesis of the dsRNA suitable for use with some embodiments of the invention can be selected as follows. First, the mRNA sequence is scanned including the 3′ UTR and the 5′ UTR.

[0158] Second, the mRNA sequence is compared to an appropriate genomic database using any sequence alignment software, such as the BLAST software available from the NCBI server (wwwdotncbidotnlmdotnihdotgov/BLAST/). Putative regions in the mRNA sequence which exhibit significant homology to other coding sequences are filtered out.

[0159] Qualifying target sequences are selected as template for dsRNA synthesis. Preferred sequences are those that have as little homology to other genes in the genome to reduce an “off-target” effect.

[0160] It will be appreciated that the RNA silencing agent of some embodiments of the invention need not be limited to those molecules containing only RNA, but further encompasses chemically-modified nucleotides and non-nucleotides.

[0161] According to one embodiment, the dsRNA specifically targets a gene selected from the group consisting of sodium channel (AAEL008297), P-glycoprotein (AAEL010379), Argonaute-3 (AAEL007823), cytochrome p450 (CYP9J26, JF924909.1), Aub (AAEL007698), AeSCP-2 (AF510492.1), AeAct-4 (AY531222.2), AAEL002000, AAEL005747, AAEL017015, AAEL005212, AAEL005922, AAEL000903, AAEL005656 or AAEL005049.

[0162] Thus, a combination of two or more silencing agents e.g., dsRNAs, for a single target gene or distinct genes is contemplated according to the present teachings.

[0163] Thus, for example, a combination of dsRNA targeting the genes Aubergine (Aub, AAEL007698) and Argonaute-3 (AAEL007823) is contemplated herein. When referring to targeting together it is understood that the larvae may be administered two silencing agents, e.g., dsRNAs, concomitantly or subsequently to one another (e.g. hours or days apart).

[0164] According to one embodiment, the dsRNA is selected from the group consisting of SEQ ID NOs: 1822-1825 and 1857-1868.

[0165] According to a specific embodiment, the dsRNA comprises SEQ ID NOs: 1858 and 1832.

[0166] The dsRNA may be synthesized using any method known in the art, including either enzymatic syntheses or solid-phase syntheses. These are especially useful in the case of short polynucleotide sequences with or without modifications as explained above. Equipment and reagents for executing solid-phase synthesis are commercially available from, for example, Applied Biosystems. Any other means for such synthesis may also be employed; the actual synthesis of the oligonucleotides is well within the capabilities of one skilled in the art and can be accomplished via established methodologies as detailed in, for example: Sambrook, J. and Russell, D. W. (2001), “Molecular Cloning: A Laboratory Manual”; Ausubel, R. M. et al., eds. (1994, 1989), “Current Protocols in Molecular Biology,” Volumes I-III, John Wiley & Sons, Baltimore, Md.; Perbal, B. (1988), “A Practical Guide to Molecular Cloning,” John Wiley & Sons, New York; and Gait, M. J., ed. (1984), “Oligonucleotide Synthesis”; utilizing solid-phase chemistry, e.g. cyanoethyl phosphoramidite followed by deprotection, desalting, and purification by, for example, an automated trityl-on method or HPLC.

[0167] According to a specific embodiment, large scale dsRNA preparation is performed by PCR using synthetic DNA templates, such as with the Ambion® MEGAscript® RNAi Kit. dsRNA integrity is verified on gel and purified by a column based method. The concentration of the dsRNA is evaluated both by Nano-drop and gel-based estimation. This dsRNA serves for the following experiments.

[0168] According to a specific embodiment, the cell is devoid of a heterologous promoter for driving recombinant expression of the dsRNA (exogenous), rendering the nucleic acid molecule of the instant invention a naked molecule. The nucleic acid agent may still comprise modifications that may affect its stability and bioavailability (e.g., PNA).

[0169] The term “recombinant expression” refers to an expression from a nucleic acid construct.

[0170] As used herein “devoid of a heterologous promoter for driving expression of the dsRNA” means that the cell doesn't include a cis-acting regulatory sequence (e.g., heterologous) transcribing the dsRNA in the cell. As used herein the term “heterologous” refers to exogenous, not-naturally occurring within the native cell (such as by position of integration, or being non-naturally found within the cell).

[0171] Although the instant teachings mainly concentrate on the use of dsRNA which is not comprised in or transcribed from an expression vector (naked), the present teachings also contemplate an embodiment wherein the nucleic acid larvicide is ligated into a nucleic acid construct comprising additional regulatory elements. Thus, according to some embodiments of the invention there is provided a nucleic acid construct comprising an isolated nucleic acid agent comprising a nucleic acid sequence larvicide.

[0172] For transcription from an expression cassette, a regulatory region (e.g., promoter, enhancer, silencer, leader, intron and polyadenylation) may be used to modulate the transcription of the RNA strand (or strands). Therefore, in one embodiment, there is provided a nucleic acid construct comprising the nucleic acid larvicide. The nucleic acid construct can have polynucleotide sequences constructed to facilitate transcription of the RNA molecules of the present invention are operably linked to one or more promoter sequences functional in a host cell. The polynucleotide sequences may be placed under the control of an endogenous promoter normally present in the host genome. The polynucleotide sequences of the present invention, under the control of an operably linked promoter sequence, may further be flanked by additional sequences that advantageously affect its transcription and/or the stability of a resulting transcript. Such sequences are generally located upstream of the promoter and/or downstream of the 3′ end of the expression construct. The term “operably linked”, as used in reference to a regulatory sequence and a structural nucleotide sequence, means that the regulatory sequence causes regulated expression of the linked structural nucleotide sequence. “Regulatory sequences” or “control elements” refer to nucleotide sequences located upstream, within, or downstream of a structural nucleotide sequence, and which influence the timing and level or amount of transcription, RNA processing or stability, or translation of the associated structural nucleotide sequence. Regulatory sequences may include promoters, translation leader sequences, introns, enhancers, stem-loop structures, repressor binding sequences, termination sequences, pausing sequences, polyadenylation recognition sequences, and the like. In some embodiments, the host is an algae, and promoter and other regulatory elements are active in algae.

[0173] As mentioned, the composition-of matter of some embodiments comprises cells, which comprises the nucleic acid larvicide.

[0174] As used herein the term “cell” or “cells” refers to a mosquito larvae ingestible cell.

[0175] Examples of such cells include, but are not limited to, cells of phytoplankton (e.g., algae), fungi (e.g., Legendium giganteum), bacteria, and zooplankton such as rotifers.

[0176] Specific examples include, bacteria (e.g., cocci and rods), filamentous algae and detritus.

[0177] The choice of the cell may depend on the target larvae.

[0178] Analyzing the gut content of mosquitoes and larvae may be used to elucidate their preferred diet. The skilled artisan knows how to characterize the gut content. Typically the gut content is stained such as by using a fluorochromatic stain, 4′,6-diamidino-2-phenylindole or DAPI.

[0179] Cells (also referred to herein as “host cells”) of particular interest are the prokaryotes and the lower eukaryotes, such as fungi. Illustrative prokaryotes, both Gram-negative and -positive, include Enterobacteriaceae; Bacillaceae; Rhizobiceae; Spirillaceae; Lactobacillaceae; and phylloplane organisms such as members of the Pseudomonadaceae.

[0180] An exemplary list includes Bacillus spp., including B. megaterium, B. subtilis; B. cereus, Bacillus thuringiensis, Escherichia spp., including E. coli, and/or Pseudomonas spp., including P. cepacia, P. aeruginosa, and P. fluorescens. Among eukaryotes are fungi, such as Phycomycetes and Ascomycetes, which includes yeast, such as Schizosaccharomyces; and Basidiomycetes, Rhodotorula, Aureobasidium, Sporobolomyces, Saccharomyces spp., and Sporobolomyces spp.

[0181] According to a specific embodiment, the host cell is an algal cell.

[0182] Various algal species can be used in accordance with the teachings of the invention since they are a significant part of the diet for many kinds of mosquito larvae that feed opportunistically on microorganisms as well as on small aquatic animals such as rotifers.

[0183] Examples of algae that can be used in accordance with the present teachings include, but are not limited to, blue-green algae as well as green algae.

[0184] According to a specific embodiment, the algal cell is a cyanobacterium cell which is in itself toxic to mosquitoes as taught by Marten 2007 Biorational Control of Mosquitoes. American mosquito control association Bulletin No. 7.

[0185] Specific examples of algal cells which can be used in accordance with the present teachings are provided in Marten, G. G. (1986) Mosquito control by plankton management: the potential of indigestible green algae. Journal of Tropical Medicine and Hygiene, 89: 213-222, and further listed infra.

### Green Algae

[0186] Actinastrum hantzschii
Ankistrodesmus falcatus
Ankistrodesmus spiralis
Aphanochaete elegans

### Chlamydomonas sp.

[0187] Chlorella ellipsoidea
Chlorella pyrenoidosa
Chlorella variegata
Chlorococcum hypnosporum
Chodatella brevispina
Closterium acerosum
Closteriopsis acicularis
Coccochloris peniocystis
Crucigenia lauterbornii
Crucigenia tetrapedia
Coronastrum ellipsoideum
Cosmarium botrytis
Desmidium swartzii
Eudorina elegans
Gloeocystis gigas
Golenkinia minutissima
Gonium multicoccum
Nannochloris oculata
Oocystis mars sonii
Oocystis minuta
Oocystis pusilla
Palmella texensis
Pandorina morum
Paulschulzia pseudovolvox
Pediastrum clathratum
Pediastrum duplex
Pediastrum simplex
Planktosphaeria gelatinosa
Polyedriopsis spinulosa
Pseudococcomyxa adhaerans
Quadrigula closterioides
Radiococcus nimbatus
Scenedesmus basiliensis
Spirogyra pratensis
Staurastrum gladiosum
Tetraedron bitridens
Trochiscia hystrix

### Blue-Green Algae

[0188] Anabaena catenula
Anabaena spiroides
Chroococcus turgidus
Cylindrospermum licheniforme

### Bucapsis sp. (U. Texas No. 1519)

[0189] Lyngbya spiralis
Microcystis aeruginosa
Nodularia spumigena
Nostoc linckia
Oscillatoria lutea

### Phormidiumfaveolarum

[0190] Spinilina platensis

### Other

[0191] Compsopogon coeruleus
CTyptomonas ovata
Navicula pelliculosa

[0192] The nucleic acid larvicide is introduced into the cells. To this end cells are typically selected exhibiting natural competence or are rendered competent, also referred to as artificial competence.

[0193] Competence is the ability of a cell to take up nucleic acid molecules e.g., the nucleic acid larvicide, from its environment.

[0194] A number of methods are known in the art to induce artificial competence.

[0195] Thus, artificial competence can be induced in laboratory procedures that involve making the cell passively permeable to the nucleic acid larvicide by exposing it to conditions that do not normally occur in nature. Typically the cells are incubated in a solution containing divalent cations (e.g., calcium chloride) under cold conditions, before being exposed to a heat pulse (heat shock).

[0196] Electroporation is another method of promoting competence. In this method the cells are briefly shocked with an electric field (e.g., 10-20 kV/cm) which is thought to create holes in the cell membrane through which the nucleic acid larvicide may enter. After the electric shock the holes are rapidly closed by the cell's membrane-repair mechanisms.

[0197] Yet alternatively or additionally, cells may be treated with enzymes to degrade their cell walls, yielding. These cells are very fragile but take up foreign nucleic acids at a high rate.

[0198] Exposing intact cells to alkali cations such as those of cesium or lithium allows the cells to take up nucleic acids. Improved protocols use this transformation method, while employing lithium acetate, polyethylene glycol, and single-stranded nucleic acids. In these protocols, the single-stranded molecule preferentially binds to the cell wall in yeast cells, preventing double stranded molecule from doing so and leaving it available for transformation.

[0199] Enzymatic digestion or agitation with glass beads may also be used to transform cells.

[0200] Particle bombardment, microprojectile bombardment, or biolistics is yet another method for artificial competence. Particles of gold or tungsten are coated with the nucleic acid agent and then shot into cells.

[0201] Astier C R Acad Sci Hebd Seances Acad Sci D. 1976 Feb. 23; 282(8):795-7, which is hereby incorporated by reference in its entirety, teaches transformation of a unicellular, facultative chemoheterotroph blue-green Algae, Aphanocapsa 6714. The recipient strain becomes competent when the growth reaches its second, slower, exponential phase.

[0202] Vázquez-Acevedo M¹Mitochondrion. 2014 Feb. 21. pii: 51567-7249(14)00019-1. doi: 10.1016/j.mito.2014.02.005, which is hereby incorporated by reference in its entirety, teaches transformation of algal cells e.g., Chlamydomonas reinhardtii, Polytomella sp. and Volvox carteri by generating import-competent mitochondria.

[0203] According to a specific embodiment the composition of the invention comprises an RNA binding protein.

[0204] According to a specific embodiment, the dsRNA binding protein (DRBP) comprises any of the family of eukaryotic, prokaryotic, and viral-encoded products that share a common evolutionarily conserved motif specifically facilitating interaction with dsRNA. Polypeptides which comprise dsRNA binding domains (DRBDs) may interact with at least 11 bp of dsRNA, an event that is independent of nucleotide sequence arrangement. More than 20 DRBPs have been identified and reportedly function in a diverse range of critically important roles in the cell. Examples include the dsRNA-dependent protein kinase PKR that functions in dsRNA signaling and host defense against virus infection and DICER.

[0205] Alternatively or additionally, an siRNA binding protein may be used as taught in U.S. Pat. Application No. 20140045914, which is herein incorporated by reference in its entirety.

[0206] According to a specific embodiment the RNA binding protein is the p19 RNA binding protein. The protein may increase in vivo stability of an siRNA molecule by coupling it at a binding site where the homodimer of the p19 RNA binding proteins is formed and thus protecting the siRNA from external attacks and accordingly, it can be utilized as an effective siRNA delivery vehicle.

[0207] According to a specific embodiment, the target-oriented peptide is located on the surface of the siRNA binding protein.

[0208] According to specific embodiments of the invention, whole cell preparations, cell extracts, cell suspensions, cell homogenates, cell lysates, cell supernatants, cell filtrates, or cell pellets of cell cultures of cells comprising the nucleic acid larvicide can be used.

[0209] For feeding adult mosquitoes, the cells or may be further combined with food supplements which are typically consumed by adult mosquitoes.

[0210] Adult mosquitoes typically feed on blood (female mosquitoes) and nectar of flowers (male mosquitoes), but have been known to ingest non-natural feeds as well. Mosquitoes can be fed various foodstuffs including but not limited to egg/soy protein mixture, carbohydrate foods such as sugar solutions (e.g. sugar syrup), corn syrup, honey, various fruit juices, raisins, apple slices and bananas. These can be provided as a dry mix or as a solution in open feeders. Soaked cotton balls, sponges or alike can also be used to providing a solution (e.g. sugar solution) to adult mosquitoes.

[0211] Feed suitable for adult mosquitoes may further include blood, blood components (e.g. plasma, hemoglobin, gamma globulin, red blood cells, adenosine triphosphate, glucose, and cholesterol), or an artificial medium (e.g., such a media is disclosed in U.S. Pat. No. 8,133,524 and in U.S. Patent Application No. 20120145081, both of which are incorporated by reference herein). The composition of some embodiments of the invention may further comprise at least one of a surface-active agent, an inert carrier vehicle, a preservative, a humectant, a feeding stimulant, an attractant, an encapsulating agent, a binder, an emulsifier, a dye, an ultra-violet protector, a buffer, a flow agent or fertilizer, micronutrient donors, or other preparations that influence the growth of the plant.

[0212] Additionally, the composition may be supplemented with larval food (food bait) or with excrements of farm animals, on which the larvae feed.

[0213] According to one embodiment, the composition is administered to the larvae by feeding.

[0214] Feeding the larva with the composition can be effected for about 2 hours to 120 hours, about 2 hours to 108 hours, about 2 hours to 96 hours, about 2 hours to 84 hours, about 2 hours to 72 hours, for about 2 hours to 60 hours, about 2 hours to 48 hours, about 2 hours to 36 hours, about 2 hours to 24 hours, about 2 hours to 12 hours, 12 hours to 24 hours, about 24 hours to 36 hours, about 24 hours to 48 hours, about 36 hours to 48 hours, for about 48 hours to 60 hours, about 60 hours to 72 hours, about 72 hours to 84 hours, about 84 hours to 96 hours, about 96 hours to 108 hours, or about 108 hours to 120 hours.

[0215] According to a specific embodiment, the composition is administered to the larvae by feeding for 48-96 hours.

[0216] According to one embodiment, feeding the larva with the composition is affected until the larva reaches pupa stage.

[0217] According to one embodiment, prior to feeding the larva with dsRNA, the larvae are first soaked with dsRNA.

[0218] Soaking the larva with the composition can be effected for about 2 hours to 96 hours, about 2 hours to 84 hours, about 2 hours to 72 hours, for about 2 hours to 60 hours, about 2 hours to 48 hours, about 2 hours to 36 hours, about 2 hours to 24 hours, about 2 hours to 12 hours, 12 hours to 96 hours, about 12 hours to 84 hours, about 12 hours to 72 hours, for about 12 hours to 60 hours, about 12 hours to 48 hours, about 12 hours to 36 hours, about 12 hours to 24 hours, or about 24 hours to 48 hours.

[0219] According to a specific embodiment, the composition is administered to the larvae by soaking for 12-24 hours.

[0220] Thus, for example, larvae (e.g. first, second, third or four instar larva, e.g. third instar larvae) are first treated (in groups of about 100 larvae) with dsRNA at a dose of about 0.001-5 μg/μL (e.g. 0.2 μg/μL), in a final volume of about 3 mL of dsRNA solution in autoclaved water. After soaking in the dsRNA solutions for about 12-48 hours (e.g. for 24 hrs) at 25-29° C. (e.g. 27° C.), the larvae are transferred into containers so as not to exceed concentration of about 200-500 larvae/1500 mL (e.g. 300 larvae/1500 mL) of chlorine-free tap water, and provided with food containing dsRNA (e.g. agarose cubes containing 300 μg of dsRNA, e.g. 1 μg of dsRNA/larvae). The larva are fed once a day until they reach pupa stage (e.g. for 2-5 days, e.g. four days). Larvae are also fed with additional food requirements, e.g. 2-10 mg/100 mL (e.g. 6 mg/100 mL) lab dog/cat diet suspended in water.

[0221] Feeding the larva can be effected using any method known in the art. Thus, for example, the larva may be fed with agrose cubes, chitosan nanoparticles, oral delivery or diet containing dsRNA.

[0222] Chitosan nanoparticles: A group of 15-20 3rd-instar mosquito larvae are transferred into a container (e.g. 500 ml glass beaker) containing 50-1000 ml, e.g. 100 ml, of deionized water. One sixth of the gel slices that are prepared from dsRNA (e.g. 32 μg of dsRNA) are added into each beaker. Approximately an equal amount of the gel slices are used to feed the larvae once a day for a total of 2-5 days, e.g. four days (see Insect Mol Biol. 2010 19(5):683-93).

[0223] Oral delivery of dsRNA: First instar larvae (less than 24 hrs old) are treated in groups of 10-100, e.g. 50, in a final volume of 25-100 μl of dsRNA, e.g. 75 μl of dsRNA, at various concentrations (ranging from 0.01 to 5 μg/μl, e.g. 0.02 to 0.5 μg/μl-dsRNAs) in tubes e.g. 2 mL microfuge tube (see J Insect Sci. 2013; 13:69).

[0224] Diet containing dsRNA: larvae are fed a single concentration of 1-2000 ng dsRNA/mL, e.g. 1000 ng dsRNA/mL, diet in a diet overlay bioassay for a period of 1-10 days, e.g. 5 days (see PLoS One. 2012; 7(10): e47534.).

[0225] Diet containing dsRNA: Newly emerged larvae are starved for 1-12 hours, e.g. 2 hours, and are then fed with a single drop of 0.5-10 e.g. 1 containing 1-20 μg, e.g. 4 μg, dsRNA (1-20 μg of dsRNA/larva, e.g. 4 μg of dsRNA/larva) (see Appl Environ Microbiol. 2013 August; 79(15):4543-50).

[0226] According to a further specific embodiment, the composition may further comprise a chemical larvicide, a biochemical larvicide (a biopesticide) or a combination of same.

[0227] According to the U.S. Environmental Protection Agency (EPA), Biopesticides are certain types of pesticides derived from such natural materials as animals, plants, bacteria, and certain minerals. Biopesticides fall into three major classes: (1) Microbial pesticides consist of a microorganism (e.g., a bacterium, fungus, virus or protozoan) as the active ingredient. The most widely used microbial pesticides are subspecies and strains of Bacillus thuringiensis, or Bt. Each strain of this bacterium produces a different mix of proteins, and specifically kills one or a few related species of insect larvae. (2) Plant-Incorporated-Protectants (PIPs) are pesticidal substances that plants produce from genetic material that has been added to the plant. (3) Biochemical pesticides are naturally occurring substances that control pests by non-toxic mechanisms. Conventional pesticides, by contrast, are generally synthetic materials that directly kill or inactivate the pest. Biochemical pesticides include substances, such as insect sex pheromones, that interfere with mating, as well as various scented plant extracts that attract insect pests to traps.

[0228] Exemplary compounds mostly used as larvicides include, but are not limited to, organophosphates and surface oils and films.

[0229] Further examples of larvicides include, but are not limited to, waste oil or diesel oil products. Paris green dust is an arsenical insecticide, used along with undiluted diesel oil, and dichloro-diphenyl-trichloroethane (DDT), used as both an adulticide and a larvicide, malathion, an organophosphate (OP) compound, increased, but resistance was soon observed. The term organophosphate (OP) refers to all pesticides containing phosphorus, acting through inhibition of the activity of cholinesterase enzymes at the neuromuscular junction. Temephos is currently the only OP registered for use as a larvicide in the US.

[0230] Biolarvicides are comprised of two major categories: (1) Microbial agents (e.g., bacteria) and (2) Biochemical agents (e.g., pheromones, hormones, growth regulators, and enzymes). Regarding microbial agents, controlled-release formulations of at least one biological pesticidal ingredient are disclosed in U.S. Pat. No. 4,865,842; control of mosquito larvae with a spore-forming Bacillus ONR-60A is disclosed in U.S. Pat. No. 4,166,112; novel Bacillus thuringiensis isolates with activity against dipteran insect pests are disclosed in U.S. Pat. Nos. 5,275,815 and 5,847,079; a biologically pure culture of a Bacillus thuringiensis strain with activity against insect pests of the order Diptera is disclosed in U.S. Pat. No. 5,912,162; a recombinantly derived biopesticide active against Diptera including cyanobacteria transformed with a plasmid containing a B. thuringiensis subsp. israelensis dipteracidal protein translationally fused to a strong, highly active native cyanobacteria's regulatory gene sequence is disclosed in U.S. Pat. No. 5,518,897 and a formulation of Bacillus thuringiensis subspecies Israelensis and Bacillus sphaericus to manage mosquito larvicide resistance U.S. Pat. No. 7,989,180 B2.

[0231] Biochemical agents such as Insect Growth Regulators (IGRS) mimics naturally occurring insect biochemicals and Methoprene (a juvenile hormone (JH) analog) is a commercially available insecticide of this class.

[0232] According to one embodiment, the larvicide is selected from the group consisting of Temephos, Diflubenzuron, Methoprene, or a microbial larvicide such as Bacillus sphaericus or Bacillus thuringiensis israelensis.

[0233] According to one embodiment, the larvicide comprises an adulticide.

[0234] Exemplary adulticides include, but are not limited to, deltamethrin, malathion, naled, chlorpyrifos, permethrin, resmethrin or sumithrin.

[0235] According to a specific embodiment, the cells are formulated by any means known in the art. The methods for preparing such formulations include, e.g., desiccation, lyophilization, homogenization, extraction, filtration, encapsulation centrifugation, sedimentation, or concentration of one or more cell types.

[0236] In one embodiment, the composition comprises an oil flowable suspension. For example, in some embodiments, oil flowable or aqueous solutions may be formulated to contain lysed or unlysed cells, spores, or crystals.

[0237] In a further embodiment, the composition may be formulated as a water dispersible granule or powder.

[0238] In yet a further embodiment, the compositions of the present invention may also comprise a wettable powder, spray, emulsion, colloid, aqueous or organic solution, dust, pellet, or colloidal concentrate. Dry forms of the compositions may be formulated to dissolve immediately upon wetting, or alternatively, dissolve in a controlled-release, sustained-release, or other time-dependent manner.

[0239] Alternatively or additionally, the composition may comprise an aqueous solution. Such aqueous solutions or suspensions may be provided as a concentrated stock solution which is diluted prior to application, or alternatively, as a diluted solution ready-to-apply. Such compositions may be formulated in a variety of ways. They may be employed as wettable powders, granules or dusts, by mixing with various inert materials, such as inorganic minerals (silicone or silicon derivatives, phyllosilicates, carbonates, sulfates, phosphates, and the like) or botanical materials (powdered corncobs, rice hulls, walnut shells, and the like).

[0240] The formulations may include spreader-sticker adjuvants, stabilizing agents, other pesticidal additives, or surfactants. Liquid formulations may be employed as foams, suspensions, emulsifiable concentrates, or the like. The ingredients may include Theological agents, surfactants, emulsifiers, dispersants, or polymers.

[0241] As mentioned, the dsRNA of the invention may be administered as a naked dsRNA. Alternatively, the dsRNA of the invention may be conjugated to a carrier known to one of skill in the art, such as a transfection agent e.g. PEI or chitosan or a protein/lipid carrier.

[0242] The compositions may be formulated prior to administration in an appropriate means such as lyophilized, freeze-dried, microencapsulated, desiccated, or in an aqueous carrier, medium or suitable diluent, such as saline or other buffer. Suitable agricultural carriers can be solid, semi-solid or liquid and are well known in the art. The term “agriculturally-acceptable carrier” covers all adjuvants, e.g., inert components, dispersants, surfactants, tackifiers, binders, etc. that are ordinarily used in pesticide formulation technology.

[0243] According to one embodiment, the composition is formulated as a semi-solid such as in agarose (e.g. agarose cubes).

[0244] The mosquito larva food containing dsRNA may be prepared by any method known to one of skill in the art. Thus, for example, cubes of dsRNA-containing mosquito food may be prepared by first mixing 10-500 μg, e.g. 300 μg of dsRNA with 3 to 300 μg, e.g. 10 μg of a transfection agent e.g. Polyethylenimine 25 kDa linear (Polysciences) in 10-500 μL, e.g. 200 μL of sterile water. Alternatively, 2 different dsRNA (10-500 μg, e.g. 150 μg of each) plus 3 to 300 μg, e.g. 30 μg of Polyethylenimine may be mixed in 10-500 μL, e.g. 200 μL of sterile water. Alternatively, cubes of dsRNA-containing mosquito food may be prepared without the addition of transfection reagents. Then, a suspension of ground mosquito larval food (1-20 grams/100 mL e.g. 6 grams/100 mL) may be prepared with 2% agarose (Fisher Scientific). The food/agarose mixture can then be heated to 53-57° C., e.g. 55° C., and 10-500 μL, e.g. 200 μL of the mixture can then be transferred to the tubes containing 10-500 μL, e.g. 200 μL of dsRNA+PEI or dsRNA only. The mixture is then allowed to solidify into a gel. The solidified gel containing both the food and dsRNA can be cut into small pieces (approximately 1-10 mm, e.g. 1 mm, thick) using a razor blade, and can be used to feed mosquito larvae in water.

[0245] Compositions of the invention can be used to control or exterminate mosquitoes. Such an application comprises feeding larvae of the mosquitoes with an effective amount of the composition to thereby control or exterminate the mosquitoes.

[0246] According to a specific embodiment, the composition may be applied to standing water.

[0247] The pesticidal compositions of the invention may be employed in the method of the invention singly or in combination with other compounds, including, but not limited to, other pesticides (not included in the formulation as described above).

[0248] Regardless of the method of application, the amount of the active component(s) are applied at a larvicidally-effective amount, which will vary depending on factors such as, for example, the specific mosquito to be controlled, the water source to be treated, the environmental conditions, and the method, rate, and quantity of application of the larvicidally-active composition.

[0249] The concentration of larvicidal composition that is used for environmental, systemic, or foliar application will vary widely depending upon the nature of the particular formulation, means of application, environmental conditions, and degree of biocidal activity.

[0250] The larvae may be pathogenically infected as described above or uninfected larvae.

[0251] The concentration of the composition that is used for environmental, systemic, or foliar application will vary widely depending upon the nature of the particular formulation, means of application, environmental conditions, and degree of activity.

[0252] Exemplary concentrations of dsRNA in the composition include, but are not limited to, about 1 pg-10 μg of dsRNA/μl, about 1 pg-1 μg of dsRNA/μl, about 1 pg-0.1 μg of dsRNA/μl, about 1 pg-0.01 μg of dsRNA/μl, about 1 pg-0.001 μg of dsRNA/μl, about 0.001 μg-10 μg of dsRNA/μl, about 0.001 μg-5 μg of dsRNA/μl, about 0.001 μg-1 μg of dsRNA/μl, about 0.001 μg-0.1 μg of dsRNA/μl, about 0.001 μg-0.01 μg of dsRNA/μl, about 0.01 μg-10 μg of dsRNA/μl, about 0.01 μg-5 μg of dsRNA/μl, about 0.01 μg-1 μg of dsRNA/μl, about 0.01 μg-0.1 μg of dsRNA/μl, about 0.1 μg-10 μg of dsRNA/μl, about 0.1 μg-5 μg of dsRNA/μl, about 0.5 μg-5 μg of dsRNA/μl, about 0.5 μg-10 μg of dsRNA/μl, about 1 μg-5 μg of dsRNA/μl, or about 1 μg-10 μg of dsRNA/μl.

[0253] When formulated as a feed, the dsRNA may be effected at a dose of 1 pg/larvae-1000 μg/larvae, 1 pg/larvae-500 μg/larvae, 1 pg/larvae-100 μg/larvae, 1 pg/larvae-10 μg/larvae, 1 pg/larvae-1 μg/larvae, 1 pg/larvae-0.1 μg/larvae, 1 pg/larvae-0.01 μg/larvae, 1 pg/larvae-0.001 μg/larvae, 0.001-1000 μg/larvae, 0.001-500 μg/larvae, 0.001-100 μg/larvae, 0.001-50 μg/larvae, 0.001-10 μg/larvae, 0.001-1 μg/larvae, 0.001-0.1 μg/larvae, 0.001-0.01 μg/larvae, 0.01-1000 μg/larvae, 0.01-500 μg/larvae, 0.01-100 μg/larvae, 0.01-50 μg/larvae, 0.01-10 μg/larvae, 0.01-1 μg/larvae, 0.01-0.1 μg/larvae, 0.1-1000 μg/larvae, 0.1-500 μg/larvae, 0.1-100 μg/larvae, 0.1-50 μg/larvae, 0.1-10 μg/larvae, 0.1-1 μg/larvae, 1-1000 μg/larvae, 1-500 μg/larvae, 1-100 μg/larvae, 1-50 μg/larvae, 1-10 μg/larvae, 10-1000 μg/larvae, 10-500 μg/larvae, 10-100 μg/larvae, 10-50 μg/larvae, 50-1000 μg/larvae, 50-500 μg/larvae, 50-400 μg/larvae, 50-300 μg/larvae, 100-500 μg/larvae, 100-300 μg/larvae, 200-500 μg/larvae, 200-300 μg/larvae, or 300-500 μg/larvae.

[0254] According to some embodiments, the nucleic acid agent is provided in amounts effective to reduce or suppress expression of at least one mosquito gene product. As used herein “a suppressive amount” or “an effective amount” refers to an amount of dsRNA which is sufficient to downregulate (reduce expression of) the target gene by at least 20%, 30%, 40%, 50%, or more, say 60%, 70%, 80%, 90% or more even 100%.

[0255] Testing the efficacy of gene silencing can be effected using any method known in the art. For example, using quantitative RT-PCR measuring gene knockdown. Thus, for example, ten to twenty larvae or mosquitoes from each treatment group can be collected and pooled together. RNA can be extracted therefrom and cDNA syntheses can be performed. The cDNA can then be used to assess the extent of RNAi by measuring levels of gene expression using qRT-PCR.

[0256] Compositions of the present invention can be packed in a kit including the cells which comprise the nucleic acid larvicides, instructions for administration of the composition to mosquito larvae.

[0257] Compositions of some embodiments of the invention may, if desired, be presented in a pack or dispenser device, which may contain one or more dosage forms containing the active ingredient. The pack may, for example, comprise metal or plastic foil, such as a blister pack. The pack or dispenser device may be accompanied by instructions for administration to the mosquito larvae.

[0258] As used herein the term “about” refers to ±10%.

[0259] The terms “comprises”, “comprising”, “includes”, “including”, “having” and their conjugates mean “including but not limited to”.

[0260] The term “consisting of” means “including and limited to”.

[0261] The term “consisting essentially of” means that the composition, method or structure may include additional ingredients, steps and/or parts, but only if the additional ingredients, steps and/or parts do not materially alter the basic and novel characteristics of the claimed composition, method or structure.

[0262] As used herein, the singular form “a”, “an” and “the” include plural references unless the context clearly dictates otherwise. For example, the term “a compound” or “at least one compound” may include a plurality of compounds, including mixtures thereof.

[0263] Throughout this application, various embodiments of this invention may be presented in a range format. It should be understood that the description in range format is merely for convenience and brevity and should not be construed as an inflexible limitation on the scope of the invention. Accordingly, the description of a range should be considered to have specifically disclosed all the possible subranges as well as individual numerical values within that range. For example, description of a range such as from 1 to 6 should be considered to have specifically disclosed subranges such as from 1 to 3, from 1 to 4, from 1 to 5, from 2 to 4, from 2 to 6, from 3 to 6 etc., as well as individual numbers within that range, for example, 1, 2, 3, 4, 5, and 6. This applies regardless of the breadth of the range.

[0264] Whenever a numerical range is indicated herein, it is meant to include any cited numeral (fractional or integral) within the indicated range. The phrases “ranging/ranges between” a first indicate number and a second indicate number and “ranging/ranges from” a first indicate number “to” a second indicate number are used herein interchangeably and are meant to include the first and second indicated numbers and all the fractional and integral numerals therebetween.

[0265] As used herein the term “method” refers to manners, means, techniques and procedures for accomplishing a given task including, but not limited to, those manners, means, techniques and procedures either known to, or readily developed from known manners, means, techniques and procedures by practitioners of the chemical, pharmacological, biological, biochemical and medical arts.

[0266] As used herein, the term “treating” includes abrogating, substantially inhibiting, slowing or reversing the progression of a condition, substantially ameliorating clinical or aesthetical symptoms of a condition or substantially preventing the appearance of clinical or aesthetical symptoms of a condition.

[0267] When reference is made to particular sequence listings, such reference is to be understood to also encompass sequences that substantially correspond to its complementary sequence as including minor sequence variations, resulting from, e.g., sequencing errors, cloning errors, or other alterations resulting in base substitution, base deletion or base addition, provided that the frequency of such variations is less than 1 in 50 nucleotides, alternatively, less than 1 in 100 nucleotides, alternatively, less than 1 in 200 nucleotides, alternatively, less than 1 in 500 nucleotides, alternatively, less than 1 in 1000 nucleotides, alternatively, less than 1 in 5,000 nucleotides, alternatively, less than 1 in 10,000 nucleotides.

[0268] It is appreciated that certain features of the invention, which are, for clarity, described in the context of separate embodiments, may also be provided in combination in a single embodiment. Conversely, various features of the invention, which are, for brevity, described in the context of a single embodiment, may also be provided separately or in any suitable subcombination or as suitable in any other described embodiment of the invention. Certain features described in the context of various embodiments are not to be considered essential features of those embodiments, unless the embodiment is inoperative without those elements.

[0269] Various embodiments and aspects of the present invention as delineated hereinabove and as claimed in the claims section below find experimental support in the following examples.

### EXAMPLES

[0270] Reference is now made to the following examples, which together with the above descriptions, illustrate the invention in a non limiting fashion.

[0271] Generally, the nomenclature used herein and the laboratory procedures utilized in the present invention include molecular, biochemical, microbiological and recombinant DNA techniques. Such techniques are thoroughly explained in the literature. See, for example, “Molecular Cloning: A laboratory Manual” Sambrook et al., (1989); “Current Protocols in Molecular Biology” Volumes I-III Ausubel, R. M., ed. (1994); Ausubel et al., “Current Protocols in Molecular Biology”, John Wiley and Sons, Baltimore, Md. (1989); Perbal, “A Practical Guide to Molecular Cloning”, John Wiley & Sons, New York (1988); Watson et al., “Recombinant DNA”, Scientific American Books, New York; Birren et al. (eds) “Genome Analysis: A Laboratory Manual Series”, Vols. 1-4, Cold Spring Harbor Laboratory Press, New York (1998); methodologies as set forth in U.S. Pat. Nos. 4,666,828; 4,683,202; 4,801,531; 5,192,659 and 5,272,057; “Cell Biology: A Laboratory Handbook”, Volumes I-III Cellis, J. E., ed. (1994); “Current Protocols in Immunology” Volumes I-III Coligan J. E., ed. (1994); Stites et al. (eds), “Basic and Clinical Immunology” (8th Edition), Appleton & Lange, Norwalk, Conn. (1994); Mishell and Shiigi (eds), “Selected Methods in Cellular Immunology”, W. H. Freeman and Co., New York (1980); available immunoassays are extensively described in the patent and scientific literature, see, for example, U.S. Pat. Nos. 3,791,932; 3,839,153; 3,850,752; 3,850,578; 3,853,987; 3,867,517; 3,879,262; 3,901,654; 3,935,074; 3,984,533; 3,996,345; 4,034,074; 4,098,876; 4,879,219; 5,011,771 and 5,281,521; “Oligonucleotide Synthesis” Gait, M. J., ed. (1984); “Nucleic Acid Hybridization” Hames, B. D., and Higgins S. J., eds. (1985); “Transcription and Translation” Hames, B. D., and Higgins S. J., Eds. (1984); “Animal Cell Culture” Freshney, R. I., ed. (1986); “Immobilized Cells and Enzymes” IRL Press, (1986); “A Practical Guide to Molecular Cloning” Perbal, B., (1984) and “Methods in Enzymology” Vol. 1-317, Academic Press; “PCR Protocols: A Guide To Methods And Applications”, Academic Press, San Diego, Calif. (1990); Marshak et al., “Strategies for Protein Purification and Characterization—A Laboratory Course Manual” CSHL Press (1996); all of which are incorporated by reference as if fully set forth herein. Other general references are provided throughout this document. The procedures therein are believed to be well known in the art and are provided for the convenience of the reader. All the information contained therein is incorporated herein by reference.

### Example 1

### Materials and Experimental Procedures

[0272] Mosquito Maintenance

[0273] Mosquitoes were taken from an Ae. aegypti colony of the Rockefeller strain or from a mosquito field population of Ae. aegypti isolated from urban area of Rio de Janeiro, Brazil. Both lineages were reared continuously in the laboratory at 28° C. and 70-80% relative humidity. Adult mosquitoes were maintained in a 10% sucrose solution, and the adult females were fed with sheep blood for egg laying. The larvae were reared on dog/cat food unless stated otherwise.

[0274] Introducing dsRNA into a Mosquito Larvae

[0275] Three different approaches were evaluated for treatment with dsRNA:

[0276] A) Soaking with “Naked” dsRNA

[0277] Third instar larvae were treated (in groups of 100 larvae) in a final volume of 3 mL of dsRNA solution in autoclaved water (0.5 μg/μL for sodium channel (AAEL008297), PgP (AAEL010379) and Ago3 (AAEL007823) dsRNA, or 0.1 μg/μL for CYP9J26 (JF924909.1). The control group was kept in 3 ml sterile water only. Larvae were soaked in the dsRNA solutions for 24 hr at 27° C., and then transferred into new containers (300 larvae/1500 mL of chlorine-free tap water), which were also maintained at 27° C., and were provided 6 mg/100 mL lab dog/cat diet (Purina Mills) suspended in water as a source of food on a daily basis. As pupae developed, they were transferred to individual vials to await eclosion and sex sorting. For bioassays purpose only females up to five days old were used. See Flowchart 1, FIG. 1 for detailed explanation of this experiment.

[0278] B) Soaking with “Naked” dsRNA Plus Additional Larvae Feeding with Food-Containing dsRNA

[0279] After soaking in the dsRNA solutions for 24 hr at 27° C., the larvae were transferred into new containers (300 larvae/1500 mL of chlorine-free tap water), and were provided agarose cubes containing 300 μg of dsRNA once a day for a total of four days. The larvae were reared until adult stage. For bioassays purpose only females up to five days old are used. See Flowchart 2, FIG. 2 for detailed explanation of this experiment.

[0280] C) Larvae Feeding with Food-Containing dsRNA Only

[0281] Third instar larvae were fed (in groups of 300 larvae) in a final volume of 1500 mL of chlorine-free tap water with agarose cubes containing 300 μg of dsRNA once a day for a total of four days. The larvae were reared until adult stage. For bioassays purpose only females up to five days old are used. See Flowchart 3, FIG. 3 for detailed explanation of this experiment.

[0282] Bioassay with Pyrethroid

[0283] CDC Bottle Bioassays—

[0284] Bottles were prepared following the Brogdon and McAllister (1998) protocol [Brogdon and McAllister (1998) Emerg Infect Dis 4:605-613]. Fifteen-twenty non-blood-fed females from each site were introduced in 250 mL glass bottles impregnated with different concentrations of deltamethrin (Sigma-Aldrich) in 1 ml acetone. Each test consisted of four impregnated bottles and one control bottle. The control bottle contained acetone with no insecticide. At least three tests were conducted for each insecticide and population. Immediately prior to use, all insecticide solutions were prepared fresh from stock solutions. At 15, 30 and 45 min intervals, the number of live and dead mosquitoes in each bottle was recorded. The mortality criteria included mosquitoes with difficulties flying or standing on the bottle's surface. Mosquitoes that survived the appropriate dose for insecticide were considered to be resistant [Brogdon and McAllister (1998), supra].

[0285] Preparation of Mosquito Larval Food Containing dsRNA

[0286] Cubes of dsRNA-containing mosquito food were prepared as follows: First, 300 μg of dsRNA were mixed with 30 μg of Polyethylenimine 25 kD linear (Polysciences) in 200 μL of sterile water. Then, a suspension of ground mosquito larval food (6 grams/100 mL) was prepared with 2% agarose (Fisher Scientific). The food/agarose mixture was heated to 55° C. and 200 μL of the mixture was then transferred to the tubes containing 200 μL of dsRNA+PEI or water only (control). The mixture was then allowed to solidify into a gel. The solidified gel containing both the food and dsRNA was cut into small pieces (approximately 1 mm thick) using a razor blade, which were then used to feed mosquito larvae in water.

[0287] RNA Isolation and dsRNA Production

[0288] Total RNA was extracted from groups of five Ae. aegypti fourth instar larvae and early adult male/female Ae. aegypti, using TRIzol (Invitrogen, Carlsbad, Calif., USA) according to the manufacturer's instructions. RNA was treated with amplification grade DNase I (Invitrogen) and 1 μg was used to synthesize cDNA using a First Strand cDNA Synthesis kit (Invitrogen). The cDNA served as template DNA for PCR amplification of gene fragments using the primers listed in Table 6, below. PCR products were purified using a QIAquick PCR purification kit (Qiagen). The MEGAscript RNAi kit (Ambion) was then used for in vitro transcription and purification of dsRNAs. See Flowchart 4, FIG. 4 for detailed explanation production off dsRNA.

TABLE 6
qPCR primers and dsRNA
sequences for adulticide targets

| | Accession | | |
|---|---|---|---|
| Target gene | number | dsRNA sequence | qPCR primers (5′-3′) |
| P-glycoprotein | XM_001654442.1 | SEQ ID NO: 1822 | F: GCGCGCTCGTTCAGTATTTA |
| (AAEL010379) | | | (SEQ ID NO: 1814) |
| | | | R: ACACCCGTTACGGCACAATA |
| | | | (SEQ ID NO: 1815) |
| Argonaute-3 | XM_001652895.1 | SEQ ID NO: 1823 | F: TCGGCATTCGTAGCTTCGTT |
| (AAEL007823) | | | (SEQ ID NO: 1816) |
| | | | R: GCAGCTGACAGTTTGCCTTC |
| | | | (SEQ ID NO: 1817) |
| Cytochrome p450 | JF924909.1 | SEQ ID NO: 1824 | F: CCGTTTGGTATCGGCCCAAG |
| (CYP9J26) | XM_001649047.2 | | (SEQ ID NO: 1818) |
| JF924909.1 | | | R: GTCTTTGCGCCTCGGACG |
| | | | (SEQ ID NO: 1819) |
| Sodium channel | KC107440.1 | SEQ ID NO: 1825 | F: CTGGAGTCGGTGAGCGAAA |
| (AAEL008297) | XM_001653136.1 | | (SEQ ID NO: 1820) |
| | | | R: TACGTATCGTAAACGCGCTC |
| | | | (SEQ ID NO: 1821) |

[0289] qPCR Analysis

[0290] Approximately 1000 ng first-strand cDNA obtained as described previously was used as template. The qPCR reactions were performed using SYBR® Green PCR Master Mix (Applied Biosystems) following the manufacturer's instructions. Briefly, approximately 50 cDNA and gene-specific primers (600 nM) were used for each reaction mixture. qPCR conditions used were 10 min at 95° C. followed by 35 cycles of 15 s at 94° C., 15 s at 54° C. and 60 s at 72° C. The ribosomal protein S7 and tubulin were used as the reference gene to normalize expression levels amongst the samples. Raw quantification cycle (Cq) values normalized against those of the tubulin and S7 standards were then used to calculate the relative expression levels in samples using the 2^{-ΔΔct} method [Livak & Schmittgen, (2001) Methods. 25(4):402-8.). Results (mean±SD) are representative of at least two independent experiments performed in triplicate.

### Results

### Characterization of Insecticide Resistance Using Two Different Strains of Aedes aegypti Mosquitoes

[0291] Vector control strategies employed for Aedes control are mainly anti-larval measures, source reduction and use of adulticides (pyrethroids). Pyrethroids are a major class of insecticides, which show low mammalian toxicity and fast knockdown activity. Unfortunately, the intensive use of pyrethroids, including their indirect use in agriculture, has led to reports of reduced efficacy. One of the mechanisms of resistance in insects against pyrethroids is knockdown resistance (kdr) which is conferred by mutation(s) in the target site, the voltage gated sodium channel (VGSC). Several kdr mutations have been reported in many insects of agricultural and medical importance including Ae. aegypti. In Ae. Aegypti, eleven non-synonymous mutations at nine different loci have been reported [Med Vet Ent 17: 87-94.; Insect Mol Biol 16: 785-798.; Insect Biochem Mol Biol 39: 272-278.], amongst which mutations at three loci, i.e., Iso1011 (IRM/V) and Va11016 (VRG/I) in domain II and F1534 (FRC) in domain III are most commonly reported as contributing to pyrethroid resistance.

[0292] Using a population of mosquitoes that shows increased pyrethroid resistance, the present inventors target (during larval stage) several genes associated with resistance to pyrethroid in order to break resistance to insecticide at the adult stage.

[0293] A diagnostic dosage (DD) was established for the insecticide using the Rockefeller reference susceptible Ae. aegypti strain and a resistance threshold (RT), time in which 98-100% mortality was observed in the Rockefeller strain, was then calculated. Using the DD (2 μg/mL of deltamethrin) (FIGS. 5A-C) is was possible to demonstrate that this dose killed only 63.95% of the Rio de Janeiro strain whereas 100% of the mosquitoes from the Rockefeller strain were dead. Therefore, it was concluded that 36.05% of the mosquitoes in this population (RJ) are resistant to deltamethrin.

[0294] To further confirm the resistance status of the Rio de Janeiro strain, the kdr mutations reported as contributing to pyrethroid resistance were assessed. In FIGS. 6A-B, the present inventors show that V1016G and F1534C were both detected in the RJ strain. Indeed, the V1016G and F1534C mutation were detected in 49% and 60% of the mosquitoes from Rio de Janeiro strain, respectively.

### Silencing of Sodium Channel During Larval Development Increases the Susceptibility of Adult Mosquitoes to Pyrethroid

[0295] Using the first approach (soaking with “naked” dsRNA), mosquito larvae (RJ strain) were treated with three different dsRNA: Ago3, P-glycoprotein and Sodium channel. Treatment with dsRNA against sodium channel increased substantially the susceptibility of mosquitoes to the insecticide (FIG. 7A). Interestingly, female mosquitoes showed a decreased expression in the mRNA level for sodium channel before deltamethrin treatment (FIG. 7B). When compared to water-treated mosquitoes only, dead female mosquitoes previously treated with dsRNA showed a striking decrease in mRNA expression level for sodium channel (FIG. 7C).

[0296] In order to test the second approach (soaking with “naked” dsRNA plus additional larvae feeding with food-containing dsRNA), mosquito larvae (L3) were first soaked with dsRNA (sodium channel, 0.5 μg/μL) for 24 hours. Then, larvae were treated 4 times with food-containing dsRNA and reared until adult stage. Although there was no obvious advantage in using this approach when compared to soaking with naked dsRNA alone, treatment with dsRNA against sodium channel increased the susceptibility of mosquitoes to deltamethrin (FIG. 8).

[0297] This approach was also tested using dsRNA to target Cytochrome p450 (CYP9J26). As can be seen in the FIG. 9, dsRNA-treated mosquitoes were more sensitive to deltamethrin during the first 15 minutes of contact with deltamethrin.

[0298] It is important to note that that 24 and 48 hours after the end of dsRNA treatment, decreased mRNA levels were detected in mosquito adults that were treated with PgP, Ago3 or sodium channel dsRNA as larvae (FIGS. 10A-C). However, PgP and Ago3 mRNA expression reached normal levels when mosquitoes became adults (FIG. 11A-B, respectively).

### Example 2

### Materials and Experimental Procedures

### Mosquito Maintenance

[0299] Mosquitoes were taken from an Ae. aegypti colony of the Rockefeller strain, which were reared continuously in the laboratory at 28° C. and 70-80% relative humidity. Adult mosquitoes were maintained in a 10% sucrose solution, and the adult females were fed with sheep blood for egg laying. The larvae were reared on dog/cat food unless stated otherwise.

[0300] Introducing dsRNA into a Mosquito Larvae

[0301] Soaking with “Naked” dsRNA Plus Additional Larvae Feeding with Food-Containing dsRNA

[0302] Third instar larvae were treated (in groups of 100 larvae) in a final volume of 3 mL of dsRNA solution in autoclaved water (dsRNA concentrations are shown in Table 7, below). The control group was kept in 3 ml sterile water only. After soaking in the dsRNA solutions for 24 hr at 27° C., the larvae were transferred into new containers (300 larvae/1500 mL of chlorine-free tap water) and provided 6 mg/100 mL lab dog/cat diet (Purina Mills) suspended in water and agarose cubes containing 300 μg of dsRNA once a day for a total of two days. As pupae developed, they were transferred to individual vials to await eclosion and sex sorting. For bioassays purpose only females up to five days old were used.

[0303] The pupae mortality was calculated based on the initial number of treated larvae (300) (Mortality of pupae=Total number of pupae/300). Once the adults emerged they start to copulate.

TABLE 7
dsRNA concentrations

| dsRNA | Concentration (μg/μL each 100 larvae) |
|---|---|
| Ago3 (AAEL007823) | 0.5 |
| Aub (AAEL007698) | 0.5 |
| AF510492.1 | 0.1 |
| AY531222.2 | 0.02 |
| AAEL017015 | 0.06 |
| AAEL005212 | 0.06 |
| AAEL005922 | 0.05 |
| AAEL000903 | 0.06 |

[0304] Preparation of Mosquito Larval Food Containing dsRNA

[0305] Cubes of dsRNA-containing mosquito food were prepared as follows: First, 300 μg of dsRNA were mixed with 30 μg of Polyethylenimine 25 kD linear (Polysciences) in 200 μL of sterile water. Then, a suspension of ground mosquito larval food (6 grams/100 mL) was prepared with 2% agarose (Fisher Scientific). The food/agarose mixture was heated to 55° C. and 200 μL of the mixture was then transferred to the tubes containing 200 μL of dsRNA+PEI or water only (control). The mixture was then allowed to solidify into a gel. The solidified gel containing both the food and dsRNA was cut into small pieces (approximately 1 mm thick) using a razor blade, which were then used to feed mosquito larvae in water.

[0306] Blood Feeding

[0307] Five to seven days following adult emergence, dsRNA-treated or untreated control mosquitoes received defibrinated sheep blood through a membrane feeder. Thirty minutes after receiving a blood meal, three groups of 15 engorged females were separated inside a new cartoon cage to perform the oviposition assay.

[0308] Oviposition Assay and Hatching Rate

[0309] Five days after the blood meal, an ovipositon cup was place inside each cage containing 15 females to allow the females to lay their eggs. The oviposition cup was changed every 24 hours for 3 consecutive days. The number of eggs laid was counted and used to check the viability and egg hatching rate.

[0310] To check the viability of the eggs the oviposition paper were kept to dry and embrionate for a period minimum of 5 days. After this time the ovipositions papers containing the eggs were placed inside a tray with aged water and food and wait for the eggs to hatch for a period of 24 hours. The hatching rate (HR) for each treatment were calculated as follow: HR=total number of hatched larvae/total number of eggs oviposited). FIG. 12 describes the experiment.

[0311] RNA Isolation and dsRNA Production

[0312] Total RNA was extracted from groups of five Ae. aegypti fourth instar larvae and early adult male/female Ae. aegypti, using TRIzol (Invitrogen, Carlsbad, Calif., USA) according to the manufacturer's instructions. RNA was treated with amplification grade DNase I (Invitrogen) and 1 μg was used to synthesize cDNA using a First Strand cDNA Synthesis kit (Invitrogen). The cDNA served as template DNA for PCR amplification of gene fragments using the primers listed in Table 8, below. PCR products were purified using a QIAquick PCR purification kit (Qiagen). The MEGAscript RNAi kit (Ambion) was then used for in vitro transcription and purification of dsRNAs sequences (Table 9, below).

TABLE 8
qPCR primers for fertility targets

| | Accession | qPCR primers |
|---|---|---|
| Target gene | number | (5′-3′) |
| Argonaute-3 | XM_001652895.1 | F: TCGGCATTCGTAGC |
| AAEL007823 | | TTCGTT |
| | | (SEQ ID NO: 1833) |
| | | R: GCAGCTGACAGTTT |
| | | GCCTTC |
| | | (SEQ ID NO: 1834) |
| AuB | | F: CAGAATCCCAGACC |
| AAEL007698 | | CGGAAC |
| | | (SEQ ID NO: 1835) |
| | | R: TTGGCGAAACCGTA |
| | | CCTTGA |
| | | (SEQ ID NO: 1836) |
| AeSCP-2 | AF510492 | F: TAAGCGTCTGGAGA |
| (AF510492.1) | | GCATCG |
| | | (SEQ ID NO: 1837) |
| | | R: CTCGACCAGCTGAC |
| | | GTTCTT |
| | | (SEQ ID NO: 1838) |
| AeAct-4 | AY531222 | F: GTTTCGCTGGTGAT |
| (AY531222.2) | | GATGCC |
| | | (SEQ ID NO: 1839) |
| | | R: GGTGAGGATACCTC |
| | | GCTTCG |
| | | (SEQ ID NO: 1840) |
| AAEL002000 | XM_001660689.1 | F: CGTCAAGGTGGAAG |
| | | ATTTCGG |
| | | (SEQ ID NO: 1841) |
| | | R: CGGCATCCGGATTA |
| | | TTGTCG |
| | | (SEQ ID NO: 1842) |
| AAEL005747 | XM_001651331.1 | F: TGCTGTCCACCAGT |
| | | ATGAGC |
| | | (SEQ ID NO: 1843) |
| | | R: TCCTCCGATGGCAT |
| | | TGCTTT |
| | | (SEQ ID NO: 1844) |
| AAEL005656 | XM_001651169.1 | F: GCGCATGAAGAAGA |
| | | AGCTGG |
| | | (SEQ ID NO: 1845) |
| | | R: TTTGTGCCTCTGCA |
| | | TTTGCC |
| | | (SEQ ID NO: 1846) |
| AAEL017015 | XM_011494635.1 | F: GCCTACCAAGCTCC |
| | | GCAAAT |
| | | (SEQ ID NO: 1847) |
| | | R: GACGATGTCCTGCT |
| | | GTTCGT |
| | | (SEQ ID NO: 1848) |
| AAEL005212 | XM_001650421.1 | F: TGTGGACGCTAAGG |
| | | AACAGCC |
| | | (SEQ ID NO: 1849) |
| | | R: CATCGAGCCCCAAG |
| | | CATCC |
| | | (SEQ ID NO: 1850) |
| AAEL005922 | XM_001651632.1 | F: GAAGATCAATGCAC |
| | | CACCGC |
| | | (SEQ ID NO: 1851) |
| | | R: GGACGCGATCTACG |
| | | AGGTTT |
| | | (SEQ ID NO: 1852) |
| AAEL000903 | XM_001651555.1 | F: TACCGGACACCGTC |
| | | AAGAAG |
| | | (SEQ ID NO: 1853) |
| | | R: CTAAATATCGATAC |
| | | CCTCCTGCTG |
| | | (SEQ ID NO: 1854) |
| AAEL005049 | XM_001650243.1 | F: ACTCGGAAGCAGTG |
| | | GTAACG |
| | | (SEQ ID NO: 1855) |
| | | R: ATCTGCATTCCTTC |
| | | CGGCTT |
| | | (SEQ ID NO: 1856) |

TABLE 9
dsRNA sequences for fertility targets

| Target gene | Accession number | dsRNA sequence |
|---|---|---|
| Argonaute-3 | XM_001652895.1 | SEQ ID NO: 1857 |
| AAEL007823 | | |
| AuB | | SEQ ID NO: 1858 |
| AAEL007698 | | |
| AeSCP-2 | AF510492 | SEQ ID NO: 1859 |
| (AF510492.1) | | |
| AeAct-4 | AY531222 | SEQ ID NO: 1860 |
| (AY531222.2) | | |
| AAEL002000 | XM_001660689.1 | SEQ ID NO: 1861 |
| AAEL005747 | XM_001651331.1 | SEQ ID NO: 1862 |
| AAEL005656 | XM_001651169.1 | SEQ ID NO: 1863 |
| AAEL017015 | XM_011494635.1 | SEQ ID NO: 1864 |
| AAEL005212 | XM_001650421.1 | SEQ ID NO: 1865 |
| AAEL005922 | XM_001651632.1 | SEQ ID NO: 1866 |
| AAEL000903 | XM_001651555.1 | SEQ ID NO: 1867 |
| AAEL005049 | XM_001650243.1 | SEQ ID NO: 1868 |

[0313] qPCR Analysis

[0314] Approximately 1000 ng first-strand cDNA obtained as described previously was used as template. The qPCR reactions were performed using SYBR® Green PCR Master Mix (Applied Biosystems) following the manufacturer's instructions. Briefly, approximately 50 cDNA and gene-specific primers (600 nM) were used for each reaction mixture. qPCR conditions used were 10 min at 95° C. followed by 35 cycles of 15 s at 94° C., 15 s at 54° C. and 60 s at 72° C. The ribosomal protein S7 and tubulin were used as the reference gene to normalize expression levels amongst the samples. Raw quantification cycle (Cq) values normalized against those of the tubulin and S7 standards were then used to calculate the relative expression levels in samples using the 2^{-ΔΔct} method [Livak & Schmittgen, (2001) Methods. 25(4):402-8]. Results (mean±SD) are representative of at least two independent experiments performed in triplicate.

### Results

[0315] Gene Silencing with dsRNA During Larval Development Decreases the Number of Hatchings

[0316] The sterile insect technique (SIT) is a non-insecticidal control method that relies on the release of sterile male mosquitoes that search for and mate with wild females, preventing offspring. This approach has been used successfully to control various insect pest species. Recently, a dsRNA-based method to produce sterile male mosquitoes was described [Whyard et al., Parasit Vectors. (2015) 8: 96].

[0317] The present inventors hypothesized that dsRNA could be used to produce effective sterile male/female Ae. aegypti mosquitoes by targeting genes expressed mainly (but not exclusively) in male testes and/or female ovary. Since sterile female insects can still damage crops and transmit disease, ideally the product will include dsRNA sequences to induce mortality in infected-mosquitoes or reduce resistance to pyrethroids.

[0318] As illustrated in FIG. 10B, the present inventors were able to induce gene silencing in mosquito larvae after treatment with dsRNA against Ago3, one of the targets to induce male/female sterility. Next, larvae were treated with dsRNA against Aub and Ago3 and were reared until the adult stage. Female mosquitoes were allowed to blood fed on sheep blood and engorged females were separated in 3 cages containing 15 females each and the oviposition rate was calculated. As illustrated in FIGS. 13A-B, there was no difference in the oviposition rate among dsRNA-treated groups and water control. However, the number of hatched eggs decrease to 50% in the dsRNA treated groups. Similar results were observed for treatment with dsRNA targeting AY531222.2, AAEL005922, AAEL000903, AAEL017015 or AAEL005212 (see FIGS. 14A-B, 15A-B and 16A-B). When larvae were treated with dsRNA targeting the combination of Ago+Aub a much stronger reduction in the hatchability was observed (FIG. 16B).

[0319] Although the invention has been described in conjunction with specific embodiments thereof, it is evident that many alternatives, modifications and variations will be apparent to those skilled in the art. Accordingly, it is intended to embrace all such alternatives, modifications and variations that fall within the spirit and broad scope of the appended claims.

[0320] All publications, patents and patent applications mentioned in this specification are herein incorporated in their entirety by reference into the specification, to the same extent as if each individual publication, patent or patent application was specifically and individually indicated to be incorporated herein by reference. In addition, citation or identification of any reference in this application shall not be construed as an admission that such reference is available as prior art to the present invention. To the extent that section headings are used, they should not be construed as necessarily limiting.

1. A composition-of-matter for mosquito control, comprising a cell comprising an exogenous naked dsRNA which specifically down-regulates expression of a gene being endogenous to a mosquito or which specifically down-regulates expression of a gene being endogenous to a mosquito pathogen.

2. A composition-of-matter for mosquito control, comprising a cell comprising a nucleic acid larvicide.

3. A composition-of-matter for mosquito control, comprising a cell comprising a nucleic acid larvicide affecting fertility or fecundity of a mosquito.

4. A composition-of-matter for mosquito control comprising a nucleic acid larvicide that targets a piRNA pathway gene and/or a sterility gene.

5. (canceled)

6. The composition-of-matter of claim 4, wherein said nucleic acid larvicide comprises at least one dsRNA.

7. (canceled)

8. A method of producing a larvicidal composition, the method comprising introducing into a cell a nucleic acid larvicide, thereby producing the larvicide.

9. A method of producing a larvicidal composition, the method comprising introducing into a cell a nucleic acid larvicide affecting fertility or fecundity of a female mosquito, thereby producing the larvicide.

10-12. (canceled)

13. The composition-of-matter of claim 2, wherein said nucleic acid larvicide down-regulates a target gene selected from the group consisting of:
(i) affecting larval survival;
(ii) interfering with metamorphosis of larval stage to adulthood;
(iii) affecting susceptibility of mosquito larvae to a larvicide;
(iv) affecting susceptibility of an adult mosquito to an adulticide/insecticide; and
(v) affecting fertility or fecundity of a male or female mosquito.

14. The composition-of-matter of claim 13, wherein said target gene is selected from the group consisting of 1-427, 430-1813, 1826-1832.

15. The composition-of-matter of claim 13, wherein said target gene is selected from the group consisting of P-glycoprotein (AAEL010379), Argonaute-3 (AAEL007823), Cytochrome p450 (CYP9J26), Sodium channel (AAEL008297), Aub (AAEL007698), AeSCP-2 (AF510492.1), AeAct-4 (AY531222.2), AAEL002000, AAEL005747, AAEL005656, AAEL017015, AAEL005212, AAEL005922, AAEL000903 and AAEL005049.

16. The composition-of-matter of claim 13, wherein said target gene comprises Aub (AAEL007698) and Argonaute-3 (AAEL007823).

17. The composition-of-matter of claim 16, wherein said nucleic acid larvicide which down-regulates said target gene is a dsRNA.

18. The composition-of-matter of claim 17, wherein said dsRNA comprises SEQ ID NOs: 1858 and 1823.

19. The composition-of-matter of claim 3, wherein said cell is an algal cell.

20. The composition-of-matter of claim 3, wherein said cell is a microbial cell.

21. The composition-of-matter of claim 20, wherein said cell is a bacterial cell.

22. The composition-of-matter of claim 3, wherein the composition further comprises a food-bait.

23. The composition-of-matter of claim 3, wherein the composition is formulated in a formulation selected from the group consisting of technical powder, wettable powder, dust, pellet, briquette, tablet and granule.

24-25. (canceled)

26. The composition-of-matter of claim 3, wherein the composition is formulated as a semi-solid form.

27. The composition-of-matter of claim 26, wherein said semi-solid form comprises an agarose.

28. The composition-of-matter of claim 3, wherein the cell is lyophilized.

29. The composition-of-matter of claim 3, wherein the cell is non-transgenic.

30. (canceled)

31. The composition-of-matter of claim 3, wherein said nucleic acid larvicide comprises a dsRNA.

32. The composition-of-matter or method of claim 31, wherein said dsRNA is a naked dsRNA.

33-34. (canceled)

35. The composition-of-matter of claim 31, wherein said dsRNA is effected at a dose of 0.001-1 μg/μL for soaking or at a dose of 1 pg to 10 μg/larvae for feeding.

36. The composition-of-matter of claim 31, wherein said dsRNA is selected from the group consisting of SEQ ID NOs: 1822-1825 and 1857-1868.

37-43. (canceled)

44. The composition-of-matter of claim 1 having an inferior impact on an adult mosquito as compared to said larvae.

45. (canceled)

46. The composition-of-matter of claim 1, further comprising a larvicide and wherein said larvicide is selected from the group consisting of Temephos, Diflubenzuron, methoprene, Bacillus sphaericus, and Bacillus thuringiensis israelensis.

47. The composition-of-matter of claim 1, further comprising a larvicide and wherein said larvicide comprises an adulticide.

48. The composition-of-matter of claim 47, wherein said adulticide is selected from the group consisting of deltamethrin, malathion, naled, chlorpyrifos, permethrin, resmethrin and sumithrin.

49. A method of controlling or exterminating mosquitoes, the method comprising feeding larvae of the mosquitoes with an effective amount of the composition-of-matter of claim 3, thereby controlling or exterminating the mosquitoes.

50. The method of claim 49, wherein said mosquitoes comprise female mosquitoes capable of transmitting a disease to a mammalian organism.

51. The method of claim 49, wherein said mosquitoes are of a species selected from the group consisting of Aedes aegypti and Anopheles gambiae.

52. The composition-of-matter of claim 2, wherein said cell is an algal cell.

53. The composition-of-matter of claim 3, wherein said cell is a microbial cell.

54. The composition-of-matter of claim 2, wherein said cell is an algal cell.

55. The composition-of-matter of claim 3, wherein said cell is a microbial cell.

56. The composition-of-matter of claim 2, wherein the cell is lyophilized.

57. The composition-of-matter of claim 3, wherein the cell is non-transgenic.

58. The composition-of-matter of claim 2, wherein the cell is lyophilized.

59. The composition-of-matter of claim 3, wherein the cell is non-transgenic.

The application's sequence listing, which the Patent Office published only in electronic form, follows.

SEQUENCE LISTING (1868 sequences)

SEQ ID NO: 1 - DNA, 834 bp, Aedes aegypti
atggctacagtggtacgcagcatggccctagggccgaacatgtacattcccaatggaccaacgttgatacagcagacagcgccggttaatccttatcggaaacgcccaatcgcaccggctccaatcaactccaacgttggacatccaccaactctaagcttgaaggatcgtccaatgatctcgaagaaatattgtgccctgccttacgctgttacacctcaacagtcagcatcgatccaacgacgcaacgctcgcgaaagaaatcgcgtcaagcaggtaaacaacggatttgctaatctacggcagcatattcctagttcggtagtgacggcacttaccaacggtggccgtggtccccataaaaagctcagcaaagtggatactctgaaagttgctgtcaaatacatccgtagccttcagcggatgctcgacgaagatttggaaaacagtggcgaatctaccaagtccaccgtagatatgcaggccttatctccagtttcctactacggatcgatgtctgaaccttcgacggcgtcttctccagcaccttcgcagatttccgagtattccaactacagcagtagtcaaccggaaacgataacttccttcaaacgggagccctacgacgtgtactcggctagtcaaacgctaccaacgacgaccactgctctgccgagtatgactagcttcagcaccgttacgtactcccaaccaattcatcatgtgtacaaaacccaagttccggagtatcatcaaccggaagagctcagtccacaaaataccgacgatgaagaacttctggatgcaatttcctggtggcaacagcagcagtga

SEQ ID NO: 2 - DNA, 870 bp, Aedes aegypti
atggcagcggtgatgagaagcatggccctgggtcagaacatacataacattctgccgaataattgcatcttggtgcaacagcataagccgatcaatcatcatgggaagcgaccgattgcgcctgctcctatgatggtaaccagtctgccacagggagttggattaaagtgcaaaacaggagttagtgcagcaaagaaatatgcttactgtggattgccgtacgcgccgactcctcagcaagcagcttccgtccagcggagaaatgcccgagagcgcaaccgtgtgaagcaagtgaacaatggattcgcaaatctgcgccaacatattccaccgacagtggtgacggccttgtctaacggaggtcgtggagcaagcaagaagcttagcaaagtagacactctccgtatggccgtagagtacattcgtagtctacagaagatgctggacgagaacagcgagaacactcaaaagagtttgagtcagatgtcttcctcgagctcatactatggaaccatgtcggagtcttcgactgcttcttcgccagctccgtcgcacatttcggagaactcctactcgcaatccggaggaccgatcttcaaacacgaaccttacgatatctacgtcgatccgtctacctcgcctgctccttcatatacctcggagcatcctcagcagcagcacctccagacgttgatcccgggaatgaccagcctcagtcccagtggaaacaacaactacattcacgccatgggaactcaccaagtgtacaagtcggaaatctaccgcgagtacgaggaggagctgagtcctcaaaatccagaggacgaggagctcctcgacgccatcacctggtggcagcaacaacagtga

SEQ ID NO: 3 - DNA, 291 bp, Aedes aegypti
atgatattttctcgcaccttttttccgcaggcctcccgaagggtagacgatctgttcgaagatctgcgcgatggacacaaccttctttctctcttggaagtattatctggcgaacatcttccaagagagaagggaaaaatgcgcttccacatgctgcagaacgcacagatggcgctggatttcctgcgctacaaaaaaatcaaactggtcaacattcgggcggaggacatcgtcgacggaaatccaaagcttaccctcggtctgatatggaccatcatcctgcacttccag

SEQ ID NO: 4 - DNA, 1620 bp, Aedes aegypti
atgcttcgcactaccgcatctaggtcggtccacatgggcctaataatggtgctgctgcttggaatcctggttccggtggttcccatgtggtcagcttgtcccccaccatgtcaatgcgacgacgacacactggaggttgtgtgtggcgaaggactcctggacgtgctgccgattgtgcttaatccatcgctaaagcggctcaccatcaggaacaataaaatcaggggacttgattcgtcgatacagttctatacggagctgagatttttggatttgagctacaatcatgtgttcaacatgccaccgaaaacgtttatgtatcagagaaggctatcggagctgcacctgaatcacaacaaggttggatcgatttcgaacaagacgctcacgggcttggactcgttgacgatactgaatttgagagggaattttctggatgagttaacggagggaatattcgtggacttgaagaagttggaggagctgaacttgggtcagaatcggatagggaagattgacccgaaggctttcgacgggttggtgaacctgaaggtgctgtatctggacgataatacgctgagcgcggtgccgtcgccggcgtttggaccgcttgtggctctggcggagctgtacttggggattaattctttttctacgattgctaaggatgcatttgtgcagctggataagttgagtagattggatttgaggggagctgcactagtgaatgttacccgagagacattcagtggattggatgctctgagagtgttggatctttcggacaatcgtctaaaccgaattccaaccacggagatggccgatttgatgcggttagaagagttgtcattgggacagaacgatttcgatagtattccgatgggagcttttgctgggttggcaaacttgagaaagattgacatatcagggtctttgaaactgagcagaatcgagacgggagcgttttcggctaatgccaacctggaagaaatcgtgatagcatcgaataaggctctgacagagattcaggagggagcgttgagtgggttgccacatctgaagagactgatgctgaaagacaacgcattgacgacgctatcggatggtttgttcacgtggaatgaattgatcgatttggacctgtcagagaatccaattgcttgtgactgcaggattttgtggttgcggaacgtgttggtgaataagagcaacagtagccagaatcagaaccctgtggtttgcgcttcaccggatagactgagagagcaaactttgcaagcattatcgcctgaattgctcggctgttcacatacagacccccaacaacaagcgattatttgcgctatactggttgcagctgctgcattcattacaacattggcactggtaatctacaaatgtcgaaggcgaatccgagaggcggtgaaaggcagatggggaaacagtgccatcggtcgaaaggagcgtgaataccagaagaccttctccgaggaggactacatgggtagattgccgaatccgtgcacgatgggaggggtgcatacaacaacgttgaacaactatcaaatcaacaaccaccactcgcatggaatccggcacataccggtaacggaactatag

SEQ ID NO: 5 - DNA, 540 bp, Aedes aegypti
gttgcaatgatggatcattcggagcacgactgtgtctccattacaattctttcgcatggtgagctaggctatctgtatgcaaaggattgccagtacaagttagatatcatctggtcatatttcacggccaaccggtgtcccacgctggccggcaagccaaaggtatttttcattcaagcctgccagggcgatcagctggacgcaggcgtcaccttggcagaacgcaccgaaacggacagtgccggctcgatgagctacaaaatcccagctcatgctgatttcctgattgcctattcgaccattccgggattctactcatggcgcaatacccagaagggttcctggttcatgcagtccctctgccaggagctgacccaacatggcaagaagtacgatctactgaccctgctgactttcgttgctcaacgtgtggcgtatgacttcgagtccaacactccggatattcctatgatgcaccagcagaagcaaattccctgtgtgaccaccatgctgacgaggctgttgcgttttaccgagaag

SEQ ID NO: 6 - DNA, 1653 bp, Aedes aegypti
agccggaagggaccggccatcacgaccaacctggacgacagcaatttgcgcttccgccatgagattatgaatgagaaagttatcgaagctacggtgacggagcttccgggagtcatcgaatcgatgaaccgggatcactggcgagcactgccgtcgtccatgagctatgggaacgagttggtcgtggctcatcccggtagcaacgttgtagcggaagttacgcgaaacaaacgcctgactacggaagtgctgggaaataccatggagacgacgagcacttcccagcgagcatctgacggtcatcggcggatgaccactcatattgttcggaagattaccactttgacacaggccgaggagcaagcgcaggcagataaccggattcggcagaaccgcgatgtgaagaagaccgagatcggatacttgcgtatgggatcgcaggactcgaaacgtgccaagatttccgatatcgtcgtcggacaggaggacaatctaacggcacgggaagccctgctccggtgggcccgccgttccacagccaaataccccggcgtccgggtcaacgacttcaccggctcctggcgggatgggttggccttctcggcgctcatccaccggaatcggcccgatctcatcgactggcgagactcgagatcgcgccgaccgcgggaacggctggagcaagcattccacgtggtggagcgggagtacggcgtcacgcggttactcgacccggaggacgttgacaccaacgaaccagatgagaaatcgatgatcacctacctgagttcgctgtacgatgttttcccggagcctccacaaatccacccgctcttcgacatggaatcccaacgaagggtacaggaatatcgggaactggcccaacagctactgtactggtgccgggagaaaacgtctctcctccaggaacgagcattccccacaacgcttatcgaactcaaaaggttactatcggatctgaaccggttccgaagcgaagaagtgccaccgcgacaacgcgacaaacaacgactgtttaccatctacaaagagctagaaaagtatttcgaatccatcggcgaagtggacgtggaaaccgaactgcggcccgaatcgctggagaaggcctggcacaggctcatgtccgcactggcggatcgggatatgattctccagcaggaggtgcaacggctcgagcggctgcagaagctggccgacaaagtacaacgcgagtacaaacacaccgaaaccgtgattaccaagatcgaaacccgaatctcagaggaaagccgccgaatcgaacggctacaccccgtcgaagcgaagaacatcgtcgagggactggaaagcgacatccggcatctggagcagccgctccaggaaatgaacgacgactgccatagtctgaaggacggccggtatccacaggctggagacctatacaaaaaagtcacaaaactgcaccagcggtggtcccagctgcgaacaacattccacactagtttagtacaaaagctgtccggactgagctatccagtccaggagacgacgatcacgaagcagacgcgcgtcgtgaccgaaacgcgccaaatcggaacgaacccgtacttccgagacgtccaggaatacaccgagtggtgccaatcgaaactg

SEQ ID NO: 7 - DNA, 2166 bp, Aedes aegypti
atgcctaccgaaggagtactcgacgatcatgggatcgctacaatgtcacgtccgtcacggattgaccagttcctggccggaatgggtgcagggggcaatggcggcgttggcaatgcaccttcctctcctaccatccgaggttcgtccggaggatccacatcggccagtggtggcagccagtcggcatcctcttcccgatcgagcttcgatggccagatgggaggcttccctccacacatgatgaactctgcaagtcagcatcacgggcgggaaagttccgcgttcgttccagtgttgccttcccgatcgttacgacccggcttgtaccctggcatgttggacggaccggatggaatgccaaaggatggcgtgcctaaacggggatccagctatgagttgatggcaatgatggccgacaagcggaaagagttggctttaagagaggctgccgccgcaatgctacttccgagacctggaggtcctccagttcaatcccctggaggaatgtatccaccaccgggtgcatttcttggtggacccggcccatctcccacgtccgccggaaccttcacattcccaccggccggagtcggcctgtatccccctggcgttcctgcgggtatgcaccccggactagaccgaagactgttgcgagctcccggaagagcatcgcgtcccaagaagcaattcatttgcaagttttgcaaccgtcagttcaccaagtcctataatttgctgatccacgagcgcacgcacaccgacgaacgaccgtactcgtgcgatatctgtgggaaagccttccggcggcaggaccatctacgagaccacagatacatccactccaaggaaaagccgttcaaatgtaccgagtgtggaaagggtttctgccagtcgcgaacgctggccgtgcacaagattctgcacatggaggaatcgccgcacaaatgtccggtgtgcaatcgaagcttcaatcagcgctcgaacctgaaaacgcatctgctaacccatacggaccacaaaccctacgagtgcaactcctgtggaaaagtgttccgaagaaactgtgacctgaggcgtcatgcacttacacatacggttggcgatgttccgtcggagtcgttggacgttggagacgacgacaacaacctcagtggagacgaagatgaatcggtgctggaagtggactcgccggtcaattccccggccggtcgaaatcgatccccgtctccctcactcgatatgccagtttcagctgaactggatgacgacgactatcccgatgagcatgaagacgaaaatgatgaagatgaaacgatcagcgttgcaggtcatgaacctgatccaacaccagtagtgcagtgccatcatgagaggcccatggggtcccgaagtccatatacaatgcgtccccaatacgattatggaagcaggtcgtcaacttcctcccaatcatcccaacactctcaatcaatccagagtcccaatggtgaagatctgacaactagtagtggcccaggaccagttccacagcaacatccacatgacatgttcatcccgatgcttcacgtccgcagagacctccatcacaaagttggacttatagggcgagcatctgcaaccataaccagtggtctcatggaaccaggtggaccattctttggccatatccccttacggaaacgagctatgggcccggatggggaaccctaccccatcatgggtcgacctctcctgtcctcccatatccctcctgccatgatcaaccaacgacccatgatgaaacctccagacgacccccacaaacctccttcccacccatccgactccccacacgaacccatcccaatgatttcaccatccgtatcttcatccccgtccctcttgtcaccacatgtcaatctaccccctccaccaccgtcccaactcccaatcaatctcgtcaatctatcgaacctcccacctcccatagctcaatccccaccgaatccatccgggtgttcatcacaaccgtccagctccagtcaacctcctcctcccccgccaacatcctccaacgttgcccggcagtcacaacaatctccggctgctgctccacttcaagcccctcccgcagcagccccaccccgtaagaccggctttagcatagaggatatcatgcgccgctag

SEQ ID NO: 8 - DNA, 4311 bp, Aedes aegypti
gttctctctcactcaatgtaggtggatggcaacataattcgcgtggaaatgcacttttggtgagagcgttgtataaaagctaccgctaaggactcgtttgtagtcagttcatattggaaccgttgcgcaaaaaggatacaccttgcgggtggaaggatactcaaacggaatgcgttttggctcagttcagtagtggtatctgtatgttgtgtgcggtggtgcgttgattggctctcgtctatgtcaatcgccgttgcgttttgtcggaggtgatagtgcgtaaaatagtaccgaagttgagcagcactgatgggatactagccattctctgtgaccgtcattgcacgagttgcatgatgtgatgtgctggatttttttttgctgtatgcgctctgctattgatttttctgaactgaacagagctcgtgctgcttggagtgtgaattaaatatttatgaatggagtaacgttatctaagggaatctacgcctagaacgagaacggtgaatttttgtgcgagggaattgtgaactgtgccgtgaaaacgtgaaagtgagtgattcgtgacggtggaacaaacgggaattacaacgaacagaaggtgcagaaaggattggaccgtaatcaattcatggattggatgtatctcgcattctctgctcacagtccgatcattaatttatagctaggatctatctaggcggaataaattgcatcgcagagtagaggaggagtatcatatgttagacctttatcggaatactgcccagttgtcatcgtttacgaaaaacatttttgtttgccaataaattgttacaaaccatcatacatcattgcaaaaacaacatccagccgaaaaataaaagtgacagcaaagggaattgtcggttgtaaatttctggattcggtaaatatcccaagagtcagattcaaatccattcatgtgtgtagcaactgttctttacttatttattggtgaccgctcgaaatttattggaataattgcggcgagttgaagtgcttaaatcgcgggatataaagtatccaaaataacgtgacacgacactgtggtagactgcgaaagtggcgaaagcttaaatcaacgccagtggggtacattccagtgagtgcaaaccaacacaagaggaagaggaaaaattaacaaattggagccataattgcaaatttattgtgcataccgcttaaagcgtctcgtgtttggccggaaaatcgtgttacctcgttccgtgcggaaaattcatgttctccgttttgcggtttagaactgttcatatcctgctagcagaagggaggaaatagtatatgtgtgttgttctcctgttggattcagccgataaataacgactagctaagcgaattaaaattgttttcaccaggcagagcagaagaagtaattgtttcacttctgccaagaagtgtatgcctgctcgtaccttagtctctggcaggcgaatgatcaataaatttagtaaaatggagaatttattatcggcgctggtgattatcctaggattaataacgttatcggatacgagtgcccttggaggttcggccagtggaagcacatccactgccaacaacaatgtgaaccgggctgcgaaccaggcaaacctcgccactcgaatcgacgataaatcggatacggatccttttgatggggaaaccattgtaccggtcctttcactggaggatcaggtccggttgctaacgaagcagctgaatacgctcaccaatcagcgacgtgaggattacaaaatgctcgaaaacagcttgaaaaagtacgttcggaaaaactcagtgcagctgaccaacgttgaaatccgggaggagctggaccgtatgagggacgatattaaaatgctgcgggacagcaattcgccgaacaaggaacgcctcacggtgcagtggctgtcgcagtccatagcggaaatccgttccgaattggctgagctgcaggaatcgtctagcaacgtatcgaaggacgcccagctgcgcaaccaactgatggaagatatcaatacgctccgggcagactattccaccatgcggctggagctggagtctctgcgttcgcggcaggaaaaaaccgaggtcctggtgcgggaactacgcgaggaagccgtccagagtgcagaggacatccgccgtagcgtcaaccggcaacgtgagaagaatcagaatgcgctgctccctcaaaccattgattttgtcgagccggaagcagaccaccggatgcgccatcatcgcttcttccggcagcagctgcacgagctagaggtcaagcaaacggcgatgaagcggcagctaaacgacatcttcaaccaccggatggccgatcggttgcggagccttgaaatcgaacagcgccgactggctaatgccaatttcaatattagccgccaggtcgcaagcttggataagctgcacggatcgatgctggagctgctggaagacgtcgagggaattcagaacaagttcgaaaaaaccctaccggatatcaagcgggagatatcgaaggtcgaattcaacgcggcacagatttcgtccgagcagggattgctccgggaggaaggacacaacgtggccaagagtatccaggcgatggccgtcagtgtgagcacgctgcaggaggagcgagaaaatgttcgcaaattggaagagcagctccaggtgatgaagagtgatttggataagattaagtcggcagcgatgttgcacaaggagatggctcacaaccggctggaaaagctggagtccgaatcacgaaccgaacgcaacgtgtcatcgaaactgactgaactgcagcgtacctcccggctggtgcaacagatggaaaccgttgaaaacgagtacgaaaccatcatcaacaagctgccccgtgactgcactcagatccagcagatgaaatcccagggggagacgggtcagggtggcgagggaaatctttatctgattgccccgaccggtcagcatcacccactgatgacacagtgcttcaacgagtggaccacgattcaacgccgccaggatggttccgttgacttcaatcggtcttgggaggattatgcaaacggttttggtagccccgctggggagttctggatcggtaatcaagcgctgcaccatcttaccaacgacaactgctcgatgctacggatagtgatgcaagatatctacgataatacctggtttgcggattacgacgcgttcaggatcggctcccgggaggatggattccggctggagctcgcaggctacaacggaaatgcttcggatgcctttgagtaccaaaatcatatgcaattctcggccatcgacgtcgaccgagatatctccaacacgcactgtgcaggcaattatgagggtggttggtggttttcccactgtcaacatgccaacctcaatgggcgttacaatctgggcctgacgtggttcgatgcttctcggaacgagtggatagcggtcaagtcaagccacatgatgattgctcgaaggctccagtgtagcatcggcgggggcgttgaaggcagtggtgcggtcggaatcaatgaggagagtccgataatggccgagccgttttcttccgccgcaactgcgacgatatccaagtacgagaccaccctcctgaccacattgtcatccggtcgggccggatccgaggtctagggctctgccgaaagacacagtgtaaagtaatcgtagcacgtgctctctccccctagttccattaggattgtacatttttctatgagcggattggatggcagaggaaaatttactttgcatgtgtatgtgtttatgtgcacgcgtttgtgtgattgtgcagtgaatgtacagaagagtaaggatagcttcctgtcggtagtttattgaatggcggaaattggtttgatgttaaccgataccacaggtcaacaattaccagcaaactcggacgtaagatgcactcaattgacctatgatcccttcggtcgtatctgttgaatcctaacatgcaagtgtacctcagaatacacattcctttttttcttttgggtaacacggtgccgcagtattttggaaaattatgaattcgattgagaatatttataaatttttagaaatggtctggtatctaggggggcaacatgtttctggtttaactttccaatttcgatattggcatgtttttgttcttcaaagttacataaaaatgagccacaaataaattggtttcgaagtacggggtacaccattgaagtacagaacgtatagagtaaatcatataacgaagccaaatcaagccatcga

SEQ ID NO: 9 - DNA, 4572 bp, Aedes aegypti
atgtcttgctcactcaaaacagtagtttcggaaaccctccgtctaacgacctccataacagcaaaaaaaaatggattccaaacaagcgaaaaagccaagatcgccttgcgattggctaacaatgcaaatttcgccgagttgcaatttttaagcgcccgccgagcggccgtagcagcggcagtggccaacgcagaagcagccgccgctgccgccggtagtacagtattacccatcgtgccgccgccgccaccgccccattcttcggtgtcacccccggccacgtcctcagagcaacaggagcgatctagtagcagtggctgtaccatgacaacggcagccggagctgtcggaggaggagccagcccagggcttcccaatgccaatggtggcggaagctgcagtccacccagtggcggccagtctgctggacagacgacgctgccatcggtgccggtgccccatccgggtgacttccacccggcctacaggatacccggctacatggaacatctctactcgctgcaacacgcgtccgcctcgctgcatggcacatttcacttgggtcagcagagtgcacatgtcctcataggtctcggtctcacctcggagtacctcaacgcgcggaacgccatagccgacctgcacccggcgagttccctggccagtgccgacttccacttcagcatcgatgctgccagccggctcaactcgcctcggcccggcagcatacgggccagcgtcagtcggaagcgtgctctctccacatcgccatactcggactcgttcgacatcagctcgatgatccgctattcgcccaactcgttggcctcgctggttaatgcgtcgcgcagtagcagtgccagcggatcgtacggccacctgtcggcgagtgccctcgcaccggcactcggcgtccacggtggaatgcctccacatctgcagcacctgttgagaagtagtggattcctgcattcactgcctggacatcatcctccgactgccagcatgttctcactgccacctcatcatccgctgcacccgggacactctctaaccaaaccacagcacatcgccgatctctcgagcaagaagccggaacagcccagttctacgaaccaggtgacacgtgtcgaggcggacagcgccagcaatgcccagcagaagaagtcccgcattaaacgggaaccctccgtcaacgttccattgcataagggaagccctccacatggatcgcctatgattacctccaaccaccagctgagtcctacatcaactcaaggtatgactaacggaaccaacagtgtgtccgcgggagcgacatctacgacgcaccatcttcataacagtcaccatcatcaccacatgaatggaaccggatccacgatgggaggtggccactctgggctgaatctgagcccgatgcacaatatgatggacggaggctgtgggctcggaggttccaaggtggactcgacggaccccaaggatgagccgggagatttcattgaaaccaattgccattggcgagattgctcgttggagttcaacacccaggacgagctggtcaaacacatcaacaacgatcacattcacgcgaacaaaaaatctttcgtttgtcggtgggaggactgctcccgggacgagaaaccgttcaaggcacaatacatgctggtggtgcacatgagaaggcatactggagagaagccccacaagtgtacgtttgaaggttgttgcaaggcgtattctcgattggaaaacctgaagacgcatctgaggtcgcacacgggtgaaaagccatacacctgcgaatatccgggctgcagtaaggctttcagcaatgcttccgatcgagcaaagcaccagaatcgcacccacagcaatgagaaaccatatgtctgcaaagccccagggtgtaccaagcgctataccgatccgagttcgctcaggaagcacgtcaaaacggtccatggggcggatttctatgccaacaagaagcacaagggcaacgggcaccaccacggaaatggcggaagtggccatggcggagatggcggcgacgatggagagggatccaaccatatgtttgatggaagcccgagaagcgaggacatgcagagcggcaagacgacgagcatgagcagcccaagcatcaaatcggaatcggacgtccactcgccgggacaaccaccgatcaacagtccgatgtcgatttcggcaatgacggctggactggtcgatgactacgatggaagcagcatgcagttgggtagcctcggagcgatcgatgatcccgcctggccatacgtagatgaggatcttgaggttgccgacttgccttacgttctacgagaaatggtggatctgggtggtcctacggcagcaactgctacggctggaacccgtagtagtaatccgagaaatcgcttcaagaatcgcatcaacatcaagggatctctgatgagcaatccgctgtccaacatcccggagatgaacgctcacaaccgaaactttggtctaggtgaactgaatcgaaggattaccgatctcaagatggagccgggaacaactcccccgccgcaaccatcgccgatttcaaataaaaactgcccaacggatcttggtaacctgagacctccaacaacgggtccatcctgtaccaacacgatgatgaccaacgcgtacctcaatccgggacaactgcgacgggatagcaacaacagtacgaccagtagctcatactacagcatgcgatcggcagatatcagccgacgaagtagtcaggcttcacagcagagttccatctccacgatgcgtcccagcagttactacaattcgtccttctacgatccgatctcacccggaagctcacggcggtcaagttcaatgtctacggctacaaccggtggccaaagcttaccgccgcctccgtcctcgcatctgatctcaacgcatctgcagcggttcaacacacagggttcgatgggtcatagccatggtcatccagcagccggaagctcacggcattcgataccgaacaacatgagcggaggaagttactaccatcagcagcaaatgctcggccatatggataggagaatgtccgaaccagtcgccggaaatcagcacgcaggtcagtacggcactggagcaggaatggttggtcgacctagctccacagttcccaagagcagtacagtaacttcaggagctgcttcagctgccaccgctcctccaacaaaggttccttcacccgctaccaataagcttcacccgaatcaggaagtagttcttgacgaagttgaggaagatgaaatggtcgaaaacaaactggtcattccagacgagatgttgcagtatttgaaccaggttgccgatcaggaaagcaaagtgacagtacagcaaggaatgtctacgccaaactccgctactactccagcagatgcttgcgcatggaatccgaacgagaactcgcctccagcttaccccgggggagcaccacctcgtccacaacctccatccactgctggcttcaatcaaccgcagtcaaacctgaacaaggttctaatgagccctcagtcccaatacagcaacgacgattgcagtatgatgagcaatgtgatgtctccgcagactcctcagcaccagatgatgtctccaatgatgcccgccgaaagtgccgggcctctcaccccttccaattatggacctcaaccacaaccccagcgacctgctcctcccgtccagtgtcaaatccaaaacttcaacggccagatcttcaacaacaatttccctcagaatcaaccgccgcaactcaggcaaattgcttgctcgaatctgatcggctacttccaccgaacggaccagagcgcccaccattgctgtctggctatgatgatgcaagggtccctacacatcaatcaaccttccgggtcctcggcccccacctccaattccgctcaacagtacaaaaaccccttcagcttcagcaaccccaacactttcccaccatgccaacaatcccaaaccgctccaccccagcagccctcaaacccggcggacgtagaaatccagtgtggcgacatcagccaatcccaactgtcccctccggtcgttaccaaccctgcagttccttcaccctccacaccaccatcccaaccgcaacctgctccgaaacccatggaaagcagcctacaaacgccaccgctcccttccactccaaccggattcggtgaaacttcagcaactgtcccctcgacaccccacacgatcgccgcaaccgttcctcctccgccaacggcgacaactgccggccagtccaccatgggttcggacacctaccagcgcaccctcgaatacgttcaaaactgccagaattgggtcgaatccgctgcggacatggtcagcagcagtacccatccgacaggggcgaacgcggcgggagccacggccggaaccacgactgtgccacctcctcctccaccggtggcctcctccaatctggtgatcaacgacatgagcacctccctcagctcgtacttcgaggaggatcgctacttgcagatgatacagtga

SEQ ID NO: 10 - DNA, 3620 bp, Aedes aegypti
cgaccacccaccctcccccttctgttcgctcacagcatcgaacagcatagaatcttattccactttttcgcttattctcgtttgtgtcgtctcccggtaaggacgtgtgtacttttcccgctgtgccgtcttctgtctgaggttcgcgtgctgttcgacgtcctggtgttctgtgttcgcgtttgctaacaagtgacccacgtttttagtcggataaataggtgaagggtgcaattgtggcaacaagtgctcttacaagtgtgatcgattccagcatgaggaggatttcagtgaggcaaaagtggaattcaaaaaagtgcactacactagaatcaaactgctgacggatcaatcgtgacctctgcgcctaattgagatcgaagttattaaattgaacctaattgaccaatcaggcagtgccaaacagagagacgcagtgtcggttgtctctgagataaatttgtgatacagatagcgttttttgcggcaaggaaaaacggtgaagggttaagtgagcagaatggcagaggaaagtcttcatgttccggattccaatatcgacttccatatcgtgcaactgtttgagcggttggagaatcttcgccgggaaccgggcggtgctaagctgtccagttctattcaaggccggtcaactagtatgcataatgaactacgaagtctggagttttggagatcgataacctccgagtgtttggcatcgttcttctacgtgttcatcgtgtgcggcgctgcggccggtgccggcgtcggagccagcgtatcctcggtcctgctggcaactgctctctcgtccggattcgccgtcaccgcgttgacccagtgcttccttcacgtgtcaggagcccacatcaatccggccgtaacgatttccttggccattacccgcatgatatctcctctgcgagctattctgtacatgatagcgcagtgtggaggttcgatagccggtgcagctctcctgtatggagtgacggtccccggctatcagggcaacctgcaggcagccgtgtcgcacacctctgcgctggccgcctgggaacgcttcggtgtcgagttcatcctgaccttcgtcgtggtcctatcctacctgatctcgaccaattcgtacaaaaagtactttggctcgtcggcgattgccatcggggcggcctacagtgcatgcagtttcgtctcgatgccttacctgaatcctgcgcggtcactagggccatctttcgtgctgaataaatgggacaaccactgggtctactgggtaggtccactgataggaggaatggtgtccggattgctgcatgagttcatcttcagcaccaagaagacgtccaaaaaatcgaaggatgacgtcgattccagcgtaaactccgacgaggatatcaactacgatatggacatggacaagcctcaacaatcgggaaagtaccacacttatcggccttcaagtggaaccctcgttagccaacagcgcttctgccaaagcatctacactgccgaaccaacctcgaagactgatcgcgttgaatcgatctacggtggcaccaaatctatgtactgtaagtctcctccgttgacccgtgccaacctgaaccgatcgcagtcagtctacaccaaaagcaacactgccctgaaccgtgacatgagcatccgccctggacccctagttcctgcccagagcctatacccgttgagggtcacccagccacagagttcacatctacagaaccagaacgttcagaaccaacttcaacagcgatcagaaagcatctacggcattcgaagctctatgcgtcagcaaggacctccggaacgaatgccccaacaactacagccccatccccaagcgggtgaaccacaaggcttccaaccaatctacggctcccgcaacaatcccaactgctcatcagatgccttgaaatttgaccgggaacctcgtgaaaatagccgtgacgactccatgtcctccaagttctcccgctccactcggccagagtccatgtacggccaacgccgggtacagtcagcccaatcggatgacagttcctacgggtcataccatggaccaggccctgccataactccgccaacccgcaacgccagcaatagcagcagcaactacaacggccaaatgatgctgccaaactacggaccaggtccagtggggatggcccaaatgcaatcagaacgcaaagcatcgacttcttcgcagcagcagcagcaacaacaacaacagcaacagaccatgggcaaccgaacgccatctagtatacagaacaccaacctcccaccgccaccacctcagctgcaagcccatccagggggctacccaatggcccacgccgtgcggcagaactgaactaccccggagaaccctagtgccagaatttagaaatatgtaaaaatgtgtggttttcttgtttgtaagttaaggtcagatttttactacggttagatagtccgggttttgaattagacagtggtttttacgagagattttatttattgctattctttttttttatataatttcctactattaactctttatgtcttctaccaagtaacgaaacacgacctggaaaatttaaatcttggtttaacgtcaggaaacgaaatactgatatttaaagactgatgaaacccacttttgagtatagaacatttatgtatacatcttaggaaacagttgttgatactttttggacatccaatggtttcagttagcaaaagtaatataaaaaccgttcatataaagttcgattccaaaacatgccacaggaatatcagtcgccgtgtgattcacgacattcataaggaagcaatttatacctaatcgttttcggtagttccgaaagcagttcgcgaaaaattgtcactgcactcatatgtatttgatttggaacataaaaactgatttggaaatatggatcgttgccttatgatgaaccatggtttgttgaaccacaaaacatgtagaatatctctagaacaacaataaatcactttcaaatcaaatgaaaactatgaatctgcgattcaatgacacataatacaggcgacagcgacagacaggcgacagatattaccattcaagtgaagctagaagatcacctactagcgctatatattctcctttagaattctccaatctattagaaatttgtaaacgcgttagaaacttagtacaaatgtatatataaaaaatgtttctagagtaaccctagatagacatagtttatgaaaacgatcaattatttcgatcgacaccggtatcatgacaattatttgtaaatcaatactcaatccagcttcagtcgaaaaattttcctgcagacaaacaccatcataacctgtatacatttcttcaaagtgaactgcctgcaaagatttgtgtctgtttgtctttaatttatcatttcggacatttgaataaaaaaaaaacaaaactagttagctaggtaaacttatcacgttgtcatgtttaggaattagaaactgaatttagattgttgtatcgtcatcaaactgtatatatctcaatatatgtctgtaagcgtaggggaatacgaaaggatctataataaagaatcattttttgaaaatta

SEQ ID NO: 11 - DNA, 1257 bp, Aedes aegypti
atggtttggaataatttcagctgtggtcggaaaaactgtttcaacaatcgaaggaagtacttcacaatgttgttgattttcctgctctacatggtgtcccaggtgcagtcctgtggtcctggcaggggcattggaggtccccgaagaacccgaaaactgcttccgctagtgttcaaacagcatgtaccgaacgttagtgaaaattcgttaggcgcctctggaatgcaagagggtccaatctctagaaacgatagcaaattccgcaatttggagaccaattacaataaggatataatatttaaagatgaagaaggtactggagccgatcgcgtcatgacgcagagatgtaaagaaaaactgaatatcctggccgtatcggtgatgaatcaatggcctggacttcggttaatggttactgaaggctgggatgaggaccatatgcatgcacgcgaatcgctacactacgagggtcgagcggtggacattatgacatcggacaaggatcgatccaagatcggaatgttggcgagattggccgtcgaggctgggttcgattgggtttactacgaaagccgcagccacatacactgttctgttaagtcagattcatctcaatcgaaccatgcaagcggatgcttcacaggcgacagcacagtgcagacatcaaccggtgaaacgcggaagctcagtgaactgcaaatcggcgagcaagtacttagcgtggacagctcaggcaacacggtgtacagtgaagtgatcatgttcatggatcgcgatacccaccaaagtcgagaatttgtccatattgaagccgacggtggtgctcatctgacagttactccagcccacctggttatggtgtggcagaaaaatgaaggcaaatctctctatttgtttgccgatcgtatacaggaaggtgactacattttagtcaacatcaacagtacaatagagccccgaaaggtgctgaggatatctgcgaagctatcgcagggagtgtacgctccattaaccagagaaggtacaattgtggtggattcgatagccgcttcatgctatgctctcattgacagccaatcagtggctcatcttagttttctgccctacagagcagtgcaaaaaattatgaatctatttaggagtagtagtcaaagtcgaaacttaagccttcctcgacatggaggtatcaactggtacgccaaaacactgtacgcgatcaaagactttgtcataccgaacgattggctctaccactag

SEQ ID NO: 12 - DNA, 9291 bp, Aedes aegypti
atgacatgggaaggcaacgacaagcaagcggggcactcattagagcgccgagatcgattgacgccatttgtcatcggagagacccctcgttcggctgccgtcgcattatctaatgagactttgtgggctgtcatcgctgccgggcgaagtcgtgcctggttttcgcgagcaaacagagagactttcgcacctgtttttgcgatgcgggatgacttccgggctccaggagcctgtacgacgcggcataccggtgaattctgtgaatttacgaatccgtgtcacatcggtgcgggtcctcggtgtcaaaacgggggaacttgcgaggtgaccttccgcgaaggtattccgtcgttttcgtgtcggtgtccgatcggattcaccgagagtttgtgcgaaattccggttaagaacgcgtgcgattcgtctccgtgtaacaacgggggcacctgcaagctgaagagcctgaacgagtacacgtgcctctgcgccaccggatattcgggaaaacactgcgacaaacagaacctctgtgcgtcatctccatgccgcaacggaggcacttgcacactgtccccaaacgggcacgtcaagtgcatctgcccaaaggggttcaagggtttgacgtgctccgaggatatcgaggagtgcatcaagaacccttgcgtcaacggtggcaagtgcgtcaacacgcatggatcgtaccaatgcatgtgtgaacccggatacactgggaaaaactgcgagtcgcactacattccctgttcgccgtcgccttgccaaaacggaggcacttgcaagcagtcgacgaaatttaactacgaatgcaaatgtccaccaggcttccatggtaaaaactgcgaggagaacatcgacgattgtccgggcaatatgtgtcaaaacggtggcacctgcgtagacggggtcaatgcctatcactgcaagtgcccgccgagctttaccggcgattattgcgacacggacgtggacgagtgcgttcagcagccgacgatttgcaagaatggggccacctgtaccaacacccacggcggctacaactgtatctgcgtgaacgggtggaatgggcctgactgtagcaacaatatcgatgactgtgtggatgcggcttgtttcaacggggccacctgtatcgatggggtcggtagcttctactgtcggtgcacgccgggcaagactgggctgctgtgccatctggacgatgcttgtacttcaaatccttgccacgccgatgcaatctgtgataccagcccgatcaacgggtcgtttacgtgttcctgcgcgatgggctacaagggcatcgactgttccgaggatatcgacgagtgtgatcaaggttccccgtgcgagcacaacggcatctgtgtcaacacgcccggctcgttcgcctgcaattgtacccagggctttaccgggccccggtgcgagaccaacgtcaacgagtgcgagtcacatccgtgccagaacgagggcagctgcctcgacgatccgggaacgtttcgctgcgtttgcatgccaggatttaccggaacgcagtgcgagatcgacatcgacgagtgcgccaccaacccttgcctgaacggtggcatctgccgggatcttatcaactcgttcaagtgcacctgtgccatcggattcacgggtcttcgctgtcagatcaatatcgacgattgtctatcgcaaccctgccggaacggcggtatctgccatgattccatcgccgggtacacgtgcgagtgtccacccgggtatacgggaatgtcctgtgaaacgaacatcaacgactgcgcttcgaacccgtgccaccggggtatctgtatcgatggggacaattcgttcacctgccagtgcaacccggggtacaccgggtacctgtgtcagatccagatcaacgagtgcgaatcgaacccctgtcagtttggcggacactgtgaagacctggtcggaggttacatctgtcgctgtcaaccgggaacgtccggtcccaactgcgaagtcaacgtgaacgagtgccacagcaatccgtgtcgacatggcgccaagtgcatagacggcatcaacaggtacacctgtcaatgcgtaccaggctttacgggaacccactgcgaaacgaacatcaacgaatgtgcatcggacccctgcgccaacggaggtgtctgcatggatctggtcaacggattccgctgcgaatgtccgcgtggttactttgacgcccgatgcctcagcgacgtggacgaatgcgcttcaaatccttgcatcaacggaggtcgttgcgaagacggtgtcaaccaattcatctgccattgtcctcccggctacggtggtcgtcgttgcgaaacggacattgacgagtgcggatcgaatccgtgtcagcacggcggaatctgccgcgatggcctcaactcctacacctgccagtgcatgccgggatactcgggcagaaactgtgaaatcaacatcgacgactgcgttaacaatccctgccgaaacggaggttcctgcatcgatctggtcaacggatacaagtgcgtctgccgagtgccgttcaccggacgggactgtgaatcgaaaatggacccttgcctaccgaatcggtgccgcaacggagccaagtgttcacccagccaaaactacatggacttctcgtgcagctgcactctcggctacaccggacgtctatgcgacgaagacatcaacgagtgtgcgctgtcctcaccctgccgaaacggtgccacttgtcgcaacaccaacggttcctatcaatgcctctgcgccaaaggctacgaaggacgcgattgcacggtcaacaccgacgactgcgcttcattcccatgtcaaaatggaggaacctgcctggacggcatcggggactacacgtgcctctgcgtggatggattcgagggcaaacactgcgaagtcgacgtcaacgaatgcgtatccatgccttgtcagaacggagcaacgtgtacgcagtacgtcaactcatacacctgcacgtgcccgctcggcttcagcggaatgaactgccagaccaacgacgaagactgtaccgaaagttcctgcatgaatggcggtacctgcatcgatggcatcaacagctacaactgctcatgccaggccggattcactggatcgaactgtcagtacaagatcaacaaatgcgactcgcaaccctgccgaaacggtgctacttgttacgattacgacaacgactacacctgtcactgttcgtacggctacaccggaaagcagtgcatggactacgtagattggtgttcccagtctccttgcgagaacggcgccacctgcgtccaacgggagaacgtctaccagtgcatctgtgctcccggatggaccggtaagctctgcgacgtggaaatggtatcctgcaaggacgcagccatccggaaacgcgttgaacagaaactcctctgccacaacggaacctgcgaagacttcggaaactcccatcgctgccactgccaacaaggctacaccggctcctactgccaaaaggaaatcaacgaatgcgaaagccaaccttgccgtaacggaggtcactgcaaggacctcatcggatcatacaagtgcatctgcaagaagggcttccaaggtcagaactgcgaactaaacatcgacgagtgcaagccaaacccttgccgcaacggaggtatctgccacgatctgatcaacgactacaagtgctcgtgtccaccgggaacgctcggagtgctgtgcgagatcaacacggacgactgcgtgccgggtgcttgccacaacaacggcagctgtatcgacaaggttggaggattcgaatgccgctgtccacctggcttcgtaggatcccgctgtgaaggcgacatcaacgagtgtctgtcgaacccatgctcgaacccgggaaccctggactgcgtccagctggtcaatgactaccactgcaactgcaagcccggtcacatgggacgacactgcgagatcaaggtcgacttctgcgccaactcgccgtgcctgaacggagggatctgttccattcggcaaagcggacaccattgcgtatgcactgacggttactacggcaagaactgcgaattctccggccatgactgcgactcaaacccttgcatcaacggacagtgccagattgctgacgacggtggctaccgttgcgagtgtccgctgggaaccagtggtatcaactgtgagatcgacatcctggacgagtgtaattcgagtccttgcgagcgcggagctgcctgccagaacaagctgggcgactttgagtgcttctgtccgccgaagtgggccggaaagacgtgcaacaagtatgatacgacgtacaagggatggttcgagagcgacatcaagaagaagggtattatgaacatctatgcgattgatttagagtaccagagggcgcagtgcgtgaagaagggatgtcgggagaaacaaggcaatcataggtgcgatgaagagtgcaacacgtacgcctgtgactttgatggaaacgactgttcgctgggaatcaatccgtggttgaactgcactgccagcatcaactgctgggaggtgttccaggatggaatctgtaatgaggattgtaacaatgctcagtgcttgttcgatggacgcgattgcgagaagaagctccagccgtgtaatccggtgtacgacgcgtactgtcagaagcactatgccaacggattctgtgactacggatgtaacaatgccgagtgtaactgggacggtttggattgcgagaacgatcgagaaccggctcagttggcggaaggtgccatttcaatcatcctgctgatggacatggagacgttcaagaagaattccgttcaattcctgcgtgatctgggtcatcaactgagaacgacggtacggatcaagaagaacaatgccggtatggagatgatcttcccttggaagggaggcactgccctgcagggattggctgagagcgaattcggccgcaagcaccacgttgtctacacggaaactcgccagactggtatccaggtcttcctggaactggacaaccgcaaatgcattggaatgactggtgcggagtgtttcggaacggctagcgaggctgccgagttcctggccgcaacggcttcgaagcattccctctcgaaacagttcccaatttatcaagtcaagggcgtcaatcccgatgacgacggtctcccggagacgacgaataccaactatgtgctgctaggattcttcatcggattactgctgtttgccatgtgcggagtgttggtggcgaacagaaagcgagcccatggcgtcacgtggttcccagaaggattcttcactgccaacaccaacgtcagaaggccgtcccgcagacgaccagatggccaggagatgcgtaacttgaacaagaatccctcgatggtggacatggccaatgggcatatgggtaactcgcagcagtggtgcaacagtgacgatgaatcggaaatgccgcaacccaagcgcttgcgtggcatcgatcagggctactcaagtgatcatactgcgattacggactacgaagaaacggaacctcgagtttggtcgcagcagcacttcgaagctgctgatatccgtgatcatccggctatgatgacacctccgacgcaccacgatggcggccataacgatgtagatgtgcgaggaccttgcggtatgactcctttgatggtggctgcggttcgtggcggaggaatcgattcaggcgaagacattgactcagctgacgactccactgctcagatcatttcggagttggtggctcagggcgctgaactgaacgcgaccatggataagactggggagacttccctgcatttggcggctcgttacgcccgtgcggacgctgctaagaggttgttggacgctggagcggatgctaatagtcaggacaataccggacgtactccactgcacgcagccgtcgctgccgatgctatgggtgtcttccagattttgcttaggaaccgtgctacaaatctgaatgctcgtatgcatgacggtacgacaccactgatcttagcagcacgtctcgcgatcgaaggaatggttgaagatctgatcactgccgatgctgatatcaacgccgcagacaatagcggtaagactgcgctgcattgggctgcggcagttaataatgtggatgcggttaatatcctgctaacgcacggtgccaatcgggatgctcaagatgacaaggacgaaactccgctattcctggccgctagggaaggatcgtttgaagcctgcaaagccttgctggacaactttgccaatcgggacattacagatcacatggatcggttaccgcgggacgtggctagcgagcggatacatcaggatattgtccgattgttggacgagcacgtgccacgtagtccgcagatggtgacgacgatcccgaacacgatcatgtcaccgacgacgcatccacatatgatcacccacccgacgatcattgcttcgtcgaagcagaacaaacagaagaagcgggcgaagatgaacggagccgtcggaggaccacagaatcccaacagcccggacaacgacggaagcatccgtcggaaagcggtggccaagaaaccgacgccgggtgccaagaaaaacaacaaccttggtgatgtgcagatttcggatgatcagctgagctcggtggagtcgccgctggccaatatccccagcccgtacgatacggtcagtttgtactcgaacgcgatggccgtacaccagatggatacgatgaccggtgccggcaccggcaagaagccaccgagctacgaagattgcatcaagagtgcgcaatcgatgcaatcgctgcataacatcaatctggacaactacggctactcgatgggcggtgccggaaatactccgttccaggatctgctgatgaaccagcgaaacaacgtggcggcggcaaacatgctgcacgcgatgcatgcgatgggtgagagcgggctcagtccgccctattcgaaccagtcaccgccgcactcggtgcagagtaatctggcgctttcgccgcagggttatatcggttcgccatcgccggccaagacgaggcccagtttgccaacgtcgccgacgcacatccaagcgatgaggcacgctcagcaacagaagcacggtgtgcaaatgatctccaacggaagcatgcagcagcaacagcagcagcagcagcaacaacaacaacagcaaaatagtggtagtataggctgtggaccgcagcagagcagtagtaataacaatagcagtaacaacacaaatagtgcaatgttggccggcctacagatgagctttgtcaacggttcttccggactggaactggcgggcttctgcagtcccacaggccaaggatctcaagcaaccacatcgcagaacaccaccgccaccaccatctcgtcgccatcgtcgtcgaccatgtcgtcggcacacctttcgccgatgtcgtccgcatcggcgcactgccaacagtcgaccctgaacagccaacagtcgtcgttctaccaatatctgacgccaccgagccagcacagtgggggcgtaacgccgcagcatttggtccaaacactggacagctacccgacgccatcgccggaatcgcccggccactggtctagttcctcgccacactcgacttcggactggtccgaaggagtccaatcgcccgccgcggccaacatgaacgtgtacgtgacgagtgccccacccggtggccaccaggccaacaagggttccgaagcgatctacatctaacccacaagggcttagaacagcttagttaatacaagtgcctcgtcctaaacgttgacaagcaacgtctgtacagagaaaaagtgtcccctagctccacttcgccctcgtttagccccagctgtagaatgggaccggagcgaagccggatagtgataatttattcgataatttaactagtttttaaaacaatttgttgcaaaagacttccccctcgaaggaaccatgcgtgctgaattacactgcttaatcgtgagagtgtgtctgtgagagaaaacggattgcatgtgtgagtgatagcgtgaataactctaattgaaggaaaccgagcattcctcatggtagagattcatttcttaactagaaagaaacgaaacgattttagccgaaaactaaaaagacaaattgtacaatacttccttaaacactagcgaaaacaaacaaaatcaacgcgtgtgatttattttacaaaaaaaaacacgcactcaaacgcgcaaaagacaacctccatttgcattttagacctatctacgagtataatatgtatgacagttatttttttcgcttagaaaagccgtaattttagtcactcctctgagtcgttgtaaatatttgtgcgtacggacaagaaactcaagaaacatggtctgattaataggttagaactttgaaaacgtgaagaacgaacaaacaacaaaccgtgctacaattagcgagtaatatgtttcctccactggttggcgctcaaccggaaatggaaggatacttttttatgttcacgaacagctccatttcccgttcgcccaaacacgacaaaacacgtaagtcatatattttttggtggaaactgtccacacgtgtagatacatggtgtacatagtcacagacagcaaaacaagacagatcaaacgatgatagaagcaaacgctttcttttttgtcttttattcgaaggtaaaaatgtattattttattgagaattttttaattgtagcgattttaacacagtaaacaactcgattttttaacgaaagccctctagtttagtatctaggaaaagaaaaaaatggaagttctctcttttattaatgcggaaaaagacaaacattgttgggacggttttttttaattaaaatgtacgaaagagaatctcagtgcgcccctccgatccagtgaatccgatatcagacctgcttgcaataaaagaaaatcatgacattacctagaaacgaacaaatcgaacggcgtgacagtattttacaaagtgcattttcttggaaaacaatatcggttttcgaatgacctaaatgtttttttaacgagctgttttattaggttttattattagagatgagaaacgcagttgaacgtgattttttaagaaaacaagtttatagcagagcgtatataaatagaaagagaacgagacgatatttgtcttgacacgatttaaaaaaagagatgagaataataaaatgtataaacattattttat

SEQ ID NO: 13 - DNA, 4498 bp, Aedes aegypti
gacaatcggaagccggtatttgtgaactgtgaaggttatgcaccctcggtacaggaagaacgtgatccagggacgtatgttatccaggtcactgctacagatccggatgaccatcagacgatagcgtacagttttgtgactgctccaggtgagcgaccaaaattccgcatagacaagaataccgggttgatcactaccattcatcgttttgatcgcgatgaaccgattcgggagaaagaggtttacatcactgttcgagctactgatgatggtctgcccaacttggacgacgtttgtacgtttaaggtgacgatcgaagatatcaacgacaatccgccggtgtttgacaagacacgatacgatgaacccatcaccaaagacgccaaagtaggattcagggtagcatcaatctctgctaccgatctggacgatggggaaaacagtgtcatcaaatacgaaatcttgaagaagcagagtgattacagtcacttcaggataaacgaaaacaatggaatcataactttagcgaaatcaatcgacaagagccccggtcaatactatctgatctttgttagggcttacaacaacgttcccgatatgccccaagacgcagaggtggaggtcaaaattcctgtgatcgaatccaacaagctgcctccgtatttcactgaggcgcaactgcagccgatctccttggatgagaacttcagtaactacagtgcagccttagcaacgttacgagctaactcccgcgtacctggaaagcccgagctgattttcgaattgatcaccggtcgcactgaacagaccaacagccgtaacactttcctccttgaacagaaaggagacactgccatcgttttactcggcaaggccctcgactacgaaaccattaccgagtacacgcttaccgtaagtgtcaaaaacacgcacgacctgatcgcccaaagcatcgtcaaaatcaaagtcctggatgtcaacgacaacattccgtatttcactgaggtaacatccggctggattccggaaaacgaacccgcgggaacaccagtcatgcaggttcgtgccttcgatatggacggtacgcctgccaacaacatcgtatcattccgattggcagacaacgaagagtacttctccatcgactacaacacgggaaacattactgccttggtgacattcgatcgtgaagcgactgatacgtatcatctgaaaatcatcgcggaggataactccccctcggccctgtacaacaacggcaagcccaattccatttcgcagaccttcatcatcaagatttccgacaagaacgatcacccgcccaagttcaccaaagactactatatcgcggaaaagatccccgaagacgccaacacaaacacggtggttatccaagtgctggcacttgatatcgatacggcgtcgcaaatcacctactcaatcgtgtccggtaacatcggcaacgcattcaagatcgatgaaacgaccggtgccatttcggtgaacaacgagctggactatgagaacattaccgagtacacgctgcaggttcgggcattcgacggtacgtacgacgacaatgcaacggtttccatcaaggttgagaacgtgaacgacaacctgcccaagtttgcgcaaaacgagtacagtttggagatcgacgaggagaagatcatggatggttgcattgttacgattgaggcgtgggatccggatattcgcgatcgatcggacccgcagcacatcaagttcgccattgtcaaggtcgagcagcgtccacttttggagatcgacgatgagggatgcttgagacagaaggctcctctggatcgggatcctccgaacgggcacaagtcatggcaggtgatcatttccgctacggatgaagacggcagcggtcggcagtcgacgacgacggtcaatattatactgaacgatacgaacgataatccgccgttcctgacgaacaagatgccggttgtttggtatgagaatcaggatccgggtaggattgtgacgttgacggcagacgattacgacgaaccgcagaatggacctccgttccagtacgagatctcggacagcgcgagcgatgacattaaacaaaagttccgcatcgatacggatgttctgtatgcgcaggtgagattcgatagagaacggcagaaggagtactttattccggttctgatcacggatagtggaaagccgcaaccgttgagcaaggtcagcattctacatctggtgattggggacgttaacgacaacgagatgcaggacggcgagagcaagatcttcgtgtacaattataagggagaatcgccaaatgccgatatcgggcgggtgtatgtggacgatttggacgattgggatctgccggataagacgttcaactggcgtgacgggtacagtccggatcattttgcgctgaatacggatacgggaatgatcacgatgctgcagggaactcgtggaggcgactacgagctgttcttcacagtgactgaacagtccagtttcttcccgaggcattcggtgtcggcgaaggtgctggtcacggtgaaggaaatccccgaggaagcggtggacaaaagtgggtcgatcagattctatggaatcacggccgaagagtttgtctcgaggagcccgtcgctgtcgttgacgccgaaagatcggctacagaacagtattgcggaattgttcaacatcagtagggagaatgtggacgtgtttacggtgcttcagcgggataataatgcttcgttgttggatgtgcgatttgcgcacggaagtccatattatgaaccagaacggttgaatggcatcatcgggtataatcaacggtccctggaggatgagtttggattgaaaatgatgatggtcagcattgacgagtgcattgaggagaaggtccgatgtgagttgtcttgcaaaaatgtgctgcacaagtcgaatgttcccattgcggtgtacacgaatacgagttcgtttgtgggagtgaatgcgttcgtacaggcggagtgcgtttgcgatgctcctccggtggtgactgagtgtttgaatggaggaactccgttcaacgacaagtgcgaatgtatggaagggtacgagggtccacattgtgagataatctcgattggtttctacggccatgggtacgcgatgtatcctccggtgagtccgtgcaatatgactagaatcagtatggagttgacgccacagcgggaagacggattggtgatgtacattggaccgttgagctacaatccgctgcttccggtgcaggatttcctggcgttggagctggtgaagggactgcctgtgctgctgttggactacggaactggaacgatacgtatcgagcacaaacatcggtttcctcaggggcgtccgtttacggtggagatcgtgttacaaccgcagactgtggagatgattgtcgataactgcaagctgtctacctgtatgagcctggatgctcccaagggtccgaatgaatcactgaacgtgaatgctcctctgcaattgggtggagcggctgtgaatctggaatcactgggatcgatgttcaactggacgtacgttccgcagggtaaaggcttctcgggatgtctacggaacctgacgatcaacgatcgaacgtacaatctgggagctccgagtttggcgaagaatcacgatccgggatgtcaccgttcggtggccgttgcggtatcgttcggaatcgattcaaatttcttgattgcgatcattgtgtgcatagctgtgctgttgattctactgttggcggttgtcgtgcacaagaaacaccaggacggatggcacgaaaaggacatggatgatatccgggaaacgatcatcaactacgaggaagaaggcggtggcgaacgggacgcggagtatgacttggcggtgcttcgagcacctccgatctacatggacaaaccctacggaaacgatctgcgacagaaggaggcgaatgaggtgccagatattggcgctttcctgacggacaagaaggacgcctgcgatagggacgccgatgcgtatccaatcgatgacgtgcggcactacgcgtacgaaggagacggcaacagttccgggtcgttgtccagcttggcgtcctgtacggacgaaggtgatctcaagtttaactatttgtccagcttcgggccacggttccggaagctggcggacatgtacggagaggaaccgtcggacacggattcgaacgtggatgacgacgaaggatggaggatatgaggcgttgggtaagacatagagttaatatatttggtttcgacggaaccatccgaaggtgcgcacccgaagtgagggattgttcggctgtcgcggaagccaaagactagttttgggtcggttttggaacaggatacgtaggatacgatacaaatgtttagtttttgtacagatttagtattcgcagaaacggagaaaaagtttgaataaatgaatgaaatttttgtctaatcccgac

SEQ ID NO: 14 - DNA, 3648 bp, Aedes aegypti
ctgcggtcttctctcagcgaccattcgatctccgcacagctcaacgcacattctcctactcacaactcagttcagtccagcggaagacttcttcaggaacggttcggtagagtaaagagtcagtccaacgtagtgaccagcacgtttaggttttttgctcaacttaccagagtgtaatatattttgaataatcgcatccggctgttcggtaacatggtgttcgttgtggattagagaagtgcactacacggttttcgatcgcatggacgcagctagagccggaaatataccaccagaagtttaaccacccgatcttggccatttttacgatacgctgccgaatactggcactccgatggcgaaacgtgacttgcttcagaatgtgatcaagtacagtttgatactgatggcgacgatcgtgagtcatgtgtgcccgcgccaggatcattactacagctatcaggaaccgtatgacgatgatctatcgctgtggatcaatgaacagcaagtgaagatattcagtggggtaccgacgaagatctacgcaatcgataatgggcgtgtttcgctgcatcttcgggatccgaatttcagtcactatctgccgatcataccgtccgaggtgagctgcgtgaacttcacctggaaatccggatcgaagaagtatcactacaacttcgatcgcctagtgtccgaggatgaacaaatactgaaacctcctacgatatcgatcaaaactagcggtcgtgttccaaagaatgcaaaggagttcagtgtgacactgccgtgctctggtaatgtgtcaggcattgcggtgttcagcattggactcctaatacaaagtcgcaagggcaaacctgtgcccggcacgccactccgaataaaactccgtaaggaatgtgcacatagaggacccgatccagagtgtgacaaaaagtgcgccaacaagggcgtctgcaatgaggacaagatctgtgtctgccccgagggctacatgggtcagtactgccagacggccctgtgctatccgcagtgcatgaacggaggcaactgcaccgctccggggaactgctcctgcccgccgggttaccagggaaggcactgtgaaggtgggatatgtgcggaaaagtgcctgaatggaggaaaatgcatccagaaggacaaatgcgaatgtaccaagggttactacggactgcgttgcgaattttcaaagtgcgtcatcccttgtctacacgacggcaaatgcaaaggagtgaacaagtgccgctgcaagcctggattgagtggagatcactgccagattggacgtcgccagcgatccacctgtaagagaccctgcaagcacgggacctgccagcccgatcacacctgcagctgcgacaacggatggttcgggaaactctgcaacagacgagagaagaagaaacgcaatggctcgaagttacctaaaaggtaatccatgggaaatggtccagccggcgccacctagcccagaagatggaaccactctctgccgaaaccaatgccttatctgcctagcttgtgcttatgttctcaatataatcgttctggagtgttctttcagcctctcttactcgcgcaagagggagataaacgcagccacatgtgtattttgttgtgataaataaacgaaaatttatagtttctcagtgtaagacaaccaaaagtgcgatttttttcaaaccttttcggctatctttatcgccgtacggcacccaaacttgatcacatcggtcagagccttgtagaacggtgcctgttcggctccctcgtgcagtccaatgtcgtgatgttcctgttcctcatcccggaagcgttggatcgtttccagcagctcgtggtccttgaaatccgggttgtccatcagctcacggagctggtcgttgtagtgttcaacgattaccgactcgacggccaccgtgcacgccatggccgccttttcgccgagcagcgcacttccggctccgagggcgaaccctgcaatgttccacagtggaagcagagcagtaggccgggcgcggtatttgttcatcagtcggtcgaattccgctttgtgaactttttcctgttcccacatgtgctcgatcgtttttcccactttggtgttgcctgcgaaattttcagggagtaattataataggcccactttctgttaaacttatctagacttatctgcactaatgttaaatattgtggctccagcactaaaattaagtcgttgatcacataatttatttccgctgtggcaattagtaaacgttaaacatattgtcggaagtagtgcgctgcatcaaccattcgacgaactacatatacatcgcattacttcagatgttatgtttaacgtatagaaacagcagcggaagttatcgatcggaaatcggaatgtaatttagtgatatattcacaatagttaaatgcttaaatgacatgttatctctttttttgggaaaattttttcacagtgtatttagagcacatgttttggatttgtatcgatagcaattctattgaaatgaccgattttcacaacgatgtagcacgacgaaggacaagacgacgagtagtcgatggagagaaatcgatcatttcagttacgcccttatgatactgaacacgacatttaattccgaaatcagtgacattacgatagattgaaaactaaagttttgttgggtcagagtattgaacaccagatatatcaatatttgccttcaatcagattggaccaagacttgtagtacttagtagtttttttttttgtattcgtatgttcatttttgacgataacctattagttttaagctttttacaaggtcaagaaaactgattttgaaattgacctgagatatagtttgtaaactgacagggtatcgtaacgttaataaattacaattataattacaatttacatgtaagatttgcagtgccaaaaacaagagttaactaaattaaaattaaaatcacaatcccgaatttctaccaacatgattctaaaattttgaaacttttcaaatttaaaaacaagttttcaaaattaaaatttgatcatgaaactaattgttgcagcggatataattcccagctgcatactggcctttcccggttttgtcaccaagcatgcaacgcctactactaaattgacttacccagaacggccagctggcccttgtagatctgattggcgcccaattcgccagcatggtcaacccggattatgcggtcaatcgtttccgaacaccgcttggcactactgagcgcggcattgaggtgcagactacgcgacagaactcgctgcattttggtcagaaatttaaatatttatatacgacgacgaggagctctgctggagcgaaagctagaagttacgcaactattactaacactaaatatttggaaaagtaactatctacagggtttatttacctactggatttgtattaaacctaatgtaatcacttattagctaaaactatcacttttatcgcgaaaaatcgagtgataaatacgacgatcggtctgacgaaatgcgaatcgaaaatgatcggaattagtaaacaaagaacgactcacatctcttttgttttgcaacattgcacgcttaaaacaatcgacatttctttgtgt

SEQ ID NO: 15 - DNA, 1581 bp, Aedes aegypti
ctctcaatgaagcatcatcatccacgccgtggttaaaaaggacgaaaaggattacagttgtggtgcaatttaaattgtgttcaagataacgaaaagtgaaaccagaaataacctgatgaactcttgaaatcaagcgaccaagagcggtgttggaagtgattagtgaaattgtttggactatttgttgcctgggtgcgtaaaggatattttatgatcatgcagtctcccgtcagttcacccgaacttatggatccgcggtacagccatttgaggattccagcatcttcaagccgaatcctttacgacgttccgtgcaaggtatgtcgcgatcacagctccggaaagcattacggaatatacgcatgtgatggatgtgctggcttcttcaagcgatcgattcgccgtagtcgacagtacgtatgcaagtcgaagtcagaaacgccatgcatggtcgacaaaactcatcggaatcaatgtcgagcgtgtcgtttgaagaaatgtttcgaagttggcatgaacaaggatgcagttcaacacgagagaggacctcgaagctccacattacgtaaacagatggccctattcattgctaaggatacacctctgcgtcatgaactgatgatcccaccaccaattccaatgggtcaaccaacgatgggcctcgacttgagcatgcagaggaacgctttcctgagtccacaatccatggtccatccaacactgttcccagctatgcaatcgccccatcctttgattgctgccgacgccattcgggaatcagctgctcaactcctgttcatgaacgtcaacttccttaaaaacttggtacccttcacgaaacttccgctcgacgatcaactaatcctgttcgaggaatcctggcgagaatttttcattcttgccgttgcacaatacttgctcccgattaacttcaaccacctactagtggcctacgagtacctaaacaacaatcgaggtgagcccataccggaatgcataatccgggaagtggacatcttccaagaaatcctgacgcaaattgttgccctacgagtagataccaatgagttcgtctacctacgggcagttgtgctgtacaaaacggaattcgaccctgaaagcagcatatccagtagcagcagcgacggatcggatatcatttcttcaacatccaaatcaatccaggaaatatctaccgtccgggccttggaagacggggccaaagaagctcttgccgcctatgtgaggacgtgtagacctataccggcggaacggtttcgccttttgctgcagttattacctgttttacggaacgtgtctacttatacgatcgaggaacttttcttcagaagaaacattgggccggctccattacttaaacttcttctagatttctacagacagaaatagcttgagcttgttcatactgcaaacttcgattcgatcctggatgactgaatcgctaaattaactgtgattgatttgtgtaaataatagttttaacaaaatggaatcaaaatttctatcttgaaatgtacatgatagtggatttattctataagttaagttgttatgttagcg

SEQ ID NO: 16 - DNA, 2394 bp, Aedes aegypti
atcctcaacatggaagacgatatgaattggtaccgggcggaactagacgggaaggaaggactaataccaagcaattacatagaaatgaaaaatcacgattggtactacggtcgcatcacacgggcagacgccgagaagctcctgtcgaacaaacacgagggcgccttcctgatacggatcagcgagtccagcccgggcgacttcagcctgtcggtcaaatgctcggacggcgtgcagcacttcaaggtgctccgggacgcgcaaggcaaattcttcctctgggtggtgaaattcaactccctgaacgaactggtcgactaccaccggacggctagcgtgtcccgctcgcaggaggtcaaactgcgcgatatggtgccagaagagatgttggtgcaagccctgtatgacttcgttgcgcaggagtccggcgagctggacttccggcgaggggacgtcatcacggttacggatcgctccgacgagcattggtggaacggcgaaattggcaatcggaaaggactattcccagcaatatacgtggcgccctaccattcataagatataagtatttttattattttttgctatataaatattatatatttttaatgtttaactgggggaaaagtcgaatcgaaagagggatacgaaacaaaagggaacgtgaacacaaaagaatcaagaagccaataagaacgcgatgcaaagatcgagagtggatgcgtctagagagaaagagaaaacgagtcagtgcgcgaaaaaaagagcgaagccagacaaccgatgtacattgattgacacacacacagacatgcattatgacacaaatgagagataatccccatttacctatcagctagaagtatcttgcaggacatttgaatggttagttgaaacaaaatggtcgaaacgcttgtgagatacacgcgaaatcaaaaggaatcaaattcaggtgttttactatatctaggtttgaacgtggcgagatcgcatctcggccgcaaatacattcaatcaacaccaggaaaaaaaaaccctacccacactactaaggtaaccggagataatcgtgagtgtgaatcaaagtggaatatttcaaaaaaaaaatctgagagttacgaaagatgtgtagttttgtttatatagatattttctgtttttgtctcgtaaaaatagtctagtttttggagcaacttttttcttttcgttttgtaattaatcctaaatgtaggcaaccgttagcagatcttataattactatttaaacaaaaacaaatgtaggaacaaaattggtctaatttcgtttcgtaggcagaaagcgcaacttttgtcattatgtgtaatagcttttaagtgtaaacacagtcacacaagaagaaaacatgtaatatgttgtacggaaaaatccttacactataatagactttttaaccgagtatcattctcagtttatcaattccttgcgctaagcaaatcctttttacaaatcccaatgaatggtagttccctgattcgtcatacggccatttgccataattagctaacgttcatgacggaaagccgtatggctaatggcgtctccatgaaactacactcgaaacacagtcccattcttaaaatagggaacgactactagggagcaacatccagcaaccgaatcacacatatttacgaatagatctacaataatttaaaataactacagaaaaccccttttagtgcagttttaagtgaaccgaagcagattatgataaatatcctcaagtgaatagagaaccgaaccacacacactgaaagatatttcgctaggagaacaatttacacaattatacactgacacactaccctccaacagtacaccactagctgtacagaaagtgcagacaacggggcaaaaggacacccttgagtgtaggtgcttatatcgtttcctgtcctatccggggacgatgctcctgtgtttgcaggaaaaagtgtcgcaaataaccggaagacaattacctattcctaccttgcataattaagtagaagagagcgaaaacaaacagcaacagttgaaggagtgcaatgtgccaagcgagtgccgatccggatcgtcatccacacctttgcgcgcgtaaaagccatcgttaattacaaaaaaaaagtaagacaaacaaggagtactcctacatcaactaatagacaagacaaagtaaacaatcaaacgaaaatcgaatacagaaatggcagacaacaaaaaacctttccacaaacacacaaacaaatagcagcaacaaaggaaaaaagaacaacaaacaacaacaacaaaacaagcaaaaacatgaatgaataaaatgctagtaattaatgagataagtaataataatacaacaatacaatgcgatgcgaatt

SEQ ID NO: 17 - DNA, 1116 bp, Aedes aegypti
gccaacccgatgcggatcttccacagcctctcatccggctcgatggaatccatggacgacatcgacatggagctgttcgagatggacaccctggacgataatgctcaactgcccagcaatctcaactcgctgatctgcggggacatcaaagcgaccaagaccaccccggaagccaagcgaccattcttccgacgttgtctgagcctctcagaaaacccaatcgctcgacgcgccaacataactccattcgcctcccgaccagacccaacacgctgcttcaaacgtccggaaccaccgggaatcagccccattcaaagcaagcgccacaaaaccgaagttcttaccccagtcagctcgttgcgcaccgtagaaccctctccacgtgacagcccctccctcttgaccgtaccgtcgaagcgaccgatcctgcaaaagtccatctccatgaacgatgcccacatcatgagtgccctctcgcggtcctccacggagccagacctcatcggagacttcagcaagtcgtacgtgctgcccctgatcgagggccgccaccgggacctgaaatccatcacgccgaccatcatggccgaactgctgcgcggtaccttcgaccatcagattgcctcgttcaagatcatcgactgccggtacccgtacgaattcgagggcggccacatccgaggcgccaagaacctctacacccaggagcaaatcctggaagaactgatcaaaagcaagactgaaccgcccacggtggcggaatcctccgtcgtcgatgcacccctgaagcgccacatcatcgtgttccactgcgagttctcctccgagcggggacctaagctatctcgcttcttgcgcaatcacgaccggatcctgaactcggacagctacccggcgttgcactatccggagatctatttgctgcacggcggctacaaagacttcttcgccctgcacccggacctgtgcgacccggtggcctaccggccgatgctggatccgctgttcggggacgcgtatcggcacttccggtccaagagccgcagctggaacggcggtggtggcggcggcggcggtactcgacttgtcaagtcccgctcgaggttggtattgtga

SEQ ID NO: 18 - DNA, 2277 bp, Aedes aegypti
gtatgtccagaagatgaaagtatcatcctctcttcgctatacaacactgcagcatcgctgaatgtgaaacaagtggaagaaaatgaaacgttcgattttcgtgcattccggctggactggttccggttacaaacgttcatgagcgccaaatcggccatccgtatagtagattttccggatctggcccgcctcctggactcgatggtgttccataccaaaatggtggacaacttggacgagatattggtcgaaacctccgatttgtccattttctgcttctataacaaaatgttcgaagatcaattccacatgtgcttggaatttcccgcacaaaatcgctacatcattgcattcccattgatttgcagtcacttccagaactgcactcacgaaatgtgcccggaagaacgtcatcacattcgagaacggtccttatcggtggtgaacatgtttttggacgagatggcaaaggaagctaagaatatcatcactacaatatgtgatgaacagtgtatgatggcagatgcattgcttccaaagcattgtgccaaaatcctttccgctgcggctagtcgaaagaaaaaggacaaaaacaagaagcatatggacgacataagacgaccaggcgatgaaagctacagaaaaacacgagaagagctaacaacgatggataaactgcacatggctctaacagaactctgtttcgctattaattactgcccaactgttaatgtgtgggaatacgccttcgctcctagagaatatctttgccaacatctagaaactcgcttctcaagagccttggtcggaatggttatgtataaccaggatacgatggaaattgccaaaccttctgagctgttggcatctgtaagagcgtacatgaatgtgctgcaaactgtggaaaactatgttcatatcgacatcactagggttttcaacaactgtttgctgcaacaaacgcaggctcaggatagtcacggagagaagaccattgcagctcattacaatacttggtattcggacgtcttgctgagaaaagtcagcggaggaaacatcgtattttcgttgaatcaaaaagcatttgtcagtataactccagagggttgcattccattcaatccggaagagttctccgatttcaacgagctgcgtgccttagctgagctaattgggccttacggaatcaagcttctgaatgaatccttgatgtggcatattgccaaccaagttcaggagctcaaacgaatggttgcactgaacaaggaagttctgagcattctacgcagcaattttgataaaccggaaatcatgaaagaacagttcaagcgtcttcaacaggtggacaatgtactgcaacgcatgaccatcattggagtcattttgagttttcgccaacttgcccaagaagccctagttgatgtcttagaccaacgcattccattccttttatcatccgtgaaagatttccaagagcacgttcctggaggcgatccgcttaagaccgtatccgaaatggcatctgcctcgggactcaagtgcaaagttgatccagcattatcgaacgcgttgaaagcccacaaaccggagctagatgaaggtgaacatttgatagtttgcctcctgatggtattcgtagccgtttccattccaaagttggccaaaaatgaaaactctttctaccgtgcatccctcgaggcacatacaaacaacacccattgcatggcagttgcgattaacaacatctttggtgcaatgttcacgatctgcgggcagaatgacattgaagacaggatgaaggaatttttggctctcgcgagttcgtcactgctaaggctaggccaagaatcggataaagaagcgatcaagaaccgtgaatcgatctatctgcttctggaccaaatcgttcaagaatcaccattcctcacgatggacttgctcgaatcgtgcttcccatacgcgctgattaggaacgcataccacgctgtttacaagcaggagcaactaatgcattagggtaatatcatcaccttttcggaaatttcagcgatatatgcttttattcgattcgaactatattcttaccaaaaggaaacatttaggctaaacttcgtattatttaaatcgatattgtgtatctaccaatcgtttatacttgtaattccttaaaagtttacgacaaaccacgccaacaaatattacacgcgatttatgtacaacatatttacaatagacgtacattattggacaataaatttgcaacttttttcgattttg

SEQ ID NO: 19 - DNA, 4163 bp, Aedes aegypti
tctcgctaaaaataaaagtgctttctcctctgccataatggaatccttaaaattctgtgaaaattagtaaattttcgtttctaaacggcatttattcagtgaaatataattgaaaagtgtgcctaaagcaccttcgtaaaagtgaagtcaaccgacaagatggctcgtcatctcaacccaaatcagcagaaaatttcagagaaactcatcattctcaatgaccgcggtgtcggtatcttaacgcggatttataacatcaagaaagcgtgcggcgacaccaaatcaaagcccggattcttatcggagaagtcactagaatcgtcgatcaagttcatagtcaagcggtttccaaatattgatatcaaaggccttgctgcaatcaccaacatcaaatcggagataatcaaatctctatcactgtactattacacgtttgttgatttgctggactttaaggacaatgtttgtgagattcttacaaccatggatgccctgcagatccacctcgatatcactttgaattttgagctctcgaaaaactatctagatctcgttacaacatacgtatctttaatgatactcctctcccgagtcgaagatcgcaaagccgttcttggtctatttaacgctgcctatgaaatgcagcatcaacagagtgatcaaagctttccacggctcggacagatgatcatcgactatgatgccccagtgaagaagcttgccgatgagttcatccctcaccaacgtttgcttgcaagtgcaattacatcacttaccaaaatatacccgatgaggaatctgagcgcagagaaatggcgagaactgcagctgttaagtttagttggtactccagcgacgttattgaaggcggccaaaaccgatacgatgtcttgtgaatacgtttcactggagactctcgatcgttgggtcatattcggtttgatgttgaatcaccaggcattgggtcaccaagatttgatcacgtccatgtggatttctgcattggattcaagttgggtcgtggcactattccgagatgaggtcatctatattcaccagtacattcagaacacatttgaaggaatgaaagggtatggcaaacgtatctctgaagtgaaagaatgctacaatcaagctgttcagaaagccggcctcttacatcgcgagagacgaaagtttttgagaacagccctgaaggaactagcactgatcatgaccgatcaaccgggattactgggtccgaaggcactattgattttcattggattatgctacgcaagagacgaaatattgtggttgctacgccacaatgataatcctccggttgtgaagagcaagggaaagtctacggaagatttggtcgatcggcagttaccggagctgttgtttcacatggaagaactccgggcgttggttcggaaatacagtcaggttatgcagcgctactacgtgcagtacttgtccggctacgacgcgattgatttgaacttcaagatgcaacaattgcaggtatgtccagaagatgaaagtatcatcctctcttcgctatacaacactgcagcatcgctgaatgtgaaacaagtggaagaaaatgaaacgttcgattttcgtgcattccggctggactggttccggttgcaaacgttcatgagcgccaaatcggccatccgtatagtagattttccggatctggcccgcctcctggactcgatggtgttccataccaaaatggtggacaacttggacgagatattggtcgaaacctccgatttgtccattttctgcttctataacaaaatgttcgaagatcaattccacatgtgcttggaatttcccgcacaaaatcgctacatcattgcattcccattgatttgcagtcacttccagaactgcactcacgaaatgtgcccggaagaacgtcatcacattcgagaacgatccttatcggtggtgaacatgtttttggacgagatggcaaaggaagctaagaatatcatcactacaatatgtgatgaacagtgtatgatggcagacgcattgcttccaaagcattgtgccaaaatcctttccgctgcggctagtcgaaagaagaaggataaaaacaagaagcacatggacgacataagacgaccaggcgatgaaagctacagaaaaacacgagaagagctaacaacgatggataaactgcacatggctctaacagaactctgtttcgctattaattactgcccaactgttaatgtgtgggaatacgccttcgctcctagagaatatctttgccaacatctagaaactcgcttctcaagagccttggtcggaatggttatgtataaccaggatacaatggaaattgctaaaccttctgagctgttggcatctgtaagagcgtacatgaatgtgctgcaaactgtggaaaactatgttcatatcgacatcactagggttttcaacaactgtttgctgcaacaaacgcaggctcaggatagtcacggagagaagaccattgcagctcattacaatacttggtattcggacgtcttgctgagaaaagtcagcggaggaaacatcgtattttcgttgaatcaaaaagcatttgtcagtataactccagagggttgcattccattcaatccggaagagttctccgatttcaacgagctgcgtgccttagctgagctaattgggccttacggaatcaagcttctgaatgaatccttgatgtggcatattgccaaccaagttcaggagctcaaacgaatggttgcactgaacaaggaagttctcagcattctacgcagcaattttgataaaccggaaatcatgaaagaacagttcaagcgtcttcaacaggtggacaatgtactgcaacgcatgaccatcattggagtcattttgagttttcgccaacttgcccaagaagccctagttgatgttttagaccaacgcattccattcctcttatcatccgtgaaagatttccaagagcacgttcctggaggcgatccgcttaagaccgtatccgaaatggcatctgcctcgggactcaagtgcaaagttgatccagcattatcgaacgcgttgaaagcccacaaaccggagctagatgaaggtgaacacttgatagtttgcctcctgatggtattcgttgccgtttccattccaaagttggccaaaaatgaaaactctttctaccgtgcatccctcgaggcacatacaaacaacacccattgcatggcagttgcgattaacaacatctttggtgcaatgttcacgatctgcgggcagaatgacattgaagacaggatgaaggaatttttggctctcgcgagttcgtcactgctaaggctaggccaagaatcggataaagaagcgatcaagaaccgtgaatcgatctatctgcttctggaccaaatcgttcaagaatcaccattcctcacgatggacttgctcgaatcgtgcttcccatacgcgctgattaggaacgcataccacgctgtttacaagcaggagcaactaatgcattaggataatatcatcaccttttcggaaatttcagcgatatatgcttttattcgattcgaactatattcttaccaaaaggaaacatttaggctaaacttcgtattatttaaatcgatattgtgtatctaccaatcgtttatacttgtaattccttaaaagtttacgacaaaccacgccaacaaatattacacgcgatttatgtacaacatatttacaatagacgtacattattggacaataaatttgcaacttttttcgattttgcatacacaatggttaacttaagagttttagagttttacagttcttccgacataacttgaatttcaacatttatttttgagtgatttttccaattacgaagccaaaattaacaacaatttagttcagttaagttgtgaatttggaagagatgaccgagtctttcatgttttcaagttaatcgtctatgaattttagttgaaaatactagggtttccaatttcctaaaacttccgtgattccaggagatttttaagtaccgtaaaacgggatagctttgatactttttggactaaaatctaattatttctgcattttttattatagaacttttatttttatttccataacaagtgcccttaatgctacaactagataac

SEQ ID NO: 20 - DNA, 2923 bp, Aedes aegypti
ctcacttgccgtgtcgttcagtcacacgttcgaatttttattgcactcgatatataatttgttcaagtgatttgagttttcgggtttctgttttcgctttgtgctttcgtgttgcgttcagttcagttcggttccgtgttttgtttatcgacgacagttgcctggcggacaggatttcagtcgttcgtttgagctcgttgcgcatacatcggaacgaaggaagtgaaacaagtgatctgctgctacatgatcgttgatctaaaccgtacaaagtgttttgactgagagtgtcgggaagaaaggacaaacggaattataaatggaataacaagcaaggattaaatgtgcttcaagtgaaagtggattttagagacaatcgtttgtgattcgccaggagcgaaattagaagaaaataatactgaagataaggtgaactatgccaacatcgatcatgcagaagaactacagccattgcccgctcaagaagcgcccagtcttcattcgcgaggaggaagataaaaacgactccgaatctgatatggagccggagaacctcagcacaaagccagaggatctttcgatgaaaaagaaaaaggctcgttccgagtctccagtgcctgttgtgatcaaagctgaagacactttgccaacaccgccaccgtcatcctctcccgatccaactgaaatcaaatcaccgatttcagttccaactccgatctacggatcacacccatcaatctactacccaccctcaagatctccatcctcgcctgctgaaccgctacacaacttctacaaatccgcacccaatgtgtatcctggatatcctcatttcccatacccaatgccatatccttcggatctgtacaacttggcgtatcatcatcacatctcgccaccacgatccgagccactgtctccttatggacaacgtgaaagttcggtttcgccaccacatccatctctgtacacccgccaggaatcgatctcaccgcctacgatggttccggcctacccagcctctgagctgcggataaaccagaacaacaatatcatcaagtcggaatccttcgctcggcaacaccgctacatgccctacagtctcagccatcatcatcagctcatgatgcctgtagaacatcccacgctatcgccaacctccagtcacacctcgttcaattcgtacctttcgtcgaaccgatcgctttcaccggcccgatcgagtccttcgactgtttccgaagagaacaacaacaacacctcatcgccatcgatcctcaccgaaaagtccacttccaactccaacatccagaaagtgaaaagtgagaagtccagtgagaaatcaagtggtagttccagtggtgcccctcgataccagtgcccggattgtggaaagtcctactccacctactccggtctatcgaagcaccaacagttccactgtccagcagccgaaggcaaccaagctcagaagatcttcgtctgcaaggagtgtgacaaaccgtacaaaactctcggagccctgaagatgcacatccgcactcatacgcttccatgcaagtgcaacctctgtgataaggctttctcgcggccgtggcttctgcagggtcacatccggacccacaccggcgagaaacccttcatctgcaagctctgctctcgggcctttgctgatcggtctaacctgcgagctcatcagcaaactcacgaagatgtcaaacgcttcaagtgcccatcctgtaccaaatcgttctcgcggttgcctctcctcaccaaacacaccgaaagcgggtgccctggaatccaactggggtcccaagtggttcccggatctccctcatcgcacacgcatcaggatgacaagtatattccaacggtgttgcctcacagcaatatcgcctgttactagacaaagtgtttcggagccaaccggaagttcaacgaaagtgcctatttggtcatcattaaaacccccacaaaaccgagttcaccgcaaaagactgaaacttattgccaccgcgatttgattagatttttattgcctatatcgaagtgtgctacagagaggaagaaagacagagaaggttagtgaagagtgaccgagagaaacacagttcaaagttttgtaaataggttatttattcgtgaaatctatttttccgatagaacttttcgagtttccgcaaaattaccaaaaagtagtgtgttttcccgagtttaaattcgaacgtcgccagaaattgtttttagttgttgtaagttatttatttataccatcaaaaatcgaacaaatctcgagttactgctggtcgctttctcagatgatcctcgggtcgcaagggaaagcacaatcactttcatgaaagtttctaaactagtcagctagaataattcttcgtgtaaactacctaatttctttctttttaaaaacaaacatttaagtgcgtaagctagaatcatcttaagttgtctcaaatcagacctatttcaaaaaggatctcagttgtatgaaattcctattgcgagagtgtgcgaaccttagagaaagagagtgaaataatgtgcctttcaagacgacaaatcagatcgacctttttcatcaaacacagaagaaactgatgcatttcaaactgccattcacacttactcacgagtgacaagacaaattagccgataagccgaatagaaatttaaccgctctctactctacaccgtaaagaaaaaaaaactgaaaaatcattgtatgtatagttccgcgtatttttctcttagcagatatacccccgtcgccctaaggagaatcttaatatatattgtttttattgcttagtgtttaaggatttttacaaccaataagaaaacaacaaaacatcaaatcaagacaaaataaaatcgacacaaagctatgtgtatgaaaaattaa

SEQ ID NO: 21 - DNA, 3915 bp, Aedes aegypti
tgcatcggaaccaatggacgaatgtcggtaccttcgaaccgcgagtaccactacaagaatctacgcgatcgatacaccaactgtacctacgtggatggcaacctggagatcacctggatccagaacacctcgtacgatttgagctttctccagcacattcgggaggtgaccggttacgtgttgatcagccacgtggatatcccgcaagtcatcctaccgcggttgcagatcattcgaggccgtacgacattcaagctgaacaaatgggaagacgaattcggcctgttcgtgtcgttctcgcagatgaataccctggagatgccggccctgagggacatcctgagtggatcggctggcattttcaacaactacaatctatgtcacgtgaagaccatcaactgggatgaagtcctctccgactccaaagcccactatcggtacacgtacaacttcacctcgccggaacgggactgtccaccgtgccactccagctgcgaggtgggctgctggggcgaaggtgcccacaactgtcagaagttcagcaaactgaactgctctcctcagtgctctcaggggcgctgtttcggctccaagccgcgcgagtgctgccatctgttctgcgctggtggctgcaccggtcctactcagaaagactgcctagcctgtaagaacttctacgacgatggcgtgtgcaagcaggagtgtccacccatgcaacgatacaaccctacgaactacctctgggaaccgaatccagaaggcaaatacgcctatggagctacctgcgtgcgaaattgcccggaacatctactcaaggataacggagcttgcgtgaggacttgtccgtcgaacaagatggcccaaaatggcgagtgcgttccgtgtaacggagcctgtccgaagacgtgccaaggcgagggaatcgttcattccggcaatatcgacaagtacaaggactgcaccataatcgaaggatctctggaaattctcgatcagacgttcgacggttaccagcaggtgttcagcaacttctcgttcgggccacgctacatcaagattcatccagatcgattagaagtgttttcgacgctcaaggaaatcagcgggttcatcaacattcagggctatcacgccgatttcaagaatctgtcgtacttcaggaacctggaggtggttggtggacgtcagctcaaggagaatctgttcgcttccgtgtatattgtgaagacatcattacaatctttggagctgaaatcgttgaaacgggtcaactcgggtgccatcgtcattctcgaaaacgaccacctgtgctacgcgcaggagatcgattggtctaaaatcaagaagtctgctgaccacgagagtgtgatacagtccaatcggaatcccaagacttgccacgaagaaggaatgttctgcgacgagcagtgcaccaaggccggctgctggggcaaaggaccggaacagtgtctggaatgcaagaactttgtctaccaaggcaagtgtctcgacagctgcaagagtcttccaaagatctaccaagtcaactcaaagacttgcggagattgtcatccggagtgtttggattcatgctacggacctaacgccgacaactgtggatcatgcgtaaacgttaaggacgggaagttctgcgtatcggagtgtcccatcaccaagtacaacctgaacggaacttgcgtcgcgtgtcacaaaacttgcatcggttgcaatgggccactggacacaattgcccccaacgggtgtgtttcctgtgaccgagcaatcatgcgaagcgatggcaccgtggaacggtgtctgatgaaggacgaaccttgtccagacggttactacagcgaacgcgttgaacaggacgaaggacctctgaaacaactgtcaggaaaatcggtttgtcgcaagtgtcatccgcgctgcaagaaatgcacccagtacggattccacgagcaagtctgtcaggaatgtgccagctacaagcgcggcgaacagtgcgaagacgagtgcccgatcgatcattttgtgaacgaagaaacgcgcgaatgtctgccgtgtcattcggaatgccgtggatgtcgtggattcggcgaggaccaatgcctggagtgtcgcaatctgaaactctacgagggagatcctaacgataactccactgcgttcaactgtacgtcaacctgtccaccgactcatcccttcaaacatttcccagtggaaaccagcaagattggaccgtactgttcagctgagcaggttcagagcggattccgattggaaacgtcaactaccccgatcttactgcttgcaatactggcaccgattgtactgatcctattcgtgtttggaatggcatacctgtactgcacccagaagaacaagaaagacgcggtaaaaatgacaatggcgttggctggatgcgaagattctgagccactgaggccgaccaacgttggaccgaatctcaccaagttgagaattgtcaaggaagcagaactgcgccgaggaggtgtcatgggcatgggtgcgtttggtcgggtgttcaaaggcgtattgatgccagaaggcgaaagcatcaagattccggtggcgatcaaggtattgattgagatgtcgggttctgaatcaagcaaggagtttttggaagaagcttacattatggcgtcggttgaacatcccaatctattgaaactgctggcagtttgcatgacttcccagatgatgctgattacacagttgatgcctcttggctgtttgttggattatgtgcggaacaacaaggataagataggatcgaaggcgttgcttaactggtccactcagattgctcgtggaatggcttatctagaagagcgacggttagttcaccgtgacttggcagctcgaaacgttttggtacagacgccgtcaagcgtaaagattaccgattttggattggcaaagcttttggactatgattcagatgagtatcgagcggccggtggaaagatgccgattaagtggttggccttggagtgtattcgtcatcgtgtattcacaagtaagagtgacgtgtgggcctttggagtcacaatatgggagttgatgacttacggtgctcgaccttacgaagacgtccctgctaaggatgtcccggagctgatcgaaatgggaggaaagcttcctcaaccggatcatatttctctggatgtgtacatgatcttgatttcttgctggcacttgaacgcagatgctcgtcctacattcacaactttggaaaagacttttgctgaaatggccagagaccctggtcgttatttgagtattccaggggacaaatttatgagactgccgtcgtataccaatcaggatgagaaagatctgattcgcactcttgcgccagtagctgaagctggaatacccggaaccattgtcgaagccgaagaatacttgcaaccaaaaacacgtccggctctaatgcttccgcagtcgtcaatggagaaacaagatgacatgtccaaatcgatgcgctacagcaaggatcaactcaagccagacgaagaaacggatcgtaacgcacgtgaagtaggcgtcagtggtatgcgactgaatttgccactggacgaggacgattatctgatgccaacttgccaaagtcaagcaccgtcggtccccggttacatggatttgatcggagttcccgctagtgttgacaatcctgagtacctgatgggatccgccggtagcaatatcaaagccataccaatgccgcacacgacgctcaatgaacctcaggcagctccaccaacgcaaaccttgggtattcctctatcaccaactgaaacgatagaaaccacttcagagcatgagtactacaacgatttgcaacgagaactgattccgctacatcggaatgaaactacggtgtga

SEQ ID NO: 22 - DNA, 4818 bp, Aedes aegypti
atgcagcatcaatcgctgtctgtgagaaacagcagcggaatcagtggcaacagggacgagaactttccgtcagtccggtcctcgaaagtcaccgtcaaaacggcttccataagcgcaaagatggcccctcatacgcagggttcaaatctaacgatcaaacagcaatatcaaccccaccagtggccatggaacacaagcaacaacaccaacgctaccaatagcaataatgtccaatcaaataacaactcaagcacagccactagcaatagttctaccaacagtaacaattcacctgcagtcaatactccgacgacgcaaaatcaatcacaacccactacacagcaatcgaacactgccttggttgcggcagccgcagctggaaccctctcggtaactgcggtcaacaagctgaagcgcttacaaccgacgacccactcggaggccagcaccaacactagaagcaatagcaccaacaccattgccagcggtgccaagcgaatacgaaccaccaatgtggagaaggttaacaaatcggtcggcaccaatacgacaggcctttcgggaccgccaggactagtggcagttggttcgagtctgacaacctctgccgcaaatgcaaccactaccaaaaaactcacccagatggcaatcgtcgccgccagcaacaccagccatcaccatcagcagatctcaaccgccggtacgacgacgaccactattacgaagaacgcgaaaaacttcactgccagcggaaatgccgacctctgcaacgcgaacaagataacagcgggacgagccactacgttgaagacgacaacggcctcctccacgacgacggcaacagcggaagcagaagcagaaatcaccactaccaccgaactgatgacaacaacatccacggtgctgcagcagaaaagtatcatcaagaccggcccggtcaaaacctccaacgcggccagcttagagaaatacctcaacctcctacagcaacagcaagcaacctccataactccagctactacgctgaagaaggtcgaacgaaagactgcgcgaatagcaccaacagtgtcgcttacccgcaaagttagtcactcacctcagggaggtctcggagttggacaacccaaaaagccggtcacaattgcacctcgaacttccgatcccaagttgagcatcaactacaaccaacagatggttgccacgaccgccacctccgctatttcaaccggcaatcaactcatcaaacagcaggatcaacagttggttaagtcacctcaatcaaccgtcttgctcaccaccatacgaattccccaacaacagcagcagcatcaacagtccactcaaacgcaacaacaaaccagtcaaaatcagtcacagccacagcagaatcaaacacaggctcaacttcaagcacaacaacagttcaaacaggttgttcaacagcaactccaactgagtagtcctccccggacgccaaccaagctaggctcggctgtgttccagtttcatccgcaaacgaccaccgtcatgccaaatctggtacagataccgaatctcgtaccaacccaaccggtttcgtcggcggctgccaaactgaacgccccggtagtcgcatcctcaactaccagcagtccaaccactgccaatctggtgatgaacaacgccacacatggactgacggccaccagactgaacaacggaaccacacagctttacatgaatggtgctgtcatcaagctgcaccaaattcagcagcaacagcagcaggcaattggcactgcaggacagcaagcaccaaccccacagcagagcctgcccatggattcggcgacagtcagcatgggtctcaatggtctactcaccaagtctgcaactttatcgactgcagctagcaccatcagcacaaatcaacccgcacatcaggccaaagcgttcaccctccacgctcaaaaaccaactcagctttaccaacaggcgaacacatctacggctacggcctacaccccacagccgttcttcatggctcctagtggacaaatcctcctcaacacagccgctctccccaccatgctgacttccgcgagtcttcaacaagccctggtacaagcggctcaagccaacatcccagcgctgcatccacttcaacccagtcaacctcaatcaactcagttaccaaatatcactgccatcatccagcagcaacaacaacagcagcaacagcaacaaatgctgccaaatttccaccaactgctagccaacatcccacaagcggtgctccaaaacctgcaatcaacaaccaaactcggtcaaacacctcagttcgttcctattccctcaaatctattccttaacccgcaaaaccccgtctacaccagcagtccgtcctcatcatccttcacttccccaattaccatttcaacgtcgacgctcccctccggatcaaccaccatctcacagcccctctccccaccgcccctcgtggcaacggtaccaacctacaccaccactgccaaacccatcatgaataccttgaacaatcagaagatcatcatagcttctgctactagcaccacttcctccaaaccaccgccgccgatcaagccgatctccagcaccgaacctcccaaactagttccagtgcagttgaacaaaccgtcgatctcaatcacccccgtcatatcgaatcctcccaaactagtcccaccatccgctccggttccgaagcttgtgctatcggcatcagttgcaaccaaagccacatccaccacccccatcaaggacaaaccaaaacccaatctacccatgtctgagccgccagcattagctccggcgtcctgcactccgcctcttctgactgcgccggcaccgcttccggtagcatccgttccatcgcccgtcctctctccgcgggccatagacaacaagtctccgccagctctcaacccactgagcctggactgcggcagcagcaacgatagtggcatcgttgccaactccagcgacaccgaggacaaatcccttacaatcgacctctgttcaccgggatctcccgactccacgccgcagaaaaaggacgaggaatctcgccaagagtcgacaccatcaccagtcccatcaccgtcaccattatctgaacctccagtcattcctgccgaatcagaacctgaaccggagccggagccggagctggaaccagagccggagatggaacccgaaccggaaacagaaccggagccagaggtagaaccagagccggaagatgagccccatctcgaagaaccaaaaattgacgagtcctctgaagccgttgagcttcccgaactggaggacccgcaaccatcccctccattgccttgcgagctaccaccacctccgactatcgaaaccgacctactggacaccctcagcctacctcccagccaaaaatcccccaagagcttactcctggagcaaatcaagctcaagctaccggatcaaccggacgaccaaccgcaagaatcgatgtcctccgatcaggactacagcaaccaaagcccgctggatgaatccagccctactggatcggccgaaccgtccgaatctcaaaggtccactacgccggtcgacatgtcgcctccgagcatagaaaccgatttcctaaacaccccccagatgacggagagtgcgaagagccccatcctgtcgcagccaaaaaccatccgcttcccagcccagaatggagtgcaccacaactttggccgaaaaggtttccggcgtctgtcggacggccggttgttcggggtgtgctattggagcaactgtgacgcccagttcgacaccagctcaaagctgttggaccatctgcagatccagcacgtcaacacccagacgggaccgttcgcttgcctctgggatggctgcaaggtgcacaacaaggagtcgtgcagtcgacgctggttggaacggcacgtcctgtcgcacggcggttccaaaccacacaaatgtattgtggccgggtgcgggatgcggttcggatcccagcttgcactggagaagcacgtcaatcatcacttcaacaacacggataacgccagcgcaggcaaacgatcatcggatccaccccttcccaaggttctccgcaagactggcaaaaagctacgatatcgacgtcaaccgtggtcagctcgacggtttgactttttcgatatcggagtgatggaagggctgcagcacagactgatcatggccggcagtgtggccagtgctcgtcggggcacggtgacgttccggggacaggccgcaggacggcgggtcaccggatttggagcggaggtgtttgtcaagtggtacccgcgggaaatcatctccgacgattggatcccggaggcggaagtcacctcaacgagagagatctcaatctacgagctcaatccggaccagaggttcgagctggaagcgcaactgaagaccaatcggaaggccaatgcagagttgcttttctgcctacacgagctcaacctgaagctgcaggcggaagcatcgtcgacctcgtgcagccgaagtagcttcagtagcagcagcagtagtagctcgtccagtggatgcagcagtgcaagtagcagcctcatcagcacccccatcccgttcaactcccgaacggagccgaagaagctccggaaacctcccaagcagtcgtaccaaccgtcgtcgtccggtacgacgtcttccctgtcgtcggtgctctcgtcttcggcatcttctctgctctcgaacgagaacagcagcagtagcagcagcagcagcagcagtagtagtagcagctcgtcgtcaacttcctga

SEQ ID NO: 23 - DNA, 1739 bp, Aedes aegypti
agccatgtttccaccaactttcacattattcatttccggttcgagtgccagttgcgtgcgatggagacagcacaatccacgtttgcgtgcacaggacagtgacggcaccattccgggagtggagagaagtttcggcgtgagagagcagagtctggcagcaaaacggttttcggacttggatagcccgacagctcgacggtcgccatcaatcgtttgtgttaattcaccccgtgtgccattgaagagcaaaagcgagaagcactcaggtcccataagttttcctcccttttagtgtgtctctataatacaatctttagcagtaaagaaaaaattttgaaagtaaaatcactctcgcctagaagtgacaaattgacccgtttcgagtaaccatcatcagaaaaacaaaaaatcacaatgagctggcaggattatgttgacaatcagctcctggcttcccagtgcgtttcgaaagcggccattgccggtcatgacggcggcatttgggccaaatccgatggattcgaagtatcaaaagaagaactggcgaaaatagtgcagggctttgacaaaaccgaactgctcacctcaggaggcgtgacactggccggccagcgttacatctacctctccggaaccgaccgagtaatccgagctaagctgggcaagatgggagtacattgtatgaagacacagcaggctgttatagtatcaatttacgaagagccagtgcagcctcagcaagcagcgtctatagtcgaaaagcttggagattatctaattacctgtggttattagaagagcctacggcggcagtgtgagcgtatttctcttgtaattgtgtaaaatcagttcagtatgataagaaattgtaatttgtattagctcttaaaatcattaagcatctctctgaattggtcgaatcgaagaactgaaggaagaaagaatgcgaaagcaagagcggaggagattataggagagtcaaagatgaagggaagtgaaaacttgcacttagagaacaaatgaaaattcttacgcattcttcgatggcacatgagatgaattacagtcatataggatacgagcatgggttgtaatgttgaaatcataggaggacgaataaaacaaacgcatgtaaaactgaaagaaattatggaagaccatttttgatggtgtaaaaagaatgaaacgcataagctactctactattattatcatccgtaactgtattaattattccgcgatgaaacagagctgaggtatgaaaacagatttcgattcataatttgcaaaaaaatgcgcgagaaccgtttttctttgtgtcggacagcataaatacaagcataactatgagataaacaagcgaatcaatatgataaggataatgcaatgataataaaaaccgcaagaaaagaataacagcgaaaataatggacaaaaatgtgtgtgatttactactaatttacaaataagtgaaagcatgtgaaaaattgaagaggttttatttctctttgtttttttttttataaattatagaattcttgtgattataaattattcttatcttatgatcgaaaggaaaacatgctgttggtttttagttttttttctaccatttttcccagaaaaaaacacaaacatccctattctgtttatttctgactatccattgaatactatcctccatgaatgtcctttcagtacagaaagaaataaaaaaaggaaacacgaaaacttaaata

SEQ ID NO: 24 - DNA, 2604 bp, Aedes aegypti
aagtttcctcaaagtgcaatttggtggtgaaaagtgcatccaaaaccagaaaagtagcagcaattcggtaaacggtgtggattcttttcgcccgtggttaccaatatgagctatcaaatgccgcaaaatcgaacaatgtcccacaacccctacaattcatcggatatgccgatgccctcggcgaaggagcaaacgctgatgtggcaacagaactcgtacttgggtgattccggcatccattcgggtgcggtcacgcaggtgccatcgctcagtggcaaagatgacgacatggaagacgatccgctgatgttcgacatggatcaaggtttctcgcagaacttcacccaagatcaggtggacgacatgaatcagcagctcagccagacacgctcgcagcgtgttcgagccgccatgttcccggaaaccctcgaagagggtatcgaaattccgtcaacacaattcgacccacaacaaccgacagcggtacagcgattgtccgaaccgtcgcagatgcttaagcatgccgttgtcaacttgattaactatcaggacgatgctgatctggctactcgagctattccagagttgatcaagctcttgaacgatgaagatcaggttgtggtttcccaggctgccatgatggtgcaccagttgtcaaagaaggaagcttcacgtcacgctattatgaacagcccacagatggtcgcagctttggttcgtgctttgtcccagagcaatgatctagagaccactaaaggagctgtagggacgttgcacaatttgtcgcaccatcggcaaggtttgctagcaattttcaaatctggtggaatcccagcactcgttaagctgctatcgtcgccggttgaatctgtgctgttctatgcaatcacaacgcttcacaatttactgctccatcaagatggcagcaaaatggcagtccgtttggctggtggcttacagaaaatggtagctttgttgcagcgcaacaatgttaaattcctggctattgttacggattgtctgcagattcttgcctacggaaatcaagaaagcaaacttattatccttgcttccactggaccaagtgaattggttcgcattatgcgctcatatgactatgagaagcttctttggacgacctcccgtgtgctgaaggtcttgtccgtttgttcgagcaacaagccagccatcgttgaggctggtggcatgcaagccttggccatgcatttaggaaatccatcacagcgtctcgttcagaactgcctctggacgttgcgtaacctttccgatgccgccacaaaggttgacggtttagaaacgcttctctctggcttggtcacagttttgggctcatcggatgtgaacgttgtcacttgtgctgccggcatcctgtccaatctgacgtgcaacaaccaacgcaataaggtcacggtatgtcaagttggcggcgttgaggctctggtcggtaccatcatcaatgcgggcgatcgcgaagaaattacggagccagccgtttgcgctctgcgtcaccttacttcgcgccatccggagtccgaatcggcgcagaacatcgttcgcaatggctacggattgccagtgattgtgaagctacttaatccaccgtcccgttggccactgatcaaggccgtcatcggactgatccgtaatctggcactctgcccatcgaatgcagcaccattgcgggaacatggtgcgattcatcttctggtgcggttgctgtttaaggcgttccaggatacgcaaaggcaacgttcatcggtagccaccaacgggtcgcagccaccgggtgcttacgccgacggggtgcgtatggaggagatcgttgaaggcaccgttggtgcgttacacatcctctcgaaggaggaactgaaccggcagcttatccgccagcagaacgtgatttcgatcttcgttcagctgctcttctacaacgacatcgaaaacattcagcgcgttgctgccggtgtcctgtgcgagctggccgtcgacaaggaagtggccgagatgatcgaagccgagggtgccaccgcaccgctgactgaactgctcaattccgctaatgagggtgttgccacctatgcggccgccgtcctgttcaagatgagcgaggacaaatcgatggactacaagaagcgtttctccagcgaactgaccaccctgccggtgttccgcgacgatacgatgtggaacaacggcgagctcgggatagggccggatttgcaggacatcctctcgcccgatcaagcatatgagggcctttacggacaaggtccccccagtgtgcacagctctcacggcggtcgtgcattccagcaaggatatgacacactgccgatagattcgatgcagggcctggagatcggcggaggcggtaacgccggtccggctggcagcaacccaaacgcgggcaacaatccaggtgccggtgggcccccatccggccagccaacgtcgccctacgcgatggacatggacgttggcgaaatggacgccagcgaactgacgttcgatcacctggatgtgatgccatcgccaccgcaggataacaaccaggtggccgcctggtacgataccgatttgtaa

SEQ ID NO: 25 - DNA, 3180 bp, Aedes aegypti
agctcctgggagagtgcaacagtgattgattagtgatgatcgctgcataaaacaaatgctgcaatgttgccgcgaatcaagaataaattctaatttgtttcacgtgtcattctgggtgatacaaccagtgcagatgagcggtttaactcaccggtgaagataattttttttagtatttccacttcctgatatagtacttgtatcagctataacggctgagccaaattgacaactatatagcaaaacatttgctcatcctgctccatctccaagtatctctcccgtgagatcaatcaacgtgccaagcacaatgaataggatatacattttatctatcctatggctgtcatcaacgctcctaatcagtcagatcgaaggctccgggctgtttgagctgaagctgaagtacttcaagaacgaacgaggggtggataacgagggcgcctgctgttcgggtcgttctgattccaaaggcaactgtatcggagcgtgcaagacgcggtttcgtgcgtgtctgaagcactaccaggtcacaattgacacctcatcgccgtgcacgtttggcgatgtcataacgcccgtactcgagggaaattcgttgaacctgaccgagaggagcaagcaagaaggattcgaaaatccgatacggtttccgttcgagtttggatggccgggtaccttcacattgattgtggaagcatggcttgacacgaatgaaactacctcacgatcaccagaagcggtgcgaagcagactattgcttccggccaacgttccacaagtgatgaacacgctccgcacgctttacggtcgtcccgaacttcttattcggtcattacatgaaaagattcggcggactccaggacctaggcatgaccgaatttggattggcggtgcaaaatttcgtcgaccatcttcaggcggcggaacaagaagaacatctggccaacccaatgctcatgcaggagctgcccgctgcactcctggatgcgacgagaaacacggacactgcagcaagcctaacgagtgcatttgccaatccggctggaagggtgccctgtgcgacgagtgtgaaccctatccgggatgcatacacgggacctgcaagaagccctgggagtgcctctgcaacgaaggctggggtggattgttctgcaatcaggatctgaacttctgcaccaaccacaaaccgtgtcagaatggaggaacttgcttcaacaccggacaaggttcgtacacttgccagtgtcctcccggctacatcggaacagattgcgagacccgaatcagcgactgtgcggccatgccttgtctgaacggaggagcgtgccacgacgataaggaacgccaccattataggtgcgaatgcatgaaaggatggatcgggacgcactgtgagaaggaaaccgtcacttgctcggagaaaccctgcatgcatggcacgtgtaaggatacgagcttggggtttaagtgcgaatgtccgattggctacagtgggatggcctgtgaagttcaggtcgacgaatgcaatccaagtccttgcgagaatggcggcacttgctttaacaaaggcgattcgtttgtgtgccaatgtcccagcggatatagcggtactcgatgtgaagtgaatatcgacgattgccagggtaatccgtgcatgaatggtggatcgtgtgtcgacatggtcaatcaatttcgctgccagtgcgtaccaggtttcatagggtctctatgtgaaaataaggtagatttgtgtctgacaaagccctgcgccaacggaggtacgtgcatcaacctgaacaacgattaccgatgtaactgtcggcccggattcactggaaaagattgtagcgttgatgtggatgagtgtagttcttcaccgtgtaagaatggcggaacatgtgttaacagagtgaacagtttccaatgcgtctgcgctggaggcttccgagggtcgacttgtgacgaggaggctttatcggccagttgggactcggctacggggagtatatcagctcatgtcgcaagtggacaccatgaagctcaaagtggccgaagtgacggcctcagcagtggacaaattgtgctgattgctatattttcggtcgcaacgcctttggccgcttttattgcaacagctgtggtaatctgtatgaaacgcaaacgccgacgtgagcaggagaaagatgacgctgaagcacgaaagcaaaacgagcaaaatgcttcgcatatgacgcaccaccatcaccataattccatgtcttcgtcgaaaagaagcagcaacagcgccctcaccaacctggacacatcgcatcatatgatcaaaaacacctgggacaaaagcgttaacaatatggccacttcagccagtttagacgagggctgtctaatgaatagtagtttatacggcggaattcccggcggttatggtgagacaccttctgctagtagcgagcaatgctaccaggcagcagcagttcctactaccttgcaacgtgccaaatctcaaaaacaactcaacaccgacccaatggtgatgcaccgggcgtcgcaaatgattgctggaggagccatcgggggaggagcacaatcgtcgcaactggctgctggcggctcgactggtgcagctactcctactacctcatcgacagcagcagcggtcagtaccaaagaaatgctgctggaaaaacggatatccgttctttccgatgccagtttatgcaacactcggtggagtagctctcagcagaacaggcagattgtcggcccatgcagtccgccgcacgtgtaggattttaaattattaacaactttttttttgaaatagatctcccgcttatcacctaaaagtacgtgcaagacgtattctttgtaactaaagttaactttaaattattttcttttatattgcactatttagaacaaatcagtgaaattactacaagaatgaattcgttaagttcgtttaggattccaaagcacgttgtaaaaaactacaatatattcaaattttacttagctggtcattgattgaacatatagaatttatgaattgtaaatcttgaattatatttatcaaaccgaccaagcatagaagctttcactaaaaacgattatgagggaatgagcttgtttttagaaaaccgagattcggacagaaataaagttaaatctacctgt

SEQ ID NO: 26 - DNA, 4008 bp, Aedes aegypti
atggtctcgggaaccgcgaagctgattaaggtttcctcgtcgggcttcttcgagatgcaaattctggagatagccaacaccaatagccatctactgtccggatattgctgtggtctgccggcgacgaagcagcgattacagacgaccggatgtccggcatgtgcaacggcttttcggttgtgtctcaaagagtaccagggcacgacgtcatcgagcagtggccagcagcagctgaagtcgcagaagcagcagggcagtagtagtgcagcggaagccctgctgctggccgacgaaccgcaaacggctgcctcgtcggccatgtatgggtgtgcctttggcaatgccagcacccccacgctagggggctcgagcttcgtcctgtccgactcggaagtcggtcgggtcacgctgcccttcacgttccggtggacgaaatcgttcacgctcattctgcaagccctggacatgtacaacgagtcctacccaattgccgaccggttgatcgaggagacttcgttctccggtgtcattctgccgtcgcacgagtggaatacattagatcacacggggaagaacgcccggatcacgtatcgggtccgggtgcagtgcgccgacaactactacaacacgacctgtacgacgttctgccggccccggaacgaccagttcgggcactatacctgcggcgagcagggcaacaaggtgtgcctaccgggctggcagggcgccaactgtgagcaagctatctgcaagccgggatgtgaccaaattcacggcaaatgtgaccagcccgggggatgcgaatgtcggcccggatggcgggggccgctttgtaacgagtgtatggtctacccgggctgtcgccatggctactgcaatggtagcgcctggcagtgcatctgtgataccaactggggcggaatcctgtgcgatcaagatctcaactactgtggaacgcacgagccctgcatgcacgggggaacctgcgagaacaccgctccggatcagtaccggtgcacctgtgccgagggcctgtcggggactcgctgcgagatcgtggagcatccgtgtgctccgcagccgtgccggaatggcgggacctgcaccttgaccggaagtggtctgggtcgcggttcggcggcggatgacaaactggccgcggcggaagcgacgagcactacgccgatcatagtgcgggggatgcgagggatgagttcgatggggaagccgttcgggaggagtagcggaagtgggggagggggaggtgacgggtcgtcgtcgagtaaggaaccattgttgcagccgcagccggtcaaagatttcatctgtagctgcgcgcccggatggaccgggccgacctgcgagataaacatcgacgaatgcgcggaaggaccctgtcagaacggtggaacctgcatcgacatggtcgggaaatttcgctgtgaatgcccaccgcaatggacaggggaaacctgcaatatcgacgtagacgagtgcgaaacgaacgtcgcctccgggctggggccgtgcatcaacgccgagtcctgccggaacctgcccggatcgttccagtgcagctgcctggaaggctggggtggtccaacgtgcgcccagaacctggacgactgcgtaggccggtgcaaaaacggtgccacctgcatcgatctggtcaacgactaccactgtgcgtgcgccgtcggttacaccggtcgtgactgcagtaccgatatcaacgagtgcgccaacttcccctgccgcaacgggggcgagtgcgtcgatctgatcggcaacttcaagtgcatctgcccgctcggctactccgggacactgtgtgaggaggcgaaagaccactgcacctcgtcgccgtgcatcgaaggacggtgtttgaacactcccggcgggtactactgtcactgtccgccgggtcgagctggcaagcactgcgagtatctgaggacgccctgtgattctccgccgtgcttaaacgatggctgtacgatgacgaacgaaacctccggttcgacggcgctgaccccgtgtagcggccgtgggaaatgcgaatccagcacgttggggtcgagctgcgtctgtcagaccggtttcaccgggcccttctgtcagcacaatgttaacgagtgcttctcgaatccgtgcaagaacagtggaatttgtatcgatggtgacgcggattatacctgcgagtgccctcccggatggaccgggaaaaactgtgcggatcgtgccgtgcagtgtcttcccgggcagtgtctgaatgggggttcgtgcatcttgtcgccgatctccggcatatcgcagtgccggtgtactctcggatggggcggcccgttctgcaacgaacccgtagatcagtgccagggtcaaccgtgtcacaacggagggacgtgcgagtccggtcccgggtggttccgctgtctttgtgcgcggggcttctccggtccggactgccgaatcaacgtgaacgagtgctcgccgcagccatgtctcggtggagccacgtgcaaggacgggatcggaggtttcacgtgcctctgccccgtcggacggagaggcgttcggtgtgaaattcttctttcggacccctcgtcagtatgctcgaatacaacgaccaactcgccgtacgatcccttggtgacgagtgactcttcaacgcctactgcgccgatcgacgagagcaactgcaactcgtgcgtctgcgtcaatgggaagcctcgctgttcgaacatgtggtgcggcctgcggaactgtttgaacaagaatctgtccaacagtgcatgtgaaagtcatcaggtttgcgtgccggcagcgcaggaaagctgtctggcgccaccgtgcgcaccccgtggagactgccggacatttgagccgtctcggagggttgcccctccgcggataccggcacccatcgattgttggccaaatcaggctaccctcggaacgcactgcgcgcggatatcgatcctgatggagctgaaccgactgtcgcggggcacttctgttgacggcatgtgtcatctgctacggcttcagcttggcgagaaactcgtcaagagcccctcgatcgacgttacggtcttcgtggtggtgatgtgcgatctcaaaaccggcaccaacgacacgatcgaagtaactctgtctactccgacggacaccagcaacagtgcgtccagccctctgacggaagccgttcgccttctggcggagatcctctcgcgtcagcaaggcgtccagaacgactcctttcagacggacgtggccgaggcagctccactgacttccatcctggaggtcaaggtggaaacggcgctgattaacgaaaccaacgccggatcgaactacctgatagcggtaggcttcggcattgccatagtagcgctctgcgtaggcgccttcgtggcgctcgtctggcgccaaaagctccaaagccacagtggctccggaacgaatctcaccccgcacatggacttgtctcggagccacgaggaagagaagagcaataacctccaaaatgaagaaaacttccggaggtacgctaaccccctcaaaggcagtgccagttcgctgcgaggtgccatggaactcagcctaaacccagcgccggagatcaaccaaatagccggcccaagcacggtccatcgatcccagcagctgtaccccagctgcggcaacgatgccgagttcgagaaggatcctgaaaaacaaaaggccgccaatcgaaactcgcacatcctgctgcacaaaacgcaaaactccgacatcaccaagaacattgtcagctcgatcgagagccaacacaaagactttggcaagcgaagcatcaacgagcacacggcgcccggaggcgtcgcgatgcccccttccacgcccagtagtgcctcagtagtaatgccagtgaatggcgcagtagtggtaagtagcgtagcaacggcacccagcagtacggcgcctactgcgatgattgattccgatgttctcaccgtacatgtgtaa

SEQ ID NO: 27 - DNA, 1975 bp, Aedes aegypti
agacacgtccggacaccactcaaaatgacacgaacacacagattcagcctgctctcggcgtgtctgctacttctgctgtgcagtactagagtaaactctagttattacagcggtggcggggcaagtcccgcgcctcatctaccggcgataccaaaggacccgcattcacgatgcgaagaaattaccattccgatgtgtcgaggcatcggttacaaccttacctcatttccaaacgaaatgaatcacgaaacgcaggaagaggccggtctggaggtgcaccaattctggcccctggtggagatcaaatgctcaccagatctcaagttcttcctgtgctccatgtatactccaatctgcatcgaagactaccacaaaccacttccggtgtgccggagtgtgtgcgaacgggcacgagccggctgtgcacccatcatgcaacagtacagcttccaatggccggaacgtatggcctgcgaaattctgcccgtctccggagatagcgacaacctatgtatggaacaacccagcgaggacgatggcagtcactcgtctggtggtggaggaggcggaggcagcagcggaggttcgcactctaaaccaacccgcaaatctcacggatcatccgcgggtggtgcctctggccagaacaacaaatgcaagggcaagaattcaaaaaactgccaaaatcccccaggggaaagaacaaaagagtgcatgtgccggtgtcgggagccactggtgaccctggggaaggaaaacctactgcacaaccaaagtgtcgaaagggtcggcgacgtaataaactgcgcgatcccgtgtcggggggcgttcttcagtcaggaggaaaaggacttcgccggggtgtggatcgcgctttggtccggcctttgcggcataagcacactaatgacactcaccacgttcctcatcgacaccgaaaggttcaaatatcctgagcgtccgatagttttcctttcggcgtgctatttcatcgtgtcctgcggttatctaaccaaactcttcctcggacacgacgaaattgcctgcgatgggaaagcgatcaagtacccctcaatggggcagagttcatgtacgatgatcttcatcatgatctacttctttggaatggcttcgtctatatggtgggtgatcttgtcatttacttggttcctggcagcaggactcaaatggggcaatgaagcaatctcgaagcattcacagtacttccatttggcagcatggttaataccaactgttcaaagcgtttcggtgctgcttaggccagcagtagacggcgatccaattgctggaatctgttacgttggaaacacttccgtagaaaacctgaaaaactttgtactggcaccactgtttgtatacttggtaataggaacgaccttcctgatggcaggatttgtatcgctcttcagaatacgatcggtaattaaacaacagggtggtattggagctggatcaaaggcagacaaactggagaagttgatgatccggatagggatcttcagtgtgttatatacggttcccgccaccatagtcatcggctgccatctatatgaagcaaacttcacggaagattggatgaccgggctaacgtgcccttgtaaggcgggaacgggaatcaggcagaaacctttgtattcggtgttaatgctgaaatatttcatggcactggccgtgggcatcacatctggggtatggatatggtctggcaaaacggtagaatcgtggcgacgactttggagaaggttgttcggttcaccggatccaaccggtgccggacaggtgctgataaagccacggccaccactcccgcagccatatgcaacgtccggaatcggagtccccggttcagcggcagcttccctacttgccactccgtacacgcaaaccgttggcagcgtggcgtccactagtcatcaccatctgcatcaccatgtactcaaacaaaccccactta

SEQ ID NO: 28 - DNA, 8422 bp, Aedes aegypti
tctggacaaatttgcccaacgctagttataatacgttttaagaaataactaaatgggttacgtagtcattcatccagatctcgctgagggtggcaggttcaaaattcgtccggtcaagaagcctcttaggttcgaaattttctctactcttcagagtatactgtgcacgcaatatacagatgcgatgataaattaacatagttacgtagtcaattgacgaacctcacagcagaagtgctagtagaaaactgctgaaaagccgtctctgttccaattgggacgtaacaccagacagaaagaattccaaaaggcttctgaataccgaatgacattcatcgtgtgtcatgcgaataaaaaaaaacaaaatccttcaatgaagccaccttaggctacgttctgacgcaaactacgcgcggaggccacgcggcggattcccatcatagtacgtacttacttacagagtgatgtgtacagtcgccgcacggtatctgcatatctatgtattacctgccagccaaagcaaagccaagatcgcggcgcgttgttttagtagagcgcgcgccttcgttttgtttgaatttacttatatgaatgttacacagcagtcagtatagcgtagtggtaacagcaacagcaacagagaccgatttgaaggccagccgcattccagagcgttgtgatgttaaagttctccgggttgactgctgctacgctatttgggctctcacagtttaagtcgattcggtttgattctctcgcgagtcattggattctctttgcattgcatgagctagatctcgcgcgagcactccacgtcaacggactaagcgcttcgctctccacggtttcgatcgtacacgcaacagaggctgctctcacaaagtgtttccaccagaaggtgaacggtacgacgtcgcgctcggtcccgcaaaagttcgagatttgaattgttgggaacggtttttttttcttcattgccgctgctgtacacagcgagatatgtgaagtcgtcaagcggttaagtcggtcgatatttgagccgcttcaagtgcagtgataatttgaattccagtggagatttgaaactgaaaacttccaaaacagagagaattactgaaaattaaatagtgtgacgattataatcaaagtgatgaaatctttcgtaaaagttagttgcagctggtaacgatgcagcatgcgagctttgtgcactgtcagcgcgcccctcgaggtttgcgcaccaccgtcccgccctctgcctccgggtaccagatttctagctttaaaattattaggaacaccacagccacgtacactctacttcctagtcgaagcaaaaagtcgcgtccgcgaagtatacgcacaaacatgccatcacttctccaaacagggcatgctggacaccgaactgtttggtctagccgtgctgatagatggcgaatacttgtttgccgaccccgagagcaagttgtccaaatacggaccaaaaagctggcgttcgtcacatacgcacggcttagacgcaaacggcaaacctctcctggaactacacttccgtgtgcagttctacatcgagagcccactgatgctaagagatgaagtgtcccgacacaactactacctgcagctcaaatacaatgccatcaaccgggatcttccgaaagaatattccgagcaatcattacttctcctcggcggcctttcccttcaggcagatcttggcgattgtccggaagagaatggaatcgttgtcgatggaaccagcagtacaagcggcagcactagcaactctagtagtacaagcggaactaccactagcacaaccacttctggcaatggttgtggcatcagcaacatcaacaacagcaacagtggtagtaccaatagcaatggtagtactagtaccagtaatagcaacaacaataataacagtatcactagcactagtagcagcactagtaacaacaacacaatcacctgcaacggtagcaatgaatacttcaggccggaagactacatcaacccatcgctgcggtcagcatggggcatttcggcactcaactcttgccatcgggaaaaccgcggaatgtctcgagctgatgcagaaacccactacataagagaggcttgcaacctcaacgaagccatcaacgctcatgtgttccgcatgaagcagaacaagaacgaaaccggcatgggctcagtatcgctaagtatctacgcgaaaggaattcgtatcgcggcggataactccacggcaaccacgttcaattggcccagcatcggcaagctgagttttgataggaaaaagtttgaaattcgctccggcgaaacgaaaatcacactgtactcggttaacgacgacaagaacaaaatgatattagcattgtgccgggagacgcatcaattttccatgaaaattgctccacgtcttacagaagccatgaaacgagaagaagaggaaagtagctgcattcacggctacccatacctgtactctcgggcactgaatctaccgtacaaaagcaaaagtgaccagcgaatatcggtcatttccagcacaagctctaatactacctccggtattgtaagcgatcgagttcattccgaagatgaattggaaataatcatcaatacgccacctacagcaacactcgcagccccttcgacggaaagtctagcgctagctcatctactcgattgtcctagcgtaagccggcaaacttcttccgttggacaggtgtccctcaaggatctagaaggtacacttgcggctttgtcaatgcggtcgagtaccactgttcggtcagtatccagcaatgaaggaactgatacgaaagaaagaaccgcgaaggaatgcgagtcttctccgtcatcgcaacataatattggatcacaatgttcgtcgacatgcagtactgtggtcgttgctaccgattgtataagcttacctcaaaacaacaccaggggttcaatcgaacgacgtcagacatcaacgtgcagtagtttagaacttggttacagtcatacggcccagaacagtacgctcagcgtggcaactagtacttgtatagatcatgacatcaacgaggaagaagaggaaaccaattcgggagtctatacactggctcatgcgcctcccacggaaaccagtggagtgtacacaatgaacagcagtgaaatgacgggtcagtcttcagagattgcagaatcagagtcacacgaaagctctcactacggtagcttccaaccatgccaaagtgagctagctgaacctctggagccagtcgactcggtagacggagattacagaccacgtttggacagcgatatcaacgagttccgattacgatcagattctaatgtgtctgcagcaggttcattcagaggcgatggaagtgatccaactgacaataaacacacactgttgagtgcggaagaattgaccgatttgatcgtaggtcgagggacatatccatcgagaaaaacagtgagccacactcttgattccgattgtgattacgtgacgttgccgttgccattggagggcgaaagttatcttcaagggagcgaagacactgctcctacggaagatgaatatgatgacgagattctaccccctgctcctccgaagagaatcgacagcaacatgccagcacagcggcaatcactattgaatctagttagctccaatgattcacctcctccaccacctccaccttataatgcgcatcacgaaaccacgggcttgcgtggaccagatattcgtccagacgaagcgcccgtcattcctcttagggaccctcctccatatccccaaaaaccaacaacgatagtaagggaacgatcagttccgcctcccgtcattccggtgtgtgcatcgtctagcatacaagtatctgctataccagaggaagtcccggcacgttttattaccactaggtctcagatcaacattctgaaggctcataccagtgtagttggcgaaaccgcaaagccaagctatgcggcaccaacagtcaacaacatcagtaatctatcgcagtccccacttcccacaacggttacgacaacgtcaacgacgcccagcgcacttggcataccggtcgttccataccacaaaagcattacctcgcctccaccaccatatccagaaatgccgaaaccaccgcatcgaacatgcgtcttgctaccggtgatcaaacctcgacaatatcacccacctccaccaccatcaatgccacgacaacctccaccaccacccccagctcattcactagctactgtgtataccgggcaacttgcgcggtcccagatcgaactatatcaacaacaactctacagtgacgtagattatgtcatctacccgatccaggatccctcaattagtcagcaggagtatcttgacgccaaacaaggttcaatactagcagcaatggcccaaagtccccctccaccaccgtatcttgcctatcacacagttcgagcccataaccgaagctgggaagcatgcaagaaccatgccatctatagaagcaccccatatctctctatggcattatcatcaaactcacgttacgcttctacacaaaacctttccgacacctacgttcaactacccggagcgtactctcccttatacagcccatctgtggctagcctttgctcatcatatgaaccacctccaccacctccgttacgcccaagaccagtatccagtagttcgtcgtccatgtttgtgagatctcgatccgacgacaacattctaaactccgtcgaaagcactcccaaaataaggcgacttccacctccaccaccaccaccaccatacgaatcaagaaaaactactcgaaagccaccgatacctcttcctactcctgagaaacaaacgccaccagctgtgaaagctgtagctaccatatctaaacctccagaagtcccagcgaagcccactcccacgaaaccatgtggaccgagtgcaaaactacaagctcaaatcaggaagcaatatccggatatcgatttcagcacatccatcgacattaggactctgcgggagaaaagcaaaaaccttgatcttcccctcatatctgccctaatgcatgatcggtcccttttgaaacagacgcgggccttcgtaatgcccaaacatcccaaagctggcctcaacagctcacccaatggcgtcagcaatgtcgccaataccagtcccagccagcagaatctcctgaaccacaagaccaacaaatatccggtgtccggtctgagcaccacccagcttgccaaaccccgcaaatcatctatcgtgagccatcggcatccgaatgataagctgccaccgctaccgggtcaaacggcaaccgagggtaacaactacgtgatggatccatcgactccggccaagcaaaagagctacagctcctcacaacccagtgcctgaaatttcagtatcaacacaaacgcttggccgtcggttgactattgcagccatcaacgtcgttgtcagatcaaatacgataattttacgctgaaaacgatagacttttacatttggaaacctattgtgtcatgctaaagctaagatagtagatttttgtcatcttaatcgggagagaaaagtttgtgttacttgcatttttataaaatggacctataatttgttgtactactttctcctttaggataaaaaccaatccatgaaaatcgaaaggaagttttggaacgaaactctgtacgtactctgtctctttccaaaaatgaacattatcgctgttaattttgatcatatgtagtaattctctctgtcaaaagacacaccaaacacctccatcgttccatgctttctttcggttttcaaatccatagtgcgagctaaaatcggccgaatgtcagctcacgaataacaagcatctaaacacggacacatattagattgctaacacaaagtatctttctttagtggaatgtactcaggatatttttataaaaacaaaactcgttctctgatttgagtgtaagtgtgtaaattggttttagcaaaaagagaagtagaaaggcacacatagtatcactgttccgtaaacagaaatatctaataggtataaaattgtttatcgatcaactatttggcattgaattctttccgaaccttaaaccgtttcgaaaatattccattaaattcgtgccaaatttatccgctaagtagagttcatcctaatcgtatcgaaaatctgtagaatagatagagtaaattgaaagcacatacaaggaggacaagactaataatgacttagaataaagcaactttaagaagtgaatgcaaagcaataactgaaaccctctgtcaccggaatgttgacggacacgctgtataaatagaattgatctacctatctagaaggaaaagcccttgtaattctggaaaattggaacaaaaatctcgaagaatcaatacactcaaagtgagtcgccatatttatttgttactgcaagaggtgaaaaagatttagccaagaatgagcgcgaagtagaaatgaatgagtgcgcttgtgaggagaacattttctttggataagcagaaacccggttaatacaaaaaatatagtgagctagacaggggcaagtttatgatcatagtacatttttgctcaaaatacctattgtaggcaacctttggtgtaagtggtgcacatgtgcattggtttaggttacgttgaattttatttaaaatattttattttaacaccgtttcgagcgagagataatggcgtgtattttttactagggaaccattgacaaaagaaaacgagtacgaactgtttctagggagtagtaaagtaatcgttatgttttcctatagatattttaaatagttttttattaacattctctctactcaacacaacacagctaaggttgacatatgtacagaacaggctagcgagataagctactagtaggttagaaactatttgaattttcttctttataagaaaaaatccagaaaataaaatccaaaatgaatcaaaaacaaacactatattgctgttctgttgtctatttatgtaatctcacaactgtcgtttccaaacttttgacgttgaactgttggaaataaacgcgctccttcatcatggatgcaccggccacaacttctccactgtagaacatcgcggtcaagtccagggaaacatttttcaagctgaaatttgttattgatgcaaaagaattcctcctcggataccatcgctgaataaccagaatgtcatttttactcgacttgacctccgcattaggaaggctttggccttctttcattactgcattaagataaatcgaaggcgagcgtttcctcagcgcaatcatttcaagcacaatatccagatgatggtaagatgctgaggaactctttggcagccacggtaacgtgcctcgtccggtaaattgattttggtttccactccaactcattacgggtaactgatgcaagtgttgcgtttcttcatgttccttatttggatcatgtacctctgctaaagcgatttcgtctccatagaaaatgcttgatgttcctggtagcatcagttgcattaaagtcgctgcaagtgttacattcgaattcattccagaagataagcgtctttcattgactccacctaaactccaatgcacccatgggtgatcggctcccttgagcaatgttccgtcaacagcagcacgaaccgtgttagcaatcgcctccgttccatttgtgacatccaagaaaacatccaccaaatctatttgattcagtacatctcgcactattgcttccggaactttatcgatgaaacttttgctgaccatcaatactctgtctccccccagagtatacttccactctttgatattctccagtagcaaaggatcttcagaaaattgctccaaacccttgatataaaatccatccactccaccctttgctaaccagaacatcaaaacactagtgatcacattctcctctcccgcttttatcgatctggccagccgtaaaaattcactcgtcggggtgtcatcggaagttctgttcggcaaatgatctaagtccagagttggaggattcaaatgagtcacgaacggatagataggcaaatccaagatcagcgatatgttcttctcgtgcaggacggctgccagtttttgcaagtcttccacctttcccagcacctcatcgatggccgtcagcgatgtcacctcctggaaccggtccggatagtgtgtcgaggggaaaattgaattcaaacggactgctccgacgcccagactctcaaagtagtcagcccggctgatcaatcctcggatgtctcccaaaccatcgtcgttggtgtcctggaagctggctgggaaaacctcatagaaaacggagcccttgaaccagggcact

SEQ ID NO: 29 - DNA, 8481 bp, Aedes aegypti
atgggagatagtacgatgggttccgttagcttcctccatctgggggacattgtttccctgtactcggagggaagcatttccggctttctgagcactctgggcttggtagacgaccgtgtggttgtctgtcccggagcaggggatctgaacgatccgccggaaaagttccgggactgtctgattaaaatatgtcccatgaatcggtactcggcgcagaagcagttctggaaagcggccaaacaaagcaccacaacgaatacggataccagcctgctcaagcggttacatcacgccgccgaaatcgagaaaaagcagaacgaatccgagaacaagaaactgctgggaacggtcgtccagtacggcagtgtcgtacagttgctgcatctgaagtcgaacaaatatgtcaccgtcaacatacggttgccggctctgctggaaaagaacgccatgcgtgtctatctggacgccaacggtaacgagggttcctggttctacatcatgccgttctacaagctgcgctcagccggggataacgtagtggtcaatgataaggtcatcatgaaaccggtcaacgccaatcggcaaaacttgcatgtcgccgccaattatgagctgccggataatcctggcagcaaggaggttaacgtactgaattcctcgtcctcttggaagattacgttgttcatggaacatcgggaaaatcaagaagacgtactaaagggaggagatgtggtgcggttgttccatgccgagcaggagaagtttttgacgatggatgagtacaaaaagcagcaacacgtgtttctgcgaacgacgggtagaaccagtgctaccgcggccacgagtagtaaggctttgtgggagattgaggtcgttcagcacgattcatgccgaggtggggcaggtcattggaattcattatttaggtttaagcacctagccaccgggtactatctggctgcagagattgatgatgacatatcacgcacagagaagtccagcaattctagtcacccgcaaggtgaatcgttccggttggtatccgtgccccactcgacggatattgcatcggtgtttgagctagattccacgacaatcactcgaccggaaggacttgtgccgcaaaacagttatgtacggatgcgacatctttgttccaatacctgggttcatgcaacgtcttcgcctattgacgcagatgaggacaagccagtaatgtcgaaagtggggtgctccgccataaaagaggataaggaagctttccaattgattccagtttctcctgtagaagtgcgtgatttggactttgccaatgatgcctgcaaattattgcaagctatgagtaccaaattggagaacggcaccatatcaccaaatgagcgacgatccctgatcgctctcctgcaagacatagtgttcttcatcgccggccaagaaaatgagcagaacaagagtgatgcccttgatttgacgatcaataatcctaatcgcgatcgtcaaaagttgcttcgcgagcagtacattctgaaacaactgttcaagatattgcaaggtccattccaggaaacgaagaacaacgatggaccgttcttgaagatcgatgaacttggcgatcctaaaaacgccccctacaagaacatcttccggttatgttatcggatactcaaacttagccagcaagactatcgtaagaatcaggaatacatcgcgaagcacttcggtctgatgcagaagcagatcgggtatgacattctagcggaggatacgatcacggctttgctgcacaacaatagaaaactactcgaaaaacacatcacggctgctgaaattgaaacgtttgtcggtcttgtgcggaagaacatgaacaactggcagtcccgcttcctggattacctatcggatctttgcgtgtccaacaagaaggccattgccgtaacgcaggagttgatttgcaaaagtgttctcagtgccaaaaatgcagatattttgatagagacgttcctgcgagaggtcgatgatgaacggttgggttatttgaatgagttggaaaggggtaatcatcagttcaccgagatccgggaggtggacgaaactattgagattgaaaataatattaatgatgtattcctagaaaatgtgtgcctcatatctacccggaattctctcagcctgacagtgtcaggaactcctccacgtttgttacatttgagaataacacaatcgaaatccatgagtcggctggcacagggactgaaaattggccgcacgcacgacatatccatcatggagtactatcggcaccagctgaatctgttttccaacatgtgtctgaaccggcagtacctggcactgaacaatctttcgccgcacctggacatcgacctgatactgcgatgcatgtccgacaaaactattccgtacgacatgcgggcatcgttctgccggctgatgctgcatctacatgtggaccgtgacccacaggaaccggtgacgccggtcaaatacgcccgcctgtggtcggagattccttccgttatgtcaatcaatgattacgacatcgagaagcaaccggacagcaacaaagaggctgtacgagcccgcttcaacaaaaccatcgccttcgtggaggactacctgtgcaatcatgtggtttcgaaaatgtggttcgccgaccaggatcaaaacaagcttacctttgaggtggtcaaactggcccgggatctcatctacttcgggttctacagctttagcgatctgttgcgactcacgaagacgctgctcaacatcctggattgcgtatcgaatagcgacgctgacggaagtgcacaaccgataacaagcacctcttcacatcgaaatctttgcgctgaaggcggcgtgctgcgaaggatcggtgacatgggtgccgtcatgacttcactgaccctggggccgatctccaccgctctcgtgtcccccaacatccagcaccgaaagtccgtttcccagtacatgaaagaatatccgctggtgatggacactaagctgaagattatcgagatcttgcaatttattttggacgtccgtctggactaccggataagttgtctgttatcgattttcaaacgggagttcgatgagaatgagcaaacggcaagcagtcaacaggttcaaccgactcccccaatggctcaacccgttgttcctacggttccatcgtcatccactgaagaaccgctaattcctaatcaatcaacgacgccggcacctgctacggctgaaaatataaacctccgtcagaagaacatagatctcgaatcaatcggtgttcaagcggaaggtattttcggttgtaacgaagacacctataacccactggatctggacggccaaggtggcaggacattcctacgcgtactgctgcacctgatcatgcacgagtatcctgctctggtgtcaggggctcttcatctgctcttccgccacttcagtcaacggcaagaagtgctacatgccttccgtcaggttcagctactggtatcagacagcgacgtggagtcatacaagcagatcaaatcggatctagacgtgctgcggcagagcgttgaaaagtcggaactatgggtgtacaaatccaaacaatccgatgagttgcaacaagctgaaggcggagaggctaccgatggataccacggtcccgaactgaacccagagcaggctgctgaatacaagaaaattcaacagattttgattaggatgaacaaattatgcatcacaacagcaggtcccggtgaagtcgtcaaaccgaggaagcacgaacagcgattgctgcgaaatgtgggagttcatacggtcgtcctagatctgcttcaaataccctatgacgagaaagatgactaccgaatgaacgagttaatgcgtctggctcacgagttcctgcaaaacttctgcttgggaaatcagcagaatcaaattctgctccataaacagctggatctgttccttaatccagggatcctggaggcggaaaccgtttgtgccatcttcaaggacaatctcaacctatgcaacgaagttagtgataaggttgtgcagcactttgtgcactgcattgaaattcacggtcgccatgtagagtacctcaagttcctgcagacgatcatcaaggcggagaaccagttcatacgcaagtgccaggacatggtcatgcaagagctggtcaacgcaggcgaagatgtgctggtattctacaatgacaaatcttcgttcaactactttgtcgaactgatgcgaacctacagcagcggggagctgaccgattccagtccattaatgtaccatatcgaattggtcaagctgcttgcctgttgcacgatgggtaagaatgtctatacggaaatcaaatgcaatagtttactggcgttggatgacatcgtggcaatgatatcgcatccggactgcatcccggaggtgaaggttgcgtacgtggatttcctgtgtcactgctacatcgatacggaggtcgaggttaaggagatctactcttccaatcacatgtggtgtttgttcgagaagtcgttcttgatcgatatcaacaatgtggtgaagggaggaagctacacaaatcgtcaattagagaattatgtctgcaacgaaatcatgaacattctgacgacctttttcaacagtcaattttcggatcaaagcacggcactacagaaacggcaactaattttcgtaaagatcctgcagtcttccttcaagctaacgcaatgcaaatggctgtccccctcacagcgattcaacgtggaaaactgcatacgcacgctttcggaaaaggcgaaaccacgtggcatcgccattccgatcgacctggagaaccaggtggtcaaaatgttcaacaagaccgcactgctgtcgcgccagaccagcaagtggctgctggtcaccaagcagaccaagatggagcgatcgcagtcgcagatcatgcggatggatcgcagcataatcgagggccttcaggacattgtttcgctgctggaggacaagctgaaaccactggtggaagcggaacaatcattgctggtggacattttgtacaaatcggaactattattccctgttaatacggaatcaaggaaaaagtgcgaaagcggagactttattcgtcatttgatcaaacatacggaaaagttgctagaagagaaggaagagaagctgtgcgttaagatattgaaaaccttgaaggagatgatgacaattgactgtgactatggcgataaaggagatcacttacgaacgatcttgctgaagaggtactttgggcatgagtttgttcaaccgacgttacccgcgatagctggagaactaacaaaaggcatcgagcagcaatctggtccagctggtctacccttggccacgattagtcatggacctggagcaaagtatcttattcgcgcaggaaggacgttacacgaggttcagaacgatttggacaaggagggggcaagtgatcttgtgattgaactggtaattaaatctatcaactcgccatcgatattcgttgaagcgatcgagctgggaatagcactgctggaaggtggaaaccccataattcaaaagggaatgtacaataaatttctgagcaacgatctgagccaatctttcttcaaggtattcttcgacaagatgaaagatgctcagcaggaaatcaaatcaacggtcacggtaaatacttcggatatggcagctagcaaggcgaatgagagtaaatccgatggaaaggattttgataaaatccagcggaagaacgtgaacaaggtgaatggaattgtgataacggatgagttcaaagaagagctgcagaacgcggctttagttacacagcagtcctacataaacgctaggaacttagcagcggcctcagatggaacaaattctgagaacggcgatgacagtgcccttatgagcatagggacttcggctttggaagacatcctggctgaaaagttggagaagcataaggataaggacgaaaacaacaaattgtccaacaaagtccttgttatgcaaccaattcttcggtttttacagcttctttgtgagaatcataacccagaactgcaaaacttactgcgaaaccagaacaataaaacaaattacaaccttgtctcggaaacactgatgttcctcgattgtatttgcggatcgactacaggtgggcttggtctcctgggtctatacataaacgagaataacgtgtctctgatcaaccaaaccttggaaactcttacggaatattgccaaggtccttgccatgacaaccagaattgcattgccacgcatgagtccaatggattggatatcatcactgcacttattctgaatgatatcaacccgttgggcaagaatcgaatggatctcgtattggagctgaagaacaatgcttcaaaactgttgcttgcgatcatggaatcccgaggggatagtgagaacgcagagcgaattttggccaacatgaaccccaagcaattggtcgatgtggcgtgtcgggcctaccaccaggacgaaaatatcctgctactgctcaatcagggagatggaaatggtgacgacaactatagcatgaagcatgacctggcggatgaccagaacgatgatgatgatgtgggcgtttctccaaaggaggtcggtcacaacatatacatcctctgtcatcagcttgcccagcataacaaggaactggcaaatctcctgaaaatcgacacctataatcctgcagctactaataatgaaagcagaagcgcactactcttctatcaaactcacacggcacagatcgaaattgttcgacacgatcgcaccttggagcaaattgtgttccccattccggagatttgcgagtacttgaccaaggatacaaaagtgcgagttctcaataccgccgaacgggatgatcagggcagcaaagtggcggactttttcgaccgtcatgaagccatgttcaatgagatgaagtggcagaagaaactccgtgggcagccggctctgttctgggtcagtagttacatgtctctgtggagcaatattctgttcaatttggccgtgctgatgaatctgattgtggcgttcttctacccattcgacaatagtgtgccagagttaagtttccatctatcgtccctcatttggattgtgacgctcgtgtcattggtcatcgttatcacgcttccgcggcaatcgggcattcggacgttcgtggtggcgcttatattgcggcttatattttcctgtggaccggaaccaactgtatggctccttgggtgcattacagtcattatgaagggtgtgcacatcatcagcttgatggggaattatggaacgctggagaagaacctgctgtcaattattacggatgcagaacttctataccatttcgggtatctgtcgttctgcgttttcggtgtgctgctacatccgttcttcttctcgatattgctattcgacgtggtttaccgagaggaaactctgctgaacgtaatacggtcggtgactcgaaacggccggtccattatattgactgcagttctggccctgattttggtgtacatgttctccatcattggatacatgttcttccgggatgatttcctcgtcccagtggatgaagagtacgtagctcccgagaccgagatcaccaggtgtaccgaaccggaacgaagtcacatgctgccggatgctctagtcgaaggaagcgagccgtactgtacccaaccacagtccgacgattccggtgatcgaggaggtggagacgagatgaaggaacgaggctgcgattccatggtcatgtgcattattaccacgctcaatcagggccttcgtaacggtggcggtatcggtgacattctgcgggcacccagtcgtaaggaaaccctttttgtaccgcgggtcatttacgacctactgttcttcttcatcgtcatcattattgtgttgaacttgattttcggtgtcatcatcgacacgtttgccgatctgagaagcgagaagcagcagaaggagctgattctgaagaacacctgcttcatatgtgggctgaaccgatccgcgtttgataacaaaacggtcagcttcgaggagcacatcaagaacgagcacaacatgtggcactatctgtacttcatcgtgctggtcaaggtgaaggatccgacggagttcaccggaccggagagctatgtgcatgccatggtgaaggcaaacatccaagactggttcccacggttgcgcgccatgtcattggcagctgtcgatggagacggagagcagatcgaactgagaagtctcaagaatttgctggaaaccaaccacattgccgtacgggaattgactgctcaaatcatggaactggaaaacaagatgaccgaacagaggaaacaacgccaacgtcacgcactgttgaatccgacgacgtcaacgtcctaccagttctatccgcaaatttga

SEQ ID NO: 30 - DNA, 7773 bp, Aedes aegypti
atggcagtcataatattgctgccgcaatcgaaatccatgagccgactggcacagggactgaaaattggccgcacgcacgacatatccatcatggagtactatcggcaccagctgaatctattttccaacatgtgtctgaaccggcagtacctggcactgaacaacctttcgccgcatctggacatcgacctgatactgcgatgcatgtccgacaaaactattccgtacgacatgcgggcatcgttctgccggctgatgctgcatctacatgtggaccgtgacccacaggaaccggtgacgccggtcaaatatgcccggctgtggtcggagattccttccgttatgtcaatcaatgattacgacattgagaagcaaccggacagcaacaaagaggctgtacgagcccgcttcaacaaaaccatcgccttcgtggaggactacctgtgtaatcatgtggtttcgaaaatgtggttcgccgaccaggatcaaaacaagctcacctttgaggtggtaaaactggcccgggatctcatctacttcgggttctacagctttagcgatctgttgcggctcacgaaaacgctgctcaacatcttggattgcgtatcgaatagcgacgctgacggaagtggtctcccaaccgggcatatcgattctgaaggcggcgtgctgcgaaggatcggtgacatgggtgccgtcatgacttcactgaccctggggccgatctccaccgctctcgtgtcccccaacatccagcaccgaaagtccgtttcccagtacatgaaagaatatccgctggtgatggacactaagctgaagattatcgagatcttgcaatttatcttggacgttcgtctggactaccggataagttgtctgttatcgattttcaagcgggagtttgatgagaacgagcaaacggcaagcagtcaacaggttcaaccgactcctccggtggttcaacccattgttcctacggttccatcggtcattgtcccatcttcggatggtaccctcaaggagaatacatcggatacagcttcgctgttgtcgacatcaacggtggaaacgatagtggagtcatccactgaagaaccgctaattcctaatcaatcaacgacggtgaccagtcaggaatcgaaaccggaagtcaaaccagatactaagccggcacctgctacggctgaaaatataaacctccgtcagaagaacatagatctcgaatcaatcggtgttcaagcggaaggtattttcggttgtaacgaagacacctataacccactggatctggacggccaaggtggcaggacattcctacgcgtactgctgcacctgatcatgcacgagtatcctgcgctggtgtcaggagctcttcatctgctcttccgccacttcagtcaacggcaagaagtgctacatgccttccgtcaggttcagctactggtatcagacagcgacgtggagtcatacaagcagatcaaatcggatctagacgtgctgcggcagagcgttgaaaagtcggaactatgggtgtacaaatccaaacaatccgatgagttgcaacaagctgaaggcggagaggctactgatggtcagaagcaagataaggataccacgtcgtcctctgtgaaaacgaaacccgagttggtcaaacaggaatctcagttgaactttgaccagggtcccgaactgaacccagagcaggcagctgaatacaagaaaattcaacagattttgattaggatgaacaaattatgcatcacaacagcaggtcccggtgaagtcgtcaaaccgaggaagcacgaacagcgattgctgcgaaatgtgggagttcatacggtcgtcctagatctgcttcaaataccctatgacgagaaagatgactaccgaatgaacgagttaatgcgtctggctcacgagttcctgcaaaacttctgcttgggaaatcagcagaatcaaattctgctccataaacagctggatctgttccttaatccagggatcctggaggcggaaaccgtttgtgccatcttcaaggacaatctcaacctatgcaacgaagttagtgataaggttgtgcagcactttgtgcactgcattgaaattcacggtcgccatgtagagtacctcaagttcctgcagacgatcatcaaggcggagaaccaattcatacgcaagtgccaggacatggtcatgcaagagctggtcaacgcaggcgaagatgtgctggtattctacaatgacaaatcttcgttcaactactttgtcgagctgatgcgaacctacagcagcggggagctgagcgattccagtccgttgatgtaccatatcgaattggtgaagctgcttgcctgttgcacgatgggtaagaatgtgtatacggaaatcaagtgcaatagtttactggcgttggatgacatcgtggcaatgatatcgcatccggactgcatcccggaggtgaaggttgcgtacgtggatttcctgtgtcactgctacatcgatacggaggtcgaggttaaggagatctactcttccaatcacatgtggtgtttgttcgagaagtcgttcttaatcgatatcaacaatgtggtgaagggaggaagctacacaaatcgtcaattagagaattatgtctgcaacgaaatcatgaacattctgacgacctttttcaacagtcaattttcggatcaaagcacggcactacagaaacggcaactaattttcgtaaagatcctgcagtcttccttcaagctaacgcaatgcaaatggctgtctccctcacagcgattcaacgtggaaaactgcatacgcacgctttcggaaaaggcgaaaccacgtggcatcgccattccgatcgacctggagaaccaggtggtcaaaatgttcaacaagaccgcactgctgtcgcgccagaccagcaagtggctgctggtcaccaagcagaccaagatggagcgatcgcagtcgcagatcatgcggatggatcgcagcataatcgagggccttcaggacattgtttcgctgctggaggacaagctgaaaccactggtggaagcggaacaatcattgctggtggacattttgtacaaatcggaactattattccctgttaatacggaatcaaggaaaaagtgcgaaagcggagactttattcgtcatttgatcaaacatacggaaaagttgctagaagagaaggaagagaagctgtgcgttaagatattgaaaaccttgaaggagatgatgacaattgactgtgactatggcgataaaggagatcacttacggacgatcttgctgaagaggtactttgggcatgagtttgttcaaccgacgttacccgcgatagctggagaactaacaaaaggcgtcgagcagcaatctggtccagctggtctacccttggccacgatcagtcatggaccgggagcaaagtatctaattcgcgcaggaaggacgttacacgaggttcagaacgatttggacaaggagggggcaagtgatcttgtgattgaactggtaattaaatctatcaactcgccatcgatattcgttgaagcgatcgagctgggaatagcactgctggaaggtggaaaccccataattcaaaagggaatgtacaataaatttctgagcaacgatctgagccaatcgttcttcaaggtattcttcgacaagatgaaagatgctcagcaggaaatcaaatcaacggtcacggtaaatacttcggatatggcagctagcaaggcgaatgagagtaaatccgatggaaaggattttgataaaatccagcggaagaacgtgaacaaggtgaatggaattgtgataacggatgagttcaaagaagagctgcagaacgcggctttagttacacagcagtcctacataaacgctaggaacttagcagcggcctcagatggaacaaattctgagaacggcgatgacagtgcccttatgagcatagggacttcggctttggaagacatcctggctgaaaaattggagaagcataaggataaggacgaaaacaacaaattgtccaacaaagtccttgttatgcaaccaattcttcggtttttacagcttctttgtgagaatcataacccagaactgcaaaacttactgcgaaaccagaacaataaaacaaattacaaccttgtctcggaaacactgatgttcctcgactgtatttgcggatcgactacaggtgggcttggtctcctgggtctatacataaacgagaataacgtgtctctgatcaaccaaaccttggaaactcttacggaatattgccaaggtccttgccatgacaaccagaattgcattgccacgcatgagtccaacggattggatatcatcactgcacttattctgaatgatatcaacccgttgggcaagaatcgaatggatctcgttttggagctgaagaacaatgcttccaaactgttgcttgcgatcatggaatcccgaggggatagtgagaacgcagagcgaattttggccaacatgaaccccaagcagttggtcgatgtggcgtgtcgggcctaccaccaggacgaaaatatcctgctactgctcaatcagggagatggaaatggtgacgacaactatagcatgaagcatgacctggcggatgaccagaacgatgatgatgatgtgggcgtttctccaaaggaggtcggtcacaacatatacatcctctgtcatcagcttgcccagcataacaaggaactggcaaatctcctgaaaatcgacacctataatcctgcagctactaataacgaaagcagaagcggtatcagcttgcctccacctttgccagcgagcaccagcaaggccaatacgaaaatgaaccaagcactactcttctatcaaactcacacggcacagatcgaaattgttcgacacgatcgcaccttggagcaaattgtgttccccattccggagatttgcgagtacttgaccaaggatacaaaagtgcgagttctcaataccgccgaacgggatgatcagggtagcaaagtggcggactttttcgaccgtcatgaagccatgttcaatgagatgaagtggcagaagaaactccgtgggcagccggctctgttctgggtcagtagttacatgtctttgtggagcaatattctgttcaatttggccgtgctgatgaatctgattgtggcgttcttctacccattcgataatagcgtgccagagttaagtttccacctatcatccctcatttggattgtgacgctcgtttcgttggtcatcgttatcacgcttccgcggcaatcgggcattcggacgttcgtggtggcgcttatattgcggttgatattttcctgcggtccggaaccaactgtgtggctgcttgggtgcattacagtcatcatgaagggcgtgcacatcatcagcttgatggggaattatggaacgctggagaagaacctgctgtcaatcattacggatgcggaacttctgtaccattttgggtatttgtcgttctgcgttttcggtgtactgttacacccgtttttcttctcgatattgctcttcgacgtggtttaccgagaggaaactctgctgaacgtgatacggtcagtgactcgaaatggccggtctatcatattgaccgcagttctggccctgattctggtgtacatgttctcaataatcgggtatatgttcttccgggatgacttcctcgtcccagtggatgaagagtacgtagctcccgagaccgagatcaccaggtgtaccgaaccggaacgaagtcacatgctgccggatgctctggtcgaaggcagtgaaccgtactgtacccaaacgcagtccgatgattccggtgatcgaggaggtggagacgagatgaaggaacgaggctgtgattccatggtcatgtgcattattaccacgctcaatcagggccttcgcaacggtggcggtatcggagacattctgcgggcacccagtcgtaaggaaaccctttttgtaccgcgggtcatttacgacctactgttcttcttcatcgtcatcattattgtgttgaacttgattttcggtgtcatcatcgacacgtttgccgatctgagaagcgagaagcagcagaaggagctgattctgaagaacacctgcttcatatgtgggctgaaccgatccgcgtttgataacaaaacggtcagcttcgaggagcacatcaagaacgagcacaacatgtggcactatctgtacttcatcgtgctggtcaaggtgaaggatccgacggagttcaccggaccggagagctatgtgcatgccatggtgaaggcaaacattcaagactggttcccacggttgcgcgccatgtcgttggcagctgtcgatggagacggagagcagatcgaactgagaagtctcaagaatttgctggaaaccaaccacattgccgtacgggaattgactgctcaaatcatggaactggaaaacaagatgaccgaacagaggaaacaacgccaacgtcacgcactgttgaatccgacgacgtcaacgtcctaccagttctatccgcaaatttgatgttcaccctccgaaaatctctagaacagaagatggacaccccattgaagagagtcttgtggcatttattgtgtataaagtctatagtttttgtaaattaggtaaaactttggaaatgttatcacctaggtatggagtctaactaacatggcacgtgcattgattggtattgtgatccctctaattgagtaatgttcaacatagaatctatgcactgttccaaattgtgattagtcagcagataggaagctcaaacttgagtatcattgatgttatattgttataggaaatataggcaatttagtgcacttgtcatacgtaaagttgaaacggcagactaacaattttgtcaatatcaaatatgcaatgtacgtttgtaaatgtcttttttaattatgtactaaaattagcaacatttcgatccacctactaactgacttacccgtacttcttagactgtactttaccaacgaattttagtcaaacctttagaaagatttatggtttttcgtaaacaatcttttagaaactcacttattgctaatgtgttaccttatcagcgacgacaataccttttatacgatcagtaatcaagcttaattctattgaactgtgccacgtgtcccttactctagcattcccgtaaaaaatcattctcacatcgaatgtctctaaccctttacattggagctattaattccttttttgctatgtgatatttgtttgctcttcctagaattagttttctgacatttttctatcaaaatttactttaacaattagctgtaagcacaaagttatgttctttttttcaaattaagttaatcctccatagctttgaactattttatttacgcgtagcgtcattgctatccgacaaaagaacatcctaatgaactgtggaactaacaaatcaaaacgtaaaatctcatgctacttacatcgttaacgcttctattgcataccaactaaatcaaacttttgcctagattcatagagcacggtaacttttcattttagtaataggtcgactacatagtagatgaggagaagaagaaagaaaaatgctgttactgttacgtagtgtaatttttattaatttcgcatggggaagtctcgggcgaaaactgtacagttttccttcgatagtggttagcacctttctagattactgaacattatacgaatacggtaactcaaagtatgtacctactattgaaa

SEQ ID NO: 31 - DNA, 6856 bp, Aedes aegypti
tatctaatcgtcaacaaaacgaacaatatcgatgaaaaaatcgatcattttagccacgcctttattctagcacgcgctagatttttggttacattttccgccattcctgaagggagtgcatgtaacgcactcacgcacaccatcaaacgatccgacttcgatttctctcgctccgcgaagcttttgtttcgttcttcattccatttgttgcattctgtgtggttagatcgcgaaattcctttgctcttccatatcatcaatcggatggtgtttttttaggttattagaggtgcgagaaatcggtgaaaagttgcagtttttgcagtgtgttacttttgcggtgataaaactcgatacttgccagcttttccagtacgaaataaacaatagtgtacttataaacaattccttttgattaaggaaaatgttttattagttccaattagcaaacgaacgaaacatttaattcataaaatactcgattatttctcggtcaattcggaaaggcaatcatcatgaacacagctggtcgcttccagtcggcaaagaatcttcagccggctcgatccttgcgcactccggctcagaaccgtaacggcccgggaaactacggcttgcccttggaacagaacaatccataccaacagaacaacagctggcagcagaacaatcttggcggtggccaaggctttggtggttatcatatcagcaataacaacaacaataacggataccgaacgccatcggtggcttcatctgcatcgtcgacaaatggtttcaaaggaaacaatggattcaacaataacaacaacggaaatggcaacggtttccacggctcgaaaggtcatggccaacgacgtcacgatgtgctgcgttcgccaaatacaagcatggacagcaattgcagcacggcaagcagtggcagcagcagtgtcaaagaaatcccaaccattgtcactttcagttctaccacgttggccgtcggaacggttcatgaggtctacatctcgtacgttgaaaatggacccaaattgttcacggtgcagttgaaggccaaggaaaattcgctcaatcagatgatggcagcactggcacgaatcccgttacgcaatctcacccgcaagccaacgctgggaatggcctgcatcgctcgtttctctgaggatcgtgttctgtaccgagcactgatcatgggcatcaatatcgattcttgccttgtgtcgtatgtcgactatggaaacacggagaccgtcgacttcaagaacctgtacgagattccccaggaattcctcaagcataaggttttctcgatgcgttttactttgtcgaaggtaaagagcctggaggattctaatgccgatatcgctggattgttctcatcactggtgatggacaaagtcctcaacttgaaggtgatgccactcgaagggccagcgtttgtgcagtattgcgagctgtatgacaacaaagagaacgtctttgaaaaactgttcaacttatgcaagtcaaaaccgctgaaatacccagcgggtatcacactggatcgtggcagcagctgtatgatcatcattcgtttcatcgaatcgtgccgacaattctacatccaactactggagagtgttgagcgcttcgacaaactgatggaccaattggccgagtgttgccgcaagagctcaacgttcaacgcgctgaacgttggagattgctgcgccgcctgtctgagtgacgttgagtgctatcgagcggaggtggtcagcgtggctagcagtaaggtgaaggttcgcctggtcgattacggtaacaccatcacgttggaaaagaatcagattaaacggcttcctcccaagttcgtcgacgagcaaccgcaggtcgttgaatgctgcttggaaggattccaggaaatcagcgacgataacctttccaccgcccagctggagatgctcgccgagaacgaaagtggtgaccggaagcagttccgaatggttgtcgcggatgtttccaacggtgtcgccatagtgacattgcttgacgaagctgcctctcctcctctgaacatttcgaaacggttgctcaagttgtacaatccggccaagttcataaaagagcagcaagctcaacagctgaaaatgaattctgccgcggttagcaaaccccagcaagtgttgtatacgcctcctccagtggcggtgcatcaggcaccggtaacgatcccccaagctccccctccacattcaaacaatccattccattccacatcgatcatatcggaagttccgaatctgtcgcaaaccagcccatcgcgaatgggagagagcgaggttatcgatctgaccaacgatgagtggcctggggccaacgcccagccactcggccatcatagttccggctatgaacagcaacacagctaccagagccagagcaacaccggaaacaacagataccgatcaggggcagatgctggaggtggtcgtggaccacgtgatagccacagcagcacaaatcgcgatctcagccaaagcagcgccagctcttacggtggcaacaacaaaaaggagcgcttccaacgaccagacattccacggttcaccaaagaaaggaaccagaccccgtattacatcgaacatgacgatcggtgcgagaccaacaataactacgagcaacaggacaaaggtcgtggaggacgagaaaaggcagctgcgggccaacggaacaatcgttacagcggaagcgattccggattcaatacccaatccggagacagaggcaacttctcacaggaaagctggaagtcttcctcaacgagcatcgattgcgcagaggattacgttccgtatgattacgcgttgaccgagcaggtgatccccatgaataccaaagtcgacatcaagctgagctggtgggtgtcaccggaggagttctacgtccgcatgaaggacgaggaggtcaagttcgaggacatgatgaagcaaatccagaaatactatcgcaataaaccatccaccagcgatgttccgccggtaggatcgactgtgatcgcacgctatcagaagcacaacacactctaccgggcaaaggtgatcaagtacaacgaaatgctcggtaaattcaaggtcgagctggtcgactgtggaatccgggccatcgtgacggggtctgaactgtggaaactcgaacgacgctttgtaaagcttccacagcttgccattcagtgcacgttagccaacatcaagatcaactgtgaacccaaagagctgcagaataaaatcgatcgctacatcagcaacgagcaaccgatcggctgcgttttcctggacaaaagcgaaaataagtacctgtgcgacgtggaaacacaaggaacggatctcaagatggccctgctgaaggacaacctggtggcgcagatactgaccgatgtcgatctcaaccggttgaagggtcaaactttgaagctgaagctggtcgagatgaaatcgctcgatcagttccgggtgaagctgcagggcaacgatgcgattctcaactgtcggcacgtggagcacggagcgtaccaggccgtcgtcgaagaaatccaatcgaaatggctcgatcagtactgcttcgggcacatcgaagatgtatcaagcgatgagaggttgatactgacgctgctgatcccaccgctgtccaaccaagcggtacctaccatcgtcgacatgcccatcctgcagagcaagttcaccgtcacagtgccgtacgtttacgaagtgaactgtgtctacgtccagaacaccaagtgggccgatgaagtgggaaagcttctggacgacatgttcgattactacgaaaagagcggaaccgtcatcacgaatctgcagatgaacgagctgtgcgcttccaaatcgagcgacggcaattggtaccggtcgaagataacttgcctacaggagatcgataacattgaggtgttgtttgtggactacggtaaccgggagagggtcaaacacgaggatctgaaagtgttggaagcgcagttccaagagtacagtgcattcgcccataaggtttacctgccgatggcctgcttgaacgaaggcgaggatgataagctcaaggtggaaatcgctaatcttacgggacagtttgagatggagctgaaggtgttggacttccggaacgacgtttggatcgtggacattgcgcacaatgactacagcatcgtgcaagcgttgaaggacaagcagctggtgaaggatctggaccatgaggaaattgtcaaccggaagacggcggtgctgaatgaaagtatggagatgggctcggcggatatatcggaggaggccgacaaggagggggagcagaagtatcaaaagttggaaggcttcgtgagccatgtggacaacccgaatcagttgttcattcagatgaaagccgatctggatgatttggaccagttgcaagagaatttgcagataatttcacaagccctacctggattgaaggacttctcggtggagcggtactgcattgctccttactcggcggatgatatgtggtaccgggcgaagatcatcgacagccacgatgatttgattatccagtttgtagactatggcaataccgatgtgataactagcaataagaaacatgaactgaaggacgttaacgatagtctgatgaagtttaaagtctacgccaagcagtgttcgttgttggtggggcctgctgctggaaagggatggaacgaagaggccagcagcattttgcgcgatctggaatacgttgacgttcagtttttggttgaatgccgcggaatcaactacatcaatctgaagtgcgacgatcgggatcttgcggaggaactgattgcgaaaaatctagccgagcgaatgcaatatgttccgtcggagcaacgctgcttcaccagtcatattgaatcgattcaggagttctacctgcagctcgaacgggacattaaccccctggacgtgatggcagactacatggccaagttcgaagagttcgcttgtgttcaaaacccagccgtcggctcgatctacgttgccgagttcccggatgataatctctggtatcgcgccaagatcctccaggtcctggacggtccatcgtttgaggttttcttcattgactatggaaatacatcggtcgtcaccaacgttcgagaactggaggcctctatcgctgagctgcctcccctctgcaccaaatgtatcctcagactgccggacggtgtcaagagttggtcggacgaagccgaaatcaagttcaaggaaatcgctgcaatgggtgagactgtcttcacggttaagctgcacaaccccggactagcggccactgttgaactgttcctcggagaccagaatatcaatgaccagctgttggacctgtgcgagaagggtgcggccaatgttatgaactccagcttctacctgaacgaagagaaaacagtcgacaacagcttccctcaggagggattcgtccacgtcagccatgtgaactcaccggcagatttctacattcagtttaaaaactcccatgatgcgctcaaaaacatggaagaacttctgatgatcaaggcagctcaaagcgaacgcctcatgggggacgacgtttcggaaggaatgctctgtttggcatattccaaatcctacgacaagttccatcgagctcaggtcatttcgaaagaaaaccaccagtacaaggtccatttgctggaccacggttctgatgggttctccaccgatctccgacagatgcccgacggcagcaaagaaatgcccagcctggccaaacgatgctgtctcgaaacatactcgccggaaaatggtgaagtgctgaaagtggtccagaagcgtttcctagaactggtagattccggccggacaccattctcgttcgaaattgtacgcaacgacgtcgagccgaatatcgtacgccttttcaccgaagacggccgaaatgtagaggacttgctggaactgcaggaaggggacagcgatagctttgcaatgccaacggtagcggcagcccttcctccgccagcgccttccgacctaatcaaaacgtcccaacgcgccaaaccgaagcaggccttctaccgcgcgaaaagcgacctggattttgaccagtaagcgaaccaaacatttaccagagattgttgaccaaacagaaaaagttattaacgaaaaaacccaaaaaaaaaaaaactattatttatcgaattttgttagccaataagtaacgaacgattatgttgcttcaccctgttttttgaattggttgttttcattaagtttgtcatcttttattttcacacttgaatagtttttatttccggttttaatcagcactcaatttgttaaccatttctaattactcacacacatacaaaatacacaaaatgtatcgaaagacgtccaaataaaaaaaaaataggaacacgaaccagccttagctttgtgaagcaaaaaacactcacaagaggccttacttattaaatatactctcaaacaaacaccagtgttaaccgaactgatcttatgatttcctagcccctagcaaataatgttaaatgtcttcatcgggactacctgaagaattatagaaagagcaatacgatttcctctagtaaagtagacaaaacgaaaactcagacaagcaatacaaagatgttttttatgtaatggaaactaacatgcaatgcataatacaccgtatctgttaaataaacagtcctcttaatcgaaacaaaacatatttattgtatttaatagtcactaggagaaatggacttatttaaagcgaccgagcacggagaggagtaataaattatatcatgtttttgtaatcaaacaacaac

SEQ ID NO: 32 - DNA, 5784 bp, Aedes aegypti
atgaattcatcttcatcctttgagctgatctcttcggggacattgatgaatcgtcccgaaatcaaccaggactcacacgaaatctatctgtacaccggtcaaacggcttacttcaagtgcatggccagcccactgccgtccagtttggaggcacggtaccacgtcgagtggctcaaggacgaatccccgctacgaatggactacacccggatgctcctcttaccttcgggtgcactggaaatcgacgaagttattccagccgatcgggggacctatcagtgcaacgtcagctccgggatattttcgactctaagtagcaaatcgaatctgaacatcaagtccacagctggacaaccgcagagcttcgagccgccttcttttgtgatagttcctcaacctcagacagtcagggaaggtgatacggttattttggactgtgttgccaatgggaacccaaagccgacgatcaaatggctgcgaaatggcgaggagatcgatatgaacgatttggactcgaggtttaggataattggaacgggttcgctacagataaactccatccaggatctggatgcaggtgactatcagtgcagagcgagcaattcggaggattcgttggatgcctcggcaactgttcaggtgcaggttccaccgaaattcattctaagtccggaggataagaccgctttcgagaaggaggagttggagttgcagtgttcgattcatgggaagccaacgcccattattcagtggttgaagaatggcgatttgattacgcccaatgagtatatgcaaattgttggagggcacaaccttaaaatatttggccttattggatcggacgcgggaatgttccagtgcatcggtaccaatccggctggtagcgttcaagctgcagcccgtctcgagatcatcgaaccagatgggagcggaaagtttgcggcgccactgccgggcccaccgagggatctgcaggcgcagatcgtgaagccgcggtttattacgttgagctggctggaaccggccaagaacccggatgaggttatatcgtattcggtgtactacaagatgcacaccagcgagagagagcgcaaaatcaccaccaaatcccgcgacgaacaggaagtcaacatccagtctcttctccccgggaagacataccaattccgagtgatcggaaatagcaaccatggatccggagagtcatcccaagttctagaagttcgcacccactccgaagagaacatcgcaggacctccgcaaaacatccgcggtgaagctctcaacgacaaagagatccatcttcagtgggatcctccactaatctctaccgccgagatctccaagtatcgagtgtactacgccgagaacgacaacggcgatgagatgtactcggacaccatgtccacggatatcaccatcagcgagcttcggccttacaccgagtacacgctctacgtggtgccttggaaccagatgggtatgggagatccctcgcacgaaatcgttgtcaaaacgcattcttccgtcccatcggaagcaccttcgaatgtcacactggaagcgtccagctcaacgtcgatcaccatccgatggcaaccgccaccagtggaagaccgaaacggacagatcaccggctacaagattcggtacagaaagaacaagaaacctctccaggtggaaacgactccggccaacgttcgacactgggaactgaagggcctggagcggttatctgcgtaccaggtcaagatcgctgccatgaccgtcaacggctcgggaccattcagcgaatggcatcacattgagacgtacgaaaatgacctggacgagtcgcaggttcccgggcagcctgggtggattaaaactcgccctggcgcggaaagcataactgtgctttgggctccaccaaaccaccaagaaatcaaggtccgcaactatattctcgggtggggcaaaggtatcccggacgaagacacaagcgacgtcgaagaacacattcgatcgtttgaaatccgaaatctggaacccaatacggagtatgtgatatcgctgcgagcgcggaacaatatgggagatggtccgccaatctacgacaccgtgcggactcgtgaagactctcccatagaagctccaactccactggaagtgccagttggactgcgggccattcccatgtccggtacctcaattgtagtgtattggacggatacaacgctaagtaaaagtcaacatgtcaccgataatcggtactacgtggtgaagttcactccgacctcatctaccagaatccgattttataacacaactgacctcaactgcatgattggagatctgcgacccaacactcaatatgaattcgctgtcaaagtcgtcaaaggtcatcggcaatccgcgtggtccatgtcagtcatcaattccacccatcaagcagccccagtctctcctcctcgagatctcacggtatcctacgacgatcgcaatccccttacagccatccttcagtggcagcccccgaagcacagtaacagcccaatcaacggctacgtggtcctctacaccaccgatcccaacaaacgcgaccgggagtggaatgctgaagcggttgtcggtgacaaaacgtccgccgaaatcaccaatctagaaccgcacaccacgtactacttcaaggtgcaaactcgcaactccaaaggctacggtctgttttcggccatggtgtcacaaaccaccggagccgacgtagactccagcgagaacctctccatgccgaaggcgatttcctcggagatgatctacgtgatcgtgggattctcgatactgacagcggttattgccgtttcggtcgtgattctcatctgtcgaaagaagccggaaggaactccggaacatgcgaagaagagctaccagaagaacaatgcgggcattataaagcctccggacctttggatccaccacgatcagatggaactgaagaatatggacaaaagcaatcacagtacgacgccgggatcggtggatggcggcgcttccagtagcggagccatgacgttgccccgatcagtcggagggcacgaatttgacagtgaaacaccaataacgcacgtgacgaactcgttggataagcgaagctacgttcctggttatacaggaacaacgactccactgagttccacgatggaacgaccgcagtacccccgcactcagtacaacatggcatccaggccgcatatatctctcgaccagcagacactgtcccagcagagtctgctgcaacagcccccacagctgcctccggcaaactctttggtccaaacgccggagaatccatacacctacgaaggaaactatagtaatcccaatgtgacgtacgctccgggaatgaccgtagatgctccaaagcgggggcagggtcatccgctcaagagtttcagtgtacctgcaccacccgcatcaacgccgatcatcagtagtcagggtaaacatgcacaaaccccctcggtaacgatacgtccgcagaactcgtccccctacaagaaacccccgtcgctgtcgacaagctcgctcaccaaccggctacaaaccggtccagcagtgcagcactccaccgacgaaatccaacggttggctccgtccacgtcgaccgaggaactcaaccaggagatggccaacctcgagggactgatgaaggatctcagtgcaataacggccaacgagttcgagtgctgaacggaggagggaaggtcccagcggggaccgacgtgaaagtgatgtacggtttagtcattctcgtttaataattcacaaaattacttttagtttaatgcgaaattcttagaaagctctcttcttcgattctatggcctttgttcatagaatacttaagatggaaggcttcgtacgtgtcgtcagattatgtgtatacaagtcaagtgctttcccactgatcctttcactctctgaaaccgaatcgtaatatatgtggattaagtgttctaaaattatttatttattctcgtgaaaacaaaaaacactgaatcaaaatcgtactaagaaagtgaatgatttatctgtataaaataatccaactaggtaccgaaggcatgcaacgtcaatgctttcaaaaatggtttcgtttatcgtacattttgtccagtggagagcgaattcgagtaagataattaaatggaaatccaccagctgtacatagagcttatcgataaggctttcatgcatgctaacgttatcagaaacacggcatggatcgatattatagtgtcgtacgtcactgcattcggctagcaaagtgatgagcgaccgagccatttcccaatagatgattttattatggtttataaattaaatattttaacttttaagtatcgtcccgatagctagcatttcattcccagtgatttttaaattttagattgaattttaaggtagttattttgtagaacgtcgacggtgctaccggagattgcaaaacgcatttatgttctttagtagtttcttgaagtaagattgattatgaaagttcaacgaatacaagggattgtctcaaaaatatacaaccagaggaatctacacccagggatcaaatcattcactcataagccgaaaacgatgataaaccttctatgtttctgtttgaggtgttcgtaaagtgaagtatctcagcaagaatttgttaaagagttctgttgggataattcaatttgcagcttcgccacaaactcaaaacggagctcaacgtcaactgccatatgtcaactcatcgattgattgcatttaagttccatattttagctacctttccatatagttagccagctttccgtcattgtaaatgtaaatcgcactcaatttcgaaatatctcaaactttaatctaaccaatcaagtatacataatttacataaatctgaagaaaaaaatcaatgtaaagtagtcgtattttataaactcaagatttttacacccaaaatttccaatcctcataggagaaaagcacactgaaacacatcatcacatagaaaccatacaccaacacacacaaggaacacaaaatgcaagggatcacacatgcaaacacaaacacacattacacagtcacaattcccaccacctcacagcaaatgagttcgaatgagcgaaatcgaagaattgcccaagaaaacaaaactttttatacgtattatacaagaatagtcataccaatcgaagacgtgaagtggtaatggatttttaaccaaatgattgcttcagtaaaatgcctaataaaaatgatttttttgtaatcgaaaaagaaatctactcggatcttataatctagcaaattggaaaaaaaaacttgttggtttccattatacactaaaacaacagaatcgggacactgaattggctgctaaatgtaggtaatagaacaaatataattcaatgcctaatgtaaatattatcacttttgtggaatcgtatttattacaacggaaatccggaaaaaagcaactgcctaattcagtctgtttcgtaaatcgtcacgcaagtttgcccgtttcgtggttcaattttgaatttaaatttggtttgaaagcactgaaccaaaacagcaaatagaacatgacaaaatgatcgtgtacatttgtacatggtatacactgaaacaaaaacttgggcagcacgaaaaatgctgaacgaatatgaccgtcaatacggcagtgagaattcgaaacaaacaaacacaactatggatagaataataaatcctaataaaaattattgaagaaaa

SEQ ID NO: 33 - DNA, 6114 bp, Aedes aegypti
ccggaagagttgttggccagcttcccagaggacaagctatcgtcgttgaccatcaaaatatccaattcccgttgggtagtcccagtgttgccgaatcaagagttggaatgccttttgaatgcagcaattcgtctttctcaagcaggactcgacgacaaatgcgaaccatgcatgaagttttatcgcgaaggcctgacaacctcgttcatcaagatcctcacagacgaagccgtttcatcgtggaagtacaacattcaccattgcattctgatgtcatgtagcaagttgctgcacttgatagctctacatatgaagcatgataatcctcacctgttgagccttctggccgtggtgttcgatccggagaacaagtttcacactcaaaatgcgtcccggcagatggagctgtacctttcactgggtgagtccgaggaaccgttacaagaagggaaaatctatgccagacctcctccagagccaaagaacccccggggttggttagtcgatctgatcaaccgttttggagaatgcaagggatttgacaactttttagaacggatgaacgttggcattgcactgtttcgcaaacaacgggaaatagcctccagcaaaagcttggattctgccaccacttcgtccgcttcagccaacactagtgccgatgaatccgggaagttgtccttgctcttgctgcacactttgctacgtccctttggacagtgtggcgagctattgacggtgtccaccgtagagaaatacttcatgcccatctgggacgtgatactggagatcctggaaacgctttccgatgatgaactgaaacgagaagctaaatttgaaggaaaaaatgatattattaccggtattgtcaagtatgcccgtgccttgattaatcgcgttccgaatcaggagaacctgctgcgcgccttggaaatgtgccggcttcggattatactgcgtgtactgcagatttctagcttcaacggcaaaatgaatgcccttaacgaaatcaacaaggtgctgggttttgtctcgtactacccgaaccgacaaatgacggaggatgaagtcgatgtactgaatgccgaaaaaatggcgaaatggatccgcgacaacgatgtactgggcattgtgcttcgcgattccctacatcagccccagtacgtcgaaaagctggagaagatcttgcggttcctcattaaggagaaatcgctcactttcgacgatttggatgcagtttggcgcgcgcaggccggtaagcacgaagccattgtgaaaaatgtccacgatctcttggcaaagctggcgtgggatttcaacgcggaacagctggaccatctattcaagtgcttccaagcgagcatgaagacggccaataaaaagcaaagggaaaggttactggaactgaatcgtcgtctcgcggaagatgacaaaaacggtgtcatggcgcagaaagttttaaaactgttctggacgttagctcacagtgccgatattccgccagaggtgctggatcaagcgttagcttcccatgtgaaaattttggactatagttgctctcaggagagggatgctcagaagactatgtggctagataagtgtgtggaggagctgaaagccggtgacgaatgggcgttaccagcgttacgactgatacgggagatttgcacactgtacgaaacgacttcaagtcataccccgagagtgcatcaagtcctaaccaggcggcaggttatcgataggctacaaaacgatcatacgctcgtgattctagtgaccaccagtttgaccaagtacatggataaggtacgagcacaagtcaagcttaacccgtcgataaatccaatgcatctgctcctggacaaacggtatcctcatccgcaacagattcaggagaggttggaattcctgaaattcctgcttaaggatggccaactgtggctttgcgccgatcaggccaaacaaatttggcaatgtctggcggtgaatgctgcgtttccaagtgaccgcgaagagtgtttccgttggtttgggaaactgatgggcgatgagccggacttagatcctggaatcaataaagactttttcgaaaacaacctactcaagctggatcccgtgctgctgaccgaaagtggaatcaagtgctttgagcgattcttcaaggcagtcaattccaaagaggaacgcctaaaaggcaaacaacgcggctacgtgctcgataatgaggatctgattggcaaggactatctgtggcgggtgattacggatgccgacgaggaaattgcctgcaaggcaatcgatctgctgaaggaagtttcaacagccctggggccgagactactggccaatgtttgcgagttccacgaaaattttatcagcgaatgctgtgataggctccaaagttactacgatactgtacaaaatgatataatcgatgaaaacgctaagatagcagtagacgatattatctgtagaagactgcaaacggcagagaagatgtgccgagtggtgcgtgcccttctggaatacatcaaagaatgtgatagaaactatacaggggaacgaatgctactcccgctgagccgagcctcccgaggaaagtacattaacttgtccattcgttttcaaaacccgggtcggcagctggaggatttgatggtggttacacacagcaatgaaacgatattttcattcaagcgtaatctgctgaaaaagatcaaagccaccaccaccaacctcaaaatagatctgttcaactgcaacggagaactaattgaaatacatgacgatcgatatcctctgtcccattacaacattcgcgataagtcgctaataaccgtaaaactcacgcccagtggatctggactagcaagctctccggatagttccagtgatagtagttccggttcgccacctcgaccttgcccggatatgttgcggtcagaatctgaggacatgctgcccggagtaatcatttcacagaaatcgttatatgtagattttttcctcaaaatctaccagctgggaagtgaccttcaacatgatttgctaagagaatgctgcggtttcctgctgcacctgcttccgctggatgtattgacagtaaccaacatccagtctatgtgtaatttcaattccgatggaaccaacaaaaccagtataccgacgccggaatcactcttcattgatcccagtccagcgcgagtgttgtacaatctggaagtgctgcacgctatgctactgcccgccttggatcctggaagcgatatgacccttcatctgcaatcgtcttggctgcactgcggtgctgcacacttcattctcgatctgctgacaaagaacaactttctaccaactgccgacatgcacaccaaacgtgctgcctttcattgcgtgcttaagctagtcaaattcttcctctacatcgtgggatgtgttctgagcacggttggcaaagatcctttgaactcctacgcggacgccgatagatcccaagtggaaatcctgaaacaagccattcaagcaattaccggaaatgccgaactaaccatcagatccatggccctgaaattgaccgaaagtattgccgagcaaatgctgtcagccgacttagaaggtgatcgttgtcgtaatctgttcaaatcggctgtccagtggagcctgcctgacatgcccaccatcaaagcaattatcaatttggcttgggcagcgtcgggtaacaatctgcattcaatcggaacgatggtagatttcagtaaaaacattagcattccggagaaaaccgattatgccgtttgtaaggaagcgctggaggtactctgcatttcactggtgctccattatggggcgtacgagacgcttagccgggacaatgcttggtcaagtttcatcatgtcgttggtgcttatgaatccatcgcgccacattcgtcaaaccgcgtacgagcagctgttcctcatcagtacttattgcgcctccgatcggcggccatttctgtttatggtcaaattgctggtcaaactccttcacacgatcatcccgcagcatcaggaaacttgtgccgactactttcaactgttttgtcgcattttgaactatgggtgttcctacagctggcctctgcccaactgcgaagaactgcttgtgcaggagatcaactggttgcgatcgattagggacagtgttaaaaccaccggcggcatccaggttcacgacgatctactggaaggccatctgtgtctgacgaaggagctaatgtgctatctgagtccggaggttaaagcccagcgcagtgacttgataacggaaatcacggatgactatctcttcagtgcttcccggcagtatctccatttgcgccgcaacgatcagatattggaaacgcaagctcctccgccggtgtgtcgcaatccgcatacgatatctgcagcttgtgacctgctggttgccttatgccaaaacaccgtggacaacatgaagatattggtcaagacattactggatatgttttgcgttgacattgagccgttgcgggaatgggaatatttgccaccggtgggacctcgacccccgcaaggattctgcggcctgaagaatgctggtgctacctgctacatgaactcggttctgcagcagctctttatggtgccatcactgcgaatcggaatactgcaagcgcagggagctgcagtcgatcccaatgaggactttagcggggaattagattctcatgtaagtttcgacgcgatttgttactataatacctcttattctattcgtgtacttttacagcctattcaagaatgtgatgattcggttaggaaaaattaccatgttggaatactgaagtacgttcaagccattttcgctcatttgggccatagcgctctgcagtactatacaccgcgtggtctgtggagccatttcaaattgcaaggcgaaccggtcaacttacgggaacagcaggatgccgttgagttttttatgtccctgttcgaaagtctggatgaaggtctcaaagcattaggctatcctcaactgatgggtgctacacttggaggatgtttcagtgatcagaaaatttgtcaagattgtccgcatcgttatagcaaagaggaaccgttcagtgttttcagtgtagatattaggaatcatagttcgttaaccgactccttggagcaatatgtcaagggagaaattttggaaggcgctgatgcttaccattgtgataaatgtgataaaaaggtggtaaccgtcaaacggttgtgtgtgcggaagctaccgcctgttctagctattcaacttaagcgttttgagtatgactacgagagagtgtgcgcgatcaaattcaacgattattttgaattcccgcgtaggttagatatgggaccatatacagtatctggtcttgcaaaaattgaaggagaagtgatagacgttgatgatgagaaatccgaggaatctactgaaacacgttaccagctcacaggaatcgttgtgcacagtggacaagcatcgggtggtcattatttcagctacatcctccacaaagcaccagacggtactgagaagtggtacaaattcgacgacggtgaagtcacagagtgcaaaatgaacgaagatgaagaaatgaaggcacagtgcttcggaggtgactacatgggcgaagtgtatgataataatttgaagaggatgcagtacaggcgtcagaaacgatggtggaatgcgtacatgctgttttatacccgtaacgatcatacacccattacgtacacaaattgcgtggagcagctgtcgctggcggagagtaaatattgcatactgccgatgccagcacccatcgaacgaagtgttaggtatgctatattttcactttcaaatattttagacttctaagggattatcactttaagaaataatatgcaagtaatgtatgtcacaaattgaaactgctaatcctagccatggatcgatatttaatctaaaaatagtctaacgctaaccgaaaggattcgtgatcgccaaaatcaacctggtctttggaagcagacccgtagttaaaatcatacacttctaacgaccatcaggcggtgaagcaagagaggaggtggaggt

SEQ ID NO: 34 - DNA, 2445 bp, Aedes aegypti
actattacctgacacgtcttgtcttaggtcgcgaattgcgaatcggtttgatgtatcctccaatgagtttatgtattttccgtgtcacatcacacggcccaagcggccaaagtactcaaagcactcacataaattagtccgagagctggctgccccagagtgaactgagtgatcgggactcagatcaaaaagcgcaacgaaacttgcgcccgttcgaccccggtgtcagtccgcttcagtgtgtcgaaggagtaagttcaggtttttttctcggagtagtaaaatcactatcggaaggggcagtgcagtgcgcgtgaaaactcggtgtcttgcttctctgtcgccctgctgtaaatggttatagtacatctcgctcctgcgtaacgtccaagaagatcaaaaccctattcaaactgaaaagaagaacatcctctcatcgcggtttggaaaagaaggaaaggaaaacgtaccgcgcactcacacaagcaaagccatagcgctatctctttcgggctcgtttattatccaaggcaacggccactcagcaccagtcgtcgtttcattcgcgtacgcggcagtaattatttaatttttcgtattttccacaagcgttccgattgactgtcgataaaagttcagtatttcctttgcggaacagtctctcgtgtgtttgccgatagataaaaaggtgcggtgaggatttttctttatcaatcgattaggtgtgacgaatacttggcgagtgataaaattctgcggggtgaatttggtttcttctctttgaactggaatacctaaatagggacagtactgtagaaaaaaaagcgacagacagcgccccttccgcgattcgcgtgtggattagtgaagcaaaaaagctccgaaattatttccagaaaaaggtgaagtgcaacgttctctgatcgaaaattctgtttctctattgcagtttattgtttgaattagtgagaatcagaaacagttcgtgcaaaaatggcctcaggagtgaccgtatcagatgtgtgcaaaacgacatacgaggaaatcaaaaaagacaaaaaacaccgctatgtcatattctacatccgcgacgagaaacagatcgacgtggaggtgatcggtgaccgcaacgccgagtacgatcaattcctcgaggacatccagaagggtggaccaggcgagtgccgatatggactgttcgatttcgagtacatgcaccagtgccaaggcacttcggaaagttccaagaagcagaagctgttcctgatgtcctggtgtccagataccgctaaggtcaagaagaagatgttgtactctagctccttcgacgctctgaagaagtcgctcgttggcgtccagaagtatattcaggctaccgatctctctgaagcatcccgggaagctgtcgaagagaagctgcgcgctactgatcgtcaataagcttatccatacttaagattacgcacacaactacaacaacaacaagaaaggaagagaaacctacagcagattagccgacaacataacagacgaaaccaactcacacatacagattacacccacacacacccacacactgaactatccaacaaacaacagcaggaacatgtaaggagtgaatgtcatttgaagaacaatggaaacatataataaagccaaccaactaactaaacagtaaaccacaaacacgtgaaactgttctgaacatatctgaatcccgagtggtttggattgttctaaagcaaaacccaggaacatccttttgcgcgattgctttgtagtctcgggacgggcgagagagctccggttatcgtcattcagaagcaaaatttcggactcagtcgtatagccaactagcagtcagtcagtcaggatcaggagtgtgtagtagaaagattaagtggcaagggttcagggaaaaagaacgaatcattggaacattaatattgcatgcgaaccgttttttttttttcttttgattggtatggcaagggagacgaagggggaagcgtttcttagcaagcatttatttcagcgtgtgtttaatcattgacctttcgggagctcccttgcacatttcgctgctccttttcccttgcgtgtgtgtgcgcggtcatcatcaggaattacaaaaaataaaataaaatattgacatacagcaaaaattcagaaaaaagtaacgaacaatcgtattacagttatgattaatttaaattaaaacaataaaatactaataaagataaaccaagatcgtactatggaatcaataattatcacaacccatcttaccgaactctttttcatgtgtttaaaatatttaagtataaagtatgcttgagttcgtatttcgacggacttataaaatgttatcttgtatcactgacataccggagcagagcgttttgtggagctctatattagtcgatcttaggtcactaaactact

SEQ ID NO: 35 - DNA, 4287 bp, Aedes aegypti
aagctcttcaaaggcaacaaagacggtgactccacccgccacaattcgttcgaagtgccaattattgcccagtggatccgaatcaatccgacacgttggcagaaccgtatctccctgcgcgtcgaactgtacggatgtcactatgaatcggaaaacgtctacctcaacggaacgggtctcatccggtacgacctgctgcgggaaccgatttccgccacgcgggaaaccatccggttccgtttcaaaacggcccaagccaacggcattctgctgtactccaggggcactcagggagactatctggccctgcagatcaaggacaaccgaatggtgctgaatatggatctgggatcgaggatcatgacttcgctgtcggtgggcagtctgctggacgataacatctggcacgatgtggtcatttcgcggaaccgacgggacatcatgttcagtgtggatcgggtgatcgtggagaagaagatcaaaggggagttcgacaagctaaatttgaacagagcattctacatcggaggtgttcccaatatgcaagacggactgatagtacaacagaatttcaccggttgcatcgaaaatctgtacctcaatgcgacgaacttcattcgcgatatgaaggaagccttctacgaaggagaacacttgcgctatctgaaagtgaatgtcaattacaactgtccagagcctccaattagtccggtaacattcctgacccgaggatctcacgcacgtctgaagggttactacagcgtcaagcagctaaacgtgagcttctcgttccgaacgtacgaagagaagggtttgatgttgcaccacgatttcctgcgtggttcggtcaaggtgtacctggaggatggcaaggtgaaggttggactgaagaccgagaacgaagagagcgctccggagaccatactggataactacgacgagcagtttaacgatggcaattggcactcgctgatgttggccatcaagaagaacagtctggtgctgagcgttgatgaacggccgatggaaacgaccaaacaactgaacatcaacaccggcgaattgtactacatcggcggaggcaaaaccaaggacggtttcgtcggttgcatgcgaaccatcatcatcgacggcaacatccgaccgccgtcggactggaaagaggaagaattctgctgcaagggcgagatgctgttcgacgcctgccacatgatcgaccgctgtaatccaaacccgtgcaagcacaatggtgtatgcaagcagaattcattggagtttacgtgcgactgtgcgggaaccgggtatgccggagccgtgtgtcacacctcattgaacccgctgtcctgtcaggcgtacaagaacgtcaacgtggtgcagtcccgtactacgatcaacatcgatgtggacggaagtggcccgctggcgccgttcccggtaacttgcgagttctactcggatggacgggtgattacggtgttgagtcacagctcggagcatacgactagggtggatggcttcgccgaaccgggatcgttcgagcagaatatcatctacgaagcggatttaccgcagatcgaggctttgctgaaccgatcgcagtcctgttggcagcggttgaactacgcttgtcgatcgtctaggttgttcaactctccttcagaagtggaaacgttccggccgtattcttggtgggtttcgcggcataatcagcccatggattattgggcgggcgccttgcctggatccaggaagtgtgagtgcggtattctgggtacctgtgttgatccaaccaaatggtgtaactgcgatgcgaacagcttggagtggcaagaagatggtggagagatcagggaaaaggaatatcttccggtgaaggcattgaggttcggtgacacgggaaccccagttgatgagaagttaggtcgctacactttgggtccactgaaatgtgaaggggatgatctgttcaacaacgttgttacgttccgcatcaaggacgctacgataaatctaccaccgtttgatatgggtcactcgggtgatatctacttcgagttcaagaccaccatcgaggatgcggttattctgaatgcacgaggacctacggatttcatccgtttgaacattgtcggtggtacgaagctattgttcgaataccaagcgggtacgggaactcagaaggtctacgtagaaactagctattggctgagcgacgatcgctggcactcggtgagcgttgagcgaaatcgtaaggaagcgcgactggtggttgatgggtccatccgggcagaagtgcgagaacctcctggtccggttcgtgccttgtatttgacttcggagctagtgttgggagctagtattgattacagagatggatttgttggctgtattcgtgcattcctgctcaatggaaaccacgtggatctgagaggttatgcggaacgtaagttgtatggcgtctcccctggatgcgttggacgttgtgaatctagtccttgcttgaacaatggtacctgtacagaacggtatgacaacttcatttgcgattgccgttggagtgcattcaagggaccgatttgtgctgatgagattggagtcaacatgaaggccagttcgatgatcaagtacgacttccagggtgctttccgttctacactgcacgaacgaattcgcgtcggtttcacgactaccaatccaaagggtttcctgttaggattcttctccagtcagtcgaaggaatatctaacgatcatggtgtccaattcggggcatcttcgagtcgtattcgattttggattcgaacgacaagagttgatttatcctacgaagaacttcggtctaggacagtatcatgacgtacggttctccagaaagaatggcggagcaactgcagtgctggaaattgatgattacgaaccccaggagtatcacttcgatatcaaggattcagcagattctcagtttaacaacattgaatacatgtacatcggaaagaacgaaacgatgaaggatggtttcattggatgcatttcaagggtagaatttgacgatatctatccgttgaagttcctgttccaggagaatccaccaccaaatgtgaaatcgttaggaactcctttgacggaagatttctgcggagttgaaccagttacccatcctccaatcgaaatcgaaacccgtcctccaccagaggtggacgaagataggctacgagatgcttacggtccagacactgctatactgggaggtgttctggcagtgctattcttgcttcttataatcatggctatcctgatcagtcggtacatgaaccgccacaagggcgaatatctaacgcaagaggacaaaggagccgatgcggccctggatccggacgatgcggtcgtgcagtcgactactggccatcaagtgaccaaacgaaaagaatggtttatttaatgatctattagctaatataagcccgtgtttacaaaaatcaatctaaaacgggcgcgttcgttccaaaaaaacagagagagagcaaccaacaaattaacagcagctgtaaataatgtgttcaacacgcgtacatctacaaaaatcttccgtttagaagttgattgttttcatctgtatcgttagctcatttgatttactcaacatctaccaattgtgaaagtcatttacaagtatgaacatcaccacaaaaatgcaatggtcgtgataaacaaatagtccggccttgacacaaaaagcgcgaacacaaaacaaaaaggcaaaacgtaaacgggagcagcatttcgattagttctagattgttttgatttttatttcgtaaggcgatagattttttattactattgattttagccgtccattatcgtacttttttttctttttgaaaaacgattaatttctaacaatcgaatgatgataatctgagttgtagtttgtaaggtcaagtaattaagttcgaaaacaaaacaaattttgaaaagctgacgccagaagcgagtggaaaatttcttcagtaggtttagtaaaacgaagttagttgaggcaagaatctcatttcgctaacaagtcttttataggtaccacagcctaacgcagaatttaaaaaatcatcaggtttgaagagcatttcaggaaaacattctttcccatgcaaaacaaatttactaaggaaaaacttctagagcaacgtagatcgcatgtttttgcagaatgcggcttttcagactagtttacagctgaagccatgtctgatgtgtaaatagtttttcaaaatacattgaaacaaattag

SEQ ID NO: 36 - DNA, 7382 bp, Aedes aegypti
atggtcaccggcgacgtcgtcctcgccatcgacgacgattacggcgtcccggttgttccgagccggctctttggcaatcatcctcttccgcttggcggcactcgttcggattcgtcaaccacggccagcagcagcgccatgcctgccgagtccaaaacggcggaagcggcgccagccaccaatccgagcacaccgaaaaagaagccagcctcctcgtccggcaaggcggcgctcgccaaagtcacagtcctcgatggatcgatactggaagttacgatcgaccgcaaagctcgcggccgagacctgctgaactcagtctgcgccgggttgaacatcatcgagaaagactacttcggactgacatatgtcacggcagcagatccacgggtatggctggacctcgaacgccccgtggccaaattcttccgttccgatccgtgggagatgaacttcgaggttaaattctaccctccggagccggcccagctgcaggaggacatcacccggtaccacctgtgtctgcaggttcgcaatgacatcctcgagggccgactgccgtgctcgttcgtgacacatgccctgctcgggtcgtacctggtgcaatcggagctgggcgattacgatcccgacgagatgaaggatcgctcgtacctgaaggagttcaagatcgccccgaatcagacgccggaactgctggacaaagtgatggatctgcacaagacgcataagagtcaaactccagccgaagccgagctgcattatctggagaatgcgaaaaagctggccatgtacggagttgacctacatcctgccaaggactccgagggggtcgacatcatgctgggggtttgtgcgtccggattgttagtctaccgggataaactccgaatcaatcgcttcgcatggcccaaaatcctgaaaatctcctacaaacgcaacaacttctacatcaaaatacgaccgggagagtttgagcagtacgaatctacaatcgggttcaagctggaaaaccatcgtgctgccaagaagctgtggaaagcctgcgtcgagcatcacaccttcttccggctgatgacaccggaaccgacgtccaaatccggattgttcccccggttgggttctaagttccgctactcgggacgaacgcattacgagacacgcaaaacgccagttgaccgaccggcaccggacttcaagcgaagtctcaccggaaagcgactttccagtcgaagcatggacgcccttggtcagcaagagaaggaacgagccgccctcaaggacccgaacaaggatgccaacaagcgacacaccatgtcacatccaccggatcacatcccggatctggaatcgccaactcgtggctcccgaagtccaatcaagaaggagaaaaaggaacgcaaaccgatcggtggcatcgctgtcctgccgggtgccggaaagaaggacaaggaacaagccaaggaaccggcctcgcctgttaaggaggaaggtgtcaatggaaataacggcaaccaggaagcgctgaattcttccgctgaagagaagacctctcctggtggcaagcgaaagggtttcctgttctcgtcgggtcgtaaatcgcccaaggataagaaaactcctggtgctacggcaacgccggtggccactaccaatggcgacggtggcaagaaggagcaactggcagcacagactcaggctcaacagcaggcccaaaaggatgctggcaagccaggttttaccaaaccgtacgagtattctgagaacgagcaggacaccagtcccaataagaagaacgttaaaacacgtggcttccgatacgatgaggatccttcggcacatgccagggacaaggaggaagcgcagctcagtccgaattcgcaaagtcgacgtgccaccggtttagccttcaactatgccccgggagaggatgagaaggtacgcgaatcggtagagaagcgaaaagtcccaggatcgccacaagctgatgactccaaggacaagctatcgcccaagaccggtggcagaggactggcgggagaaaccgatgcggagaagggtgttagaaccagtgcacgatcgtattctcccaacaagggcaaagtggtcgatccacttgctagtggagctggatcgttccgtccactggatgacggtcaggcagatcctaacgctgcattcatcaagggagaacaagttgctggtatagttccggttgttgcgggaccaccagaaccagccaagaagaaggtaaagattatggtgatcatttcgaagttcgatcccaaaaccaagaaggtcgatacggccaatggagtggtggaacactcgacaggagtgctggacacaaagtctggtctgatagagagtaaatacggagttatcgatcccaaagccggaacggttgttaacttcaatcagagaaccggtcagaacgaaacgttccagggacagaccgatccgaagaccggccagatccatgttgttagtggagttgttgatcccagcactggtaaggtggacgatagtcttggtcaagctatcattgtggctccagatgatgattccatcgtggagatcacgactattacgggtaaggttgatccgaacaccggtaaggttgatactaccaatggcgatgtggagaggactcgcggtattctgaacagtaagaccggagttgtagcaacgaaatatggtgacatcaatcctaggacaggagaattgaggaccgttgatccgaagacaggaaaatccaccagtcgaaatgtggcggtcgacaaagacaatggtcagatcacgatcgttggagttactgatcccaagacccataaggtcgataacagccaagctcacttggtggccataggcaatcaggtagatccagtcgttgaagtcacttcagttctgggtaagctggacaagaagggcattgttgatcccaagaccgtgacgttcgataagagcacaggtcagttggataccaaggacggcaagatcaacaccaagtacggacagtttgatttggtcaaacacaccgttacgtttgtagacccgaaaacgggtaaaactgagaccaaggaggtcaagatcgatcctattacaggtcaggtgctgctgaagaatcaagtcaatccgaagaccggaaaaaccgacaaagacttcggaaggatcgtttcgattcgcattgtacagaaccgtattgacccagctactggtaagcatgtatccacggtcgaagataaggacatccgcgttgatcctaagacaaaccaagtgtgggttccggaaagcaaagacccaagaaccggtgagacgatctacacttccagtcaagttgatccaaagacaggctacgtcatcaccatctacggatatctgaatcctaagaccaacgaaatcgagaaacagacaaaactcgatccaaacctaaccaaggtggaccccacaaccgggcagatttacgctgcaaccggtcaagtggatgaagccaccggtgaaccattattcgccgccacgcaaatcaacgaagaaaacggagaaatctacaccaaggtcggcaaggtagacccgaagactggcaagctggtcataatcaagattctcattctgacaaagaaggatgaacgaggaaaaccagaagaggtcgacatcaacggagtggatctagacccagtgaccggtcgaatcaacaatattgccaccaagaccgtgtacgtgtacaagatgcgcgatccgatcaccggagaaacctaccaggtggatcccaacgacccaagtattgccggagcccggacaaccgttacccagaccatgactctaagcggtgaaatcgatccagtcaccggacgaatcaaatccgaatggggccacattgacccgaacaccggcgacatcgatcccgccacggccatccgcgacccggtcaccggtaaactgattctcaactacgccgacatcgaacccagccactttggcaagaacgtaacggtcaccaaggaaacggttcccatcacgcgggagcagttctacgaaggcatcaagcatctgggcaagaaggccatccggcgggactcggaaagctccgacgacgacatggcacagtatgacagcgaacagctgaaggagatcagctcgggaacgccacgggccgcgggagctgccggtggaaagtacggcacgcctacggtggtgaaaacgacaacgaagcaggttatcacgaagaacgaagacggcgtaacgcataacgtggaggaagaggtgcagaatctgggaaccggacagatcgtgtattctacacaggagcataaggccgacgcccccagcgacattcagggcaagttcctgacggcgacggccgtcacgacgcgtaccgccaccacccacgaaaatctcgaaagcaacgtcaaaacccagcagctggaggagaaaaccgtggccaccaccacaacgcaacggggcgaacagcaggaacagcgagtggtcacccaggaggtcaaaactaccgccacggttaccagcggagatcagttcgctcgccgcgatagcatttcgtcgacgagttccggcgattccggaacccccatcgacggtccctacggcgaggaggacgactcgacggtcatctacaacaagagctacacgggtgttgatgacgttgctggagcatcgaagattccatccggtccgaatgtggagcatcatcgggtgctgctggacgattcacaggaaggtgttacggccgaaggcgagattgtatcctcccagacggttagcagcaaaacgcgaacggtggaaaccattacctacaaaactgaacgagatggagtggtcgaaacgcgtgtcgaacagaagattaccatccaatcggatggcgatccgatcgatcacgacaaggcgctggctgaagccattcaggaagcaaccgccatgaatccggacatgactgtggagaagatcgaaatccaacagcagacgcagtaaggcgagacaaggtaaggcatacacaaaaaaatcgcaaacccgctccttgattcggagggtccaaacgacggtcgactcgtttttcgccggacctgatgtcggtttctacactcaacagttttaagtacatgtcatgtcatcacaaatctcccactgtgggagcgctattgttttacacttgagacccacgcgcgaacgctagttttttttaagtaagcatgaaagtataagaaactatacttagttgaatacggaaacagccaacactgttggccaagcaccgagcgaaccacgataggacagttgttctagtttaagcattttttaattttaatacgagtaaaacgacgagaagaataaatgctaaaatgtaatggagaaaacacaatcattcaaatcgctttatgtccgattatgttgttctgctttaaaatgggtaatgtatctacgataagaagcaaagttgttgaaataatatttaacaatatttacacaaaaacataaaatcacgagaagcttatattgacagcccggaaactctcagtctatacatatttagagagccgtggcgtcgacatattcgagaatattatattcgagcgagtttgcttttgatgtttcatgtttgcaaggaaatgctgaaaaagaagaaaattgaagcgataaacaggtcatttactgacacaaacagcaacactgcttaaaacattgaaaaaagaaaaagagagaaatgcgttttcgacgctcctgatcgaatgtagctaaaatttacatcatctgataacatcaatttaagaaacatattcgcatacttttccccgttttgaatcaaaccttcttaccaattcgaatcacacttttcttgtaatttgcctcaaataacatatatacgatgaaatagtggaatttttagctaaaaagtaatatttagccaacaacaacgtctacaacaaccatcgtcgtgttcattgaaaggatatttttcgaagcaggaatggaaggaatcaattgaacgagagaccaacaccgaaggcatatcgcatcacgcaggctggcaacactttccagccacatagtacgccgatcaaagatggcgcttccgtgtgctcgctagttgccagtattcatgatgtgtacagtctctgtagaaatcattgcaataataagaaaaaaatgaaagcgaaatgtcacaccgaaaagaatcgttgccttatttgtagtcgtatttctctctttcttcgacagcttgttttctcccgctcccgtagttcgcaatctatgtacgtacgatcctagtgctttacagaacttttattattcttgtaactataaactatactgtgttttctatttatttcctaactgtaattaacattccgagagcgatcatcgcggaacagaccgaacgtactaagttatctgaaagcagaaacaaatccccctctatttattctatcaaaatgtacatttctcttattcgatcctacgttatcacttcttctctctaaacctcacttttgaaagtagttgataaaccgtcataacaattacattcaatttttgttcgagtgttacatacgtttatctgtggttgtatgtctacatctgacacgccaagctgtctcaaaccgtgtttcgtgtaacgctaggaaaggaaattttttggactaaagtcgcaaccaaacacacaatcacatatatttttgtaataccaagctttttgcgcgcataaaatgataaggttcatggaaaaagcgagacattggatggcgctcactacgaccgtcaatcgttccgttttgtcgtactgccattcaaaatggcatccatgttttcaacggtaaattgattgtaaatgtaactgtgcttttgtgtagaacctattgcgattagtatattgtcacatttagtcatcacatccacccaattgtttatttcctaacacgtaatccgatccttttgtttttagttgacaatttttctatagttttgcctacaaactatggttttttcttcaataagtagtgtagtttctagaaataccacccctcaaatttgtgttgtacgcgtcttttagttattattttattgtttgtaagagagatttatttatcgcaaaaaaataaagaaaagaaaaaagagaaagctatttgaaacgatatattgatgatgaaaagaaaaaaatcttcatattaggatttaaggagtcgctaaatttactacccagcagaagaacataagaacgccagctatgatgtggaaaaagataaaggaaaatatgcaaatcgatcctacaatggagcaagctaatctatagatgtaccgatcatggcaaaagagaatgcaacaagctgaaatcagaacgagtaaaagtgactaagtctagcttatgtgaaaagtaa

SEQ ID NO: 37 - DNA, 4997 bp, Aedes aegypti
cgaactccgtcagtcgcgtttatatttacatcgagtagttaattttgaaattatacaattatacaaataacatctcgatttggtgcggggtttcgttgagttgcgttgcgtcgccctcgacatgggtggtcttccccggtgtgcattttgagaacgagccatccttgcttccaatattcagttcgcttcaataagggataggggtggggtttcgcgagagtgtgaggcaattgcgcggtgatcggcgagagagggagagaatctcaattgaataataaagttgtatggaaggtgcattcggtgaccgcacatcactctcgcgacgacgacggccgacacaaagcgaaagtgtggagggaaaagagaaacaaaaccgcatacaatgggtgacggacggtggtgttggtgcgatggaacaagttaattctctgagattcctccattgcactgtgtacttacgggcgtgtcgaggaagacacgcctactacgggagcgatgcaaccaatacagacgcaggtcaattagcgaggaaatatgtttgtgttgatgaatttatttgcgctcggtctcgtttgctctcgcgattgtgacataagaaggtctctcttttgcctgttttgattcaatcaagggtgcgatggtgtgcgttgggtaaactgatcgtcttgattagggcctgaggattgaaagagcacggagctacatggagatggatgcaggaacgggatggactgagagttaatagagacaccaggagaatcagcagccgcagcaaaaaacaaaccagtcagtttggttgagctctcactcagctgtcagtcacagaggctcagatcacaggtgacatttgactatgtcacatcacaatttataatagaggatagaagagctcgctctcttggaccacgcgcgcgatcttcggatcatcggttcttcgcattctttcttcggtgcttggatcttgtcgttcgttaattgtgttgtgtggcctagcctggagagattccatcattcaatttgctgtcgaaatcggccggacgcgtgtttgttttaccccttggagggtagtgattctttctcggacgccttacaccctccgttacacttcgttggtgtcggtcctcatggaagcacatgagctcgcacagctctcggtttgacgttcggtgctcgctcgagtgtgaagtgtaaagtgttggtttgcgaatgacgagccctcaagtgacgattgatagaggtttaaaaaattatcggaggaaattctcctagtgaaatttttgtgcaaaacaatttagaacatcttttaagtgaagtgctcagttttagagaagacatttggaagaccatcaagcatggcattggaagaccgttgcagtccacagagtgctccaagtccgccacaccatcaccatcatcaccacagccagagtccggttcactccgcaaccgcaacgatgatgagtccgaccgcaacgggaaccatgcgagtttcgcctagtgccggagagatgtcgccactggtaccaattcctccgatgcacattaagcaggaggtcacagatcagattgctccaccgccaccccagcagcccagcatcaccttctcgatctccaacatcctgagcgatacctttggaaagaccccagtggttcccatcgccactcaacagcccccgagccctatggcaagccctccctgcagttctgactccaacagcccaaatggcccatctctgcaccaccggagagatagcctcttccgtccgtacgaaatcagcaaatccccaagattatgctccagcaatggaagcagcagtcataacccgtaccacacggatagcgaatctcaggactcgacctgctatgaaccgcaaactccaaaccctgccgccagtatgctaatgttcaacaacaaccactaccaccagcggatccctacgctgtacgactttagcactaagaccatccctagcatagacccaagagctgctctcctgaacggcttcagtgccaccagctatccaaaactccacgaagagattatcaacagccatcggaaattccaggccaaactgctggagagtcaggtcaaggcagcggcagcagcctccatcggccatccgcatgccatgcctccgctaggttccctgtgcaaaacggtttcgcagatcggtcaacccgcggctccggcaactcccatcggttccaccaatggcaccagcggcaacggcgccggaacacccaacagcatcgccagcagtagtgccagcagtcccaagttgagtccgaggccgattcctaaaccgacggcaacggttgcgtccagtttgccgggaaatcacggtggggaaagtcataggaatggaagtgatggtggtcatcatcacaatggcggcagtaatgacggggggatgtcctcggatgatgcccggtcggaaacgggcagcagcaaggatggcgaaagtgggagcaatctgtggcccgcctgggtgtattgtacccggtacagcgatcgaccgagttcgggtccccgctaccgacgaacaaagcctcccaaacagaagggcgaaactgaggaaaagcgccctcgcaccgcattcaccactgcccaactgcaaagactgaagaacgaattcaacgaaaatcgctacctaacggagaaacgccgacaagcactgagtgccgaactcaatctcaacgagtcccaaatcaagatctggttccagaacaagcgagccaagatcaagaagacgtcatcggagaagaacccgctggccctgcagctaatggcccaaggtctctacaatcactcgacggtgccgctgaccaaggaggaggaggagctggaaatgcgcatgaacggacagattccctagacggcggaagcttccggagcaacactcactttggaacaacgtgtgttccattttgtaccgcgtgagtgacgtttcgttgtaaatcctctcgcaagcgatccgtcaccagtcgtggaaaaacgcgcgagaacacgaactaagcaggcgaggcttgatgtgaacgcggaggagggtaggaatcgagaaacaacaaaaccggagtacaattacatttaaataattgaattaatactcctggcgtctccgctggttgtccttccttctgcccctccgtgtaagacaaacaaatcccggtgatgaactgaaatgctaaaccgaggccatcgtgttgatggtgcggtgaaagatgctgtataatgtaaatatataaataatattgaaaacgcttcctttgctcgccagtgtgaggggaaggaaactttctcacgcacaactctgacgtcgagcaagtgtcagaggcgaaacgagggagtggaaagtagagcaattttttgtgaatgtttgtttgttaaattggaagctgcaaggcgaatggacggaaagttgttgaccacaagaaagagttttgttcaaattaaaggtttttgacgtatcggattcaattgtcatgtttgattgggcatagaattaggcttcttttcggtagtaaaaatccgattcatagtgcaatagaatggtcaaccacttccaacacttcattttccttcagtttcccatcgaaattgtgattaggatcaacagaaaccgaatagcaataaacttaggaaagttatagatgcgagcttcaccccatccagtgtaaaaaacgaacttcgccagaaaaaagtggcagttgttctcaagcatgtaaattattctcttccaagttttaaatattctacgttcaaatctatacatacagagcacactgttcaagctaaggtagcagaagaagaagccattcattgaagcaatcacaagcctttgccgcatgtaaataaccgcacatccctcttcatttctgaccccccagaagcaagaaggtcgagtgtaaaaaattagctactaaaatttaattgagattaacagcaatcgcgtagtaggctacccctaccagaaggcaacagaaatcatcagaaacagataagcctgcttcgtccgccaggttcattcccacgcggaaaaattgaacaactagccaccgtcgaaaagcggaccagagctacaaagttgataattaattcccaaacgcagcaacaccagcgccagcctgtcagcgaccgatccgtgaaaccagttttgcgtgcggaggatcgccgtcgctactcgttcctaatgcaaaccagtgttgccacctttaatactgcgttttgagttcaaacacctctatgactaattttgtaaaaaatctagatcaaatctacgcaattttcgaaattttgtttggaaatctataatctggttacacagaattgtatctgaaaaaaaaatcaatatgaccacaaaaccaatctgtatatttggcatcactgtagcgaaccagtggagaatcatcgttggaagtgatccaaaagcgcgtaaaaacagcaaccagtcgactaaccgaacgtgcgtggtaggagtgttcggtttttcgcttccgtcgttgttttagtaatctaatctaaattatgtttaattatgcttcgaagcggtggtgggtttgggatcgcttccaacgtaggaacggggtgttcctcctactggttttgagagacactttgcatatgattggcgaaatggtaggctggcagatactttccccttgaagctcagagggcgagcaacagtttatcgtttcatctattttttttttgtttcgcttcgagattgctatttcttcttataatactatgattaggctgctacacggcacactaccaaccaatataattactcctagatgttagcacgtaggattagaggcaaaacccgagaaagagaactaaactatagcagattatcgcgatatattgtagacacagagtagaaagagaagacacaacctattatatattattttagcccttaggaacccgcatgaaaactgcaaaagagagcgtaataaaatacactcatgtgatattcaagagataaatggaa

SEQ ID NO: 38 - DNA, 1454 bp, Aedes aegypti
cgttcacaacgtacgttcatatcagtttactcaagcaatacgaagacgcactcgtctttcggagtttcgatcagttcagttcggttaagatcgctgaaggataaataataaaaacaagaagatatctgtggaagtgagagtttaaccaaaacaaaacaaaaaaaaacattacatgaacaaattgttccagagaagtgcagtgataagcaaggagctagaaagttaacatctagtgtgaaaaaaaagacatttctgtgaagtgacacaaccaaacaacacaagaaaaacacaatggtttacgcaaatatggtagcagagccaacgatgggaggcaaaatcccacagccaggatcactggagccgctgtcgcggacttaccagtaccgcaaagtgatgaagccgatgttggagcggaaacgccgagccaggatcaatcgatgcctggatgagctgaaggaattgatggtctctgctctgcaatcggaaggtgaaaatgtatccaagttggaaaaggctgatatcctggagcttaccgttcgtcacttgcacaaactccgtcggcagcagcgattgacagttaacccagtgattgatgctgaccgattccgtgctggattcacccatgccgccaatgaagtttcccgctgtttggcatccacccaaggagttgacatcaaactgggcaccaagcttatgacccaccttggacacagactgaacgatttggacaaagtttccccactttccgttcatgtcgaacagaacttgcagtccccgcctatctctccgttctcgacctcctcatctacggccgccgatctgcaatcgtatcagatgcctctgaccccacagtcgtatcgctccggaagtggcaactccaacagcccgtcacccaatccaagtgagtgctcttccaccggtagcgaccagcagacctccggcctactcaagattcaggaatccgtctggcgaccgtggtaagcgctatttaccttcggttggaaccggtaccagtgaagcaagacttatcactcaacgcaaccaaattcctcaatccagagatctcaagagacaacaagacaaaaacgaaaccttttaaaaacaatcaatcaattgtatgggtatagctttaataggagataggaacatttcactctaattgtttttaagagtttgtgatattaacgttctttagggactagaccttaagctttttgttagtactttttcgctgagaaagacctgttttatttctgcatttagctcagaatttttttagtagccagtagaagatgtttgttctcaaaatagaagacttaagattgtttacaaattgcgcagtttgtggcaatttctgtgattataagcaaaacaaacaaaatcaaaaagttctttttgatcaagtagcgcgctaagatgaaaagaataaaacaatgactattaaatatcaaatc

SEQ ID NO: 39 - DNA, 22029 bp, Aedes aegypti
cgctttgccgaaagtctccagaagccgcttcgaacctatcggatggagttcaatctcggccgtccggtgagcagcagcaacgccaacggcaacggcgacggtttccaggaaatcacggaggacgtctacaccagcacctactcggctacgcacggtggggtaacatctcgggagggatccccgaagaaagtgagtaaggtggaattgcactcggatgtgcaccatcagccaaacgggggcagcaatgcgtcatctgtccagtttaccgagatccgtagtttgaagcgagtttcccgcgctaatgaagcggatggtgacaccattctgaacacaccgggcatcagggatccggtgagtggtcgcattttgacggttggggaagcgattcggttgaggatactggacgtacggagcggtcagttgaatgtgaacggcgaacggttgagtctggaggaagcggtacgaagacaactaatcgatgtggatctggtggataacttgttgaggcccggggcagcgctggatcgcgacggacggcctatgagcctgctggaggtgatacagaaggaaattctcgaagcggaaaacggctacgatagcacggaaaaacgaatcaaggtaacgaccagccacgagtcatctcctgtcaagcgcacctccactgtaaagtataacgaaaaagaagcaaaaagtattgtcgatgcaattaagcagggcctggtcgataccagcaatggtctttaccgtacggagaccggcgaccttattacgctggccgatgcttacgagtacggttacttgattcgcaatgagacaatcaagatagcgccccacacgctctctctgaccgattccatcggccagggtctggtggacaatggtggttgggtcattgatcgtaacactggcgatacgttccgactagattcagccatcgcgaaaaacctagttaatcccgacctgcgggaaatcgtcgacaccaagaacgatatcaagatcacggtggcacaagccctagaacagggtattctcaatgctaaaactggccgatacatgaatccgttaacgaaagaaaaactaacattcacagaggcacgaaaccggcagctcatctgcaaaccaatgacattaaaagacgtttgtgatttaaatttgttcgacaagtcggataaaatcgcctctcctacaagacgcgagcgggtcaatattccaggtgctattagtttaggtgtgttagatagcgatagcattaagtgtgtatacaaaagtaagggtgaactgctgacgttgaaggaagcccttgagcaagagattattctcccgttcgagaaccgcttccgccactccgaaaccggtgagttaatgaccattccagaagcagtcgatcgaggtctgatctcatcggttgccatcaaatcaattttcaacattttcggctttaaggatccacattccggggaattcgtttcgctcaatacggctctagctaaaaatatagtccgcaagaaggagggtcgtttccagttagatgtagggaagggagttctcgttgatctaaacgaagctgttgctcagggacttatccgtccagaagttcacgaaatgctcaaccgaaaaattggcgtatttgtcggagaagagcacgagttaactttaattgatctagtctatcacgatcttattgacactaaaactggtttcctcttggagcatggcaccaccaaagtactcccactagagccagccatagaacgtaaattcattacaccagaaggcgccttactgttaattagcctattgaacatcacactcactacggaaaccgtcgtgaaaacgatcaaacgctatgttacaatcacgcacaccggggagcaggtggaaactcaaccacaggtcctgctttccttcactgaagctgttcgtagggggttgatcgacgaaaatacccgcacctaccgtgaccccaacaccggtaacgtgtattccgtacaacaagctttaaaccatggccttattctgccagacacggaagcggttccggcgacgcaggaaattggtagcgaagttcctagtagtaaaccttcttccattcctttacaatttgaaactttcgttacgaaaaacagcaacgccaaaaacattcatataacaaccgagtttttggaccgagagcgtaaggcaactcaaacttacgaacttcctcctgatgggtggcttctagctgatgctatctcccaaaaactattcgatcctgttgcgggtctatttgttattcccggaacagatcgtttggtcagttttgaggaatgcatcaatttgaagatcatcaaccgccagtcagcattcgttgttgatccggaaaaatccaagcgccgggtcactttagatattgccttagacaggaagatgctcgatgctaccggtcactaccaaccggcgacatccgagaagatcacgatgaaagaagctctcgatcggaaattaatagtttttgagcaacccttggatcggacatctgatggtgctgccaatcgcacaattcaggttactaaaattcccggtcaacctgatgttattgaggtttcttccatggacagtcaaatggtacaggtcaaaagccttaaaactcccgaactccttagtccagagccgttacaattgactccgaacatcatttacgatccttctacggccctcgtgattttcacagatacgggtaaatctgacaacatcgttcacgctgtcacgagtgggaaacttgatcccaatcttgtaaagattaaggatcccaaaacgggtgatgtgatcactattaccgaagcggtaaaccgaggtgttcttgatcctcaaacaggggctgtcaaagatccatcagggcgatcgataagtttgatggaagctgtacaagcaggtgctttagccgtttgtggcgcacctttggtagctgcggctggggctcttgatttgctcaaaacgataattgatccttccaccggagaagagattccaattgaattggcttacgaacgtggtttaatcagtaagaaagataatagtcgacgatcatctgatggatttgttgtttccgtgggtgaaggaaaggaatccctggttctacagcgtgtgaggaaatgtgttttgcgtccaaaggatgcagcagaaaaaggtattttggataatgctactgctcaaatacttgaaaacctcaaactttttgacggtgggttgtctttggaacaatcaatatccgctggacgtttggatggaaaccagggtaagatcgttgatccccaacgtggacatactttaaccatcaacgaagctatgcttcgtggaattttggatagaaacggtacgaattgtgtctttgttcctttggcaaaatctctgtccattcctgaactcaaaacgcaaggccttttggacgtgggaagctccaaaatctaccatcctgaatcaggtcagcttcttacgctgaaggaggcaaccatttgtgaaattgttgatcccctagctgaagtcgtagtcaatggcactcaacggctttctttagaaaaagccattgagaccggtctagtagacgctgatagatgtaccattggtaatatgaaactgaacgatgcaatcgaacacaatgtgtttattgtgccaaattattctgctcaaatacctcccgtagggatgaccattcctgtgatcgtgaaacgtcacctcttagatatagatcttaaagaaataacacatcctatcagcaaagatcgtatgacagtgaatgatgctatcaagaaagactttgtaatggcaatcccttacactccgaacgccaatgcaacagatatcgatcaggcacttgatagaaaactgatcaatacgcagagagtgtctttcacaaatccaatgacctccgaagagctacctctacaagaagccattgaaactggcttactagaagtgaaaccacttccagaaatggtccgaggaatgcaagccaacacggcagtgacatcgatccaggaaacgatatcttctagtcacacaatcacgacaaaaacggttgaaatccaatcgggttatgcactgatctcggctacagaggttcaggacaccgcaaccggagaaattatatcagttgatgaagccaggaaacgcggcattctcagcgacgaagaacaaatcaagaatgaagtgttgaacgaagaagtcaacatcaattttggcgatgcgctacaaaggggtttgctggatgtcacaaagggtatgttccgacatccagacagcggggacgtgatgtcgatttcagatgctgtcgacaaagggtacatcgcaacaaaaacgacgagtgatgaagcgttgaaccgctcaccagagatggttcacaagacaagcgatggaaaacttgcagaaaatattaaagatgctgccaaaatgggtctaatggcagtggttggggcaccagttttaggtgggatggcaatagctggagcagtgaagaaggtatttgagaagaaagaaagcgaaaaatcaagttcttcgacaacttcatcccatcagatcagttcaaccacaatccaggtggtaacgaaaacttttgaaggagaaccatcgataactgacgtttctctaactgacattgataatgatactaaagatgctaaaggtaaaacacctacagctggtctggttgacgtgaaaacgacgatcgaggaaattgttgaaccaaatacggttgaatctgatcataatctttcttctaacgatcaacaaagcagcaaaaatactgaaccagtagaaaaaccaatgactacagttgaaatcagtgaggaagatcctaatcaactattagaaacaactgagattgttactacagttgttactgaaataaaattggaaactgtcgatactgaaattgttgaggatgtcaatcaacctgatacagatttgcaaaacttatcttcgaccaccgagtcgaaaggtgattcagtgaaggaacccaaagatgatatctcatcaattccttctgaaagctctgttgtggttcctgtcgagccaatcgcagaagcgacatcagcaaagcaacctgctgaggcagaatgtgtgattgctgatcctacgaaatcaatgacgaccgacctcaatctcgagctagcacccaaatctgagctagttactgaggaactaccgacaaaatattcagaaaagatcgatcaattgaatgacgataataaattagtaaatgatctttccggcaatgctacacaaccctcaggcagtgttgaagatatgacagaaaaggttgaaaaacccttggtcggcgataagcagccaattagtagttcatcggtagacgaaaaagccgaaatttctgaattgtctcctgttgataaaattgaagaaacagctgtgtcagatgaattgaaatcagatacacttgttgaaaaactggtggagaaactggcaccagaaccatctgtctctaatgatgatggtaaaatgtctacagaacttcaacttaaggagcaacagcaacctgttgattcgaaggcagaagtagttcaagaaactgctattgttggtcaaccagtaactgatgatcagagaccaaccgaattagattcttcagaaactagcccacaaaaagatgaagccctggtcacacagaaaaaatctcctgaagacctcatgcctggtgaaaaagattcaaaactagaggtaacttgtggtcgtgttgaacaacctccctctgaagaaaaggttcacagcagctcaggtgctccatcaacgttaccattagaatttgctgctgaaacaaccactgcgatggaacccttggatccttccgaggtttcagcaccatctgttgaacagatttccgttgaagataaactcgacagttctgcagttcctagcgaacaaatcgaagtatcgtccaaatccgcagcaccgactgcttcggaaacaataactccgagtgacaccatattccatgcgaaagagagaacccctgagcgtccaactgaactgaagacaacaaaagaacccagtggcagtgacacgggaaagaaggtgctggacgctgccaaactgggattgatggctgtcgttggtgctccaattctcgcaggaaaagccgttgtagacgcactgaaaaaagatcgttctgatgggcaacaagaattgcctgagtcaaaaactcctaaaaaggcgtccattgccgatgccacagctgcattcctcgaacaggaacgatcacccggcgatggtaaacgagagttcagagaacttgaaaaaaccatcggaggtattctagaacaggtagatgccgatggaaagttgctgaaaacaccagaaaagcatagcgaatcttacgagaggcttcctcttggagaagcaattgctcaaggtaaaataattcctaaagtgtgtcgcgtgatggtagacgataagcagatgccatacactgttgaagaaggacttaacaatagaaatgtcaggatctacgatatcgtggatgtactttctcagcaattggtttcgtttgtcgagggtgaggccgatggtttggtgatcgatgaaacccttacgaagcagaagttgatagatctgggtgtgtatgatgcggacacaaatagctttatcaatccgaataatggagaaagaatttctttccgcgatcttgtctataactctggtttagtcgatcctaccacaattttcgtcatggatctgggtcgtgacaaatatgaaagcttagatgtagcactccagaaacatcttattgacaaaaatacaggacatatgttggacaacaagtctggtaaaaaggtgaagttcgtcgaatgctgcaagcgcgcttgggtcattcaaagggaaccctccagtgaaaatctcgatcagtctcctacgttatcggaagtattggacgctggccaattcaatcctcaaacaggtgaattggttcagaacaaccaaagcattccgatcgccgaagcgttacgagctggcttcattgacaatgattcggtatcggtgcgagatccaaccgacggagaggttttgcctctacgagttgcgatcgagcgtggcatcattgatcttaagctgggtgtgattttcaatcgggaaactcaagaagagatcgatctaaatgatgcctataatcggggatacatgttggaaggtaaacgaaagccgatttctcttgaggcagctgtacgcaagggtttgtacaatcctgaatctggattgatcttggatactatcaccgaagaaatggtggatgttcaacagtctgttgacaagggtattgttgatccgaagatttcgaacgtcaaagacactaaagaaaacgttctagtgcctttgcaagatgctttggataaaaagttgattgattccgaatccgggaagatgaaggatactgagacagatcagttgcttccgttggacgtagccttggagaaaaaaatgatggacacaaaacaggtcacgcatagcttgattgaggttttgaataaagaattttacgatccaaattcaggtaagatcttaaacccgggtaatggtgaagaaaatattttgaaggacgcaattgactcacagctagttgagattgatagtgtcttggttagagatgaacagaaggataaggttgtcaaatgtgaagaagctatcgaatccggtttgttggatgatgttcgaggtgttttgacaaggcctgaattgacattagatcgtgcctaccaaaagggttatattctgagcaataaaaaaccaatatctttaacagatgcccttttgcgaggtttctatgatcagactagtggactgctgcgctttgatggagcgcctggagtcacacttgagaaagctattgctgatggggagatctccactgctgatctgattgtacgcgatcctaagagcagaggagttataagcctatcggaagctatccgaggaggtctggttgatcctgtttcaggaatggtgattgattctggatctgggttgagcatggggatgttggaagccttggacagaggcatcattgtagtagctaagcgtaggtgtagcttgccagatgcggtgttccggggattatacgatcccaaatctggtcagtttagtagtacaacaactccggagaagatgtccacggagcgtgctataagacgtggcatgctggatccagagtcaaccattgtaaatgtagcgggtaagatacaaccatttgaactggctatcgagaatggtacggtagatgtaaaacgaggtaccattctggacgaagaaggtaataagattgattttcgtgaagcattcgaccgtggtctgctagttgaagtgcggaaaccaataagtttgagtgaggccgtcgttaaaggtatatacagagaaagtagtggaatgttcatggatccaaagactggtaggaagctaacccttgcacaagcgattgccgaaaaggttatcgatccaaattcagttcaaattaaagatccaacgactggtttctatagagatcttgatttagtggaagcgattgagagcgatttgatcaatggtcaagactccaacgttaaacacagtggcgataaaatcactttgaagcatgcattcgatattggactactgtacgacagtaaagctccgatcagtttgcagagagctatccaccaaggaatctacgacgataaaagcggaaagattgtagatccagtttctggacgtaagatcacgttgcacgaagccacgaggaagtttgtgatcaatcctcagttgccgtgctactttaacgagaaagacgaggtcatgcttaatctgttcgaaacatgcagagccaaattgatcgatcgaagggaaggggtgttcaaagaacctggaagtgaggttttcattcctttgaatgaggccctcgccttaggtttgattgtggacattgaaagcgccggattcgggttgtacgaaactctcgctatgggattctatgacaagaaaagtggaaagatcattcatccgattacgaaccgaaaaattacattggaagaagcttgtaaggaagatatcgtaaacccggggtcttccattatcaagaatactgtcactggtaaattcatccgcttggatgacgcaatcagcgcgaaaataatcgatgataaagagggtgtgtacgttcttccaaagggaaacaagatagatttacaagaagctagacgcaagggtttaatagttaccaaccaaaagctgttgtctttggagaaggctattaagctgcatttgtacaggcaagattctggaacatttgtggaacctatttctggtgaccatgtgaatctgcaggaggctcttgacattggacttctggactttgagacttcggtttataaggatgccgtgacaggacaggacaaaccactcagggcggctatcgctgaccaggatatagacgttcaaaaagggaaagtattggataggaaaactgataggacgtataatttcgacgtagcgttcaacaaaggtttgctggttacggttcagagaccgattaccgggaagatcttagaaaggaaggagagcatagataatttgcttcaggaatcgcctctaggtaagagcccgaaggaaatgagcttaaaggatgccttgagacatgaaattgtatcaattgataagtcggttatgaagcatcccaagagtcgagtgttcgtgcctctgagagtggcaatccaggagaaattgatatctgaagatggtcgtgccacagttgatccgaaacagtcgttcttcgtgtttgatagtagtagcgtagttttcgtccagaaaccattgacgtttgatgaagccgttgaatctagtctactggacctatcgaccggtaagttcttgtacaaaactccaacgattggtggtggtgcgacagaaagcgatgtaactgaactgttgaacctgaaagatgcgattggtcaaggttacatcgatcccgaatcggtcctattgaaagatggagctaagaagaagttcctacccttgcctgaagcgttccgcaagggattgatcgatgccgaaaagtcaaatgtgctggataccaatacgtccaagttgacaactctccagacggcagtcgacaacggtctgctgataactccgaaacgtgcaatttgtcttatggaagctcttgactataacatgtataacaccgaacgcggtactttcgaagacccgttccatcctaaccaactcaaaactttaaatgaaaccatacaatctggtttaattgacccaacaacaacaatggtacgtgacataagtaacaatagtgtaattgtgccgttgctgaccgccgtcggcaacggtctaatcgatccaattggtggacatttcaatcttgaaagtgaacaaactaagatagatctcgtgaaagcccgcgaccgaggatatctcatacaagcagagcaacggcaagccgtggtcgaaaagtttgcactgtgtgaagatcatctagccaaacttttggaatggatcaccaaggtcgaacatgaaattgcttccgttggtggaccaaaggaacgcgttgacgatttgagaaaccaaatcaattcgctcaagcaaattaaggatgacatcgacgcacaatcgcgaccggttgcgtcttgccttgagcaggttcgccaactggtcctaaccggtggagatgtcctgagtgccccggaagtggctgccctggaaagttccggccgtgaactgcgttctcgcgtagacaaggcccaggaccgtaccggtaagctacttcgtcgtctgggagccgctcgcgatgaactcggaaaacttcgttccgaattggataccttctccgcttggctacagacttcccgtagaacgctcgaagataaggaaagcaccctttccgacctgaaccgcctgtcgacgcaatccgagtcagtgaaagaattccatggcgatgtcgttgcccatcaagcggatcttcgattcatcaccatggccgcacaaaagttcgtcgatgaatgtaaggactatctatcggttctgaacgacttccgcacaacactgccagagcgactgccgcacattgaacaggtgtccaactcggacagtcccattcgacaggaagtttctttggtcactgcccaatatcgcgacttgctcaatcgtgccaatgctctgctagatcgcttagcaggactcggaggtcgccagcgtgactaccaggaatcgctggaaaaggttcgctcatggctgcgagatgttcaaccccgtgtaagcgcggtgttatctgaccctattgctgccgatccacaatctgtccaagatcaaatgaatcaaaccaaagcactgcaaagcgagttcttatctcaaggtcgacttatcgataacgtacaacatagcttggatgcattgttgaaatcccttgctggacgtctcagtccatctgaggtatccgctttagaaatgccagttgaagacgttaaggataaatacaaccaactcctggaagcactgggagatcgttccaaactcctggacacagctttggttcaatcacaaggtgttcaggacgccctggatggtttgtctggttggatcaaccaatccgaagacaaatttaagctacaaaaccgtccagcgtctctgatcaaagatcgcctcaatgaacaagttcgtgaacatcgtggactgttaaatgatcttgaatcacatcgaaccagcttagaaagtgtaacactgtcagcacgcgagcttatggccaacgcttctaacgcccgtcttgccaagagaatcgaaaccaacttgagcgatgtcaccggaagattcgaaaagcttctcgacaaggccctgaaacgcggcgaattcctcgaagacacgcttgcccagctgaataaattcaacgaagatgctgccgtcttggaacaagagctatccaacctacaggaagcgcttgacggtagagaactgacttcactgcctgcagatacactgactcagcgtatgatcgagctgacaagaaacaaagaacatcttcgtccgctgtacgaaacctgtgtaagactgggtaaagatctcatcgccaaacgtgatgtgaccgacaccggtgttgtcagagatcgtattaaggctttagaaaactcctggaagaacctagatgttaccctggaagaaaaactgaaactgtctaaacaaaaggccgagcaattgaacgcatatgaagacctcaaagatcaagtgctagtatggctatccagcattgaaaccagaacaaacaacttagctccagttgctgtagatatcgaaaccatcaaatatcaaattgaagaagtgaaaccattggtcaaggagcatcgtgattatgccgttaccgtcgataaagtgaatgatttgggtgctcaatatgatgcattggtccgtccagacagcccaacccgcaaacgttcagtgtatagtccaatcaaacgatcaaccgtcagcccaatgcgtcgtatgtcgggagatgcacgatcacccagcccaaccaaggggcttggaatagtgggaccaagcccaacagtgtcccccggattcggtagccggcgatcatcgcaagatggtttccaactaaccgaccttacaccgatccagcaacagctgacggagatcaacaatcggtatagtttggttggagctcgtctgaacgatcgccaaaacgaactggactccgtcagagatgaagttcgcaagcatcaggaaagtttgaaaactttggccaacttcctggacaaaatccaacgccaagtacccaaggaagtgatcagtaataaggacgaggccgagcgatgcaacaaacaagcccgcaaggttctggaagaaatgtacgaaaagcaaagcttgcttgattctaccaaagcacaggtgaaagatttgctgaaacgcaaacccgatgtacaaggtgctgatcgcttgcgatcagagttagatgctgttgccgatcgttggaagaatctgcacgacctttgcaaggaccgcatcaatttctctgaacagctacgtgatttcttagatacgcatgacaatctcaatacttggctcggagccaaagagcgtatgctgaccgtactgggaccaatttcatcggatccacgcatggtacaaagccaagtccaacaagtacaagtactgcgcgaagaattccgcggacagcaaccacagttgaaccacttgcaagaggttggcaacgctgtgcttgaatatctccgagagtcatcgcccgagggacaatctgtagcatctaaactaaaaactattcagaagaaatgggacgatcttgttagtcgcctagacgatcgtgcacaaagcttgggagctgcagcagacacgtccaaagagtttgatgcaggtctcaatcgcttgcgcgaagccttgcagaacatcagcgataatttggatgccttgcccacagaccgtgatcatcaggaaacattacgaaagatcgaaaacctggaaagacaactcgaaggacagcgtcccctcttggctgattcggaagctgctggagaagctctttgtcgtgttcttagcgatccagcttcgcgagccgatgttaatgctcgattggctgctgttggtaaacaataccaaaacttgcagaaaaagctggataacaggaaagctgaaaccgattctgccctacgagatggacgacaattcgctgaaacatgtgcacgtactcttggctggctgtctggagaactaggtaatcttactgaacggctattggtatctgctcatcgaccaactcttcaacaccagatcgatactcatgaaccgatctaccgtgaagtaatgagccgcgagcatgaagtaatcatgctgctcaacaaaggccgcgaactacaagaaaagccaggacaggtacctgatcgcactgtacaacgtgatttggagaaaatttcccaacaatgggaacgcctgcgcaacgctgctgttgatcgtcagtctcgactacaaacctgcatggaacactgtaagaaacattccgccgcatcagaaaccttcttggcttggttgcgtggcgccgaagataagctggcatcgttcaagcctggtattcttaaaaagtcgcagcttgatcaacaactgaaggaattgcaaacattccgctcagacgtttggaagaaatcgggagaatatgaaaacacccgtggtctaggcgagagcttcatcggagcatgtgatgtggacaaagatccgatcaaggctgagctacaggacatgaaggatcgatgggaacgtctaaataacgatctgatcgctcgtgctcaaacgctggatacatgcgccaaacgtcttggcgattttaacgaagaactacgagatcttgaacatgccgttggtcgctgcgaagaccgtctagcagctcatgatgctttgggaggtgctgctaaagatcccaaattgttggatcgtgttaagaccattaaagaagatgcctctgcactgcgtagaccattgcaatcagttcgcaagcttgcaggtgacattgctgttgaagctcgtgctgttggtggcgatgcagagcacctgaagcacgacgttgatggaatttcagatcgcatcgaagatcttcatgctcgtttggatgaccgatgtggtgagttgcagtcagccgctacagcagtatcgcagttcaacgatgcagttaaagctctgggagttgacttgaacgaattggaaagccaaattgattcgttgagtccacctgctcgggaaattaagacggtggtaaatcaacttgatgaagttgctggtattttgagcaaaatcgatcgtactgctggtcatgttgctagcgttgaacgcgctggagaacaacttgttgattcaggatttgcgcccgatacggttggcacacgagaccagattggaacattgagacgacaacttggaaagctggaaaatcgagctcgcgatcacgacgatgcattacagaaggccttgaaggctctgcagaaattctatgatctacatcagcacacattggacgatttgaatgatgtggctgatcaagtgaagaaaatgaaacctgtgagctcagaattggaacagatacgcaatcagcaagacgatttccgccgtttcaagcaacgccatgttgaacctttaattgtgaatattgatgaagtcaaccgcagcggacaggatctgatccgatctgctcaaggtggtgttccaactggagttctggagaaagatttggagaagatcaatgagaaatggaacgaccttaaggataagatgaatgaacgtgatcgtcgattggacgttggactgctgcagtctggaaaattccaagaagcattggatggtctttctaaatggctcaaggatacggaagaaatggttgcaaatcagaaaccacccagcgctgattacaaggtggttaaagctcagttgcaagagcaaaaattccttacgaagatgttgatggatcgacaaaattcaatgtcttctttgttccaacttggacaagaagttgcagctggatgcgatgcttctgagaaggctgccattgaacgccagttgaaggaactgatgggacgtttcgacgccctgacagatgctgctcagacccgtactctggacctagaacaggctatgcacgttgctaaacaattccaagatcagctgattccacttaccaaatggttggatggagcagagcgagcagttaaggcaatggaactggtgccaactgatgaagaaaagattcagcagcgtattcacgaacatgaacgtttacatgatgaaattctgtcaaaacaacctgactttagtgaattggctgacattgctggacaacttatggaactggtaggtgatgatgaaggagtggtgctcagtgaaaaggttaagcacactactgatcgatacactgatttggtccatgctagcgaaaatattggacacgtactaaatgaatcacgccaaggcctacgccatctggtgctaacctatcaggatctggtttcctggatggaaaatatggaaaaccgtctacaaagattccgagttattcctgtgcatactgagaagctactagaacagatggatgtgttggtcgaactcaacgaagatattgccagccgatcaccgaacgtagaatccacggttgaagcgggatcagaacttatgaaacacatttcctcggatgaagcactacaactgaaagacaagcttgactccctgcagcgtcgttatggagaactcacaactaaaggtggagatctattgaagcacgcacaagatgcattgccgttagtgcagcagttccatcaatcgcatatccgtttagttgattggatgcaagctgccgagtctacattggcaacaggagactccaatgaaattgacattgtacgtttggaagctgatttgagtgaaatgagacctgtgcttgaaacagtcaactcagtgggtcctcagctatgtcagatatcgccaggagaaggagcttcaacaattgaaggaattgttactcgagacaaccgcaggtttgaagcaattgttgaacaaattcaacgcaaggccgaacgtttacaccttagtaaacaacgatccaatgaagtcactgccgatatcgatgaactgctggaatggttccgtgatatggatgccactctacgtgacgctgatccaccagcaatgacgcctaagctagtacgagcacaactgcaagagcatcgttcaatcaacgatgacatatccagccaaaaaggaagggttcgagatgttacgtcggccgcgaagaaggttttacgagaatcacagcccaatgaaaataccatcgctcttcgtgagaaactggaagatcttaaggaggttgtcgacacggtggccggactctgttcgaaccggctggctatacttgaacaagctttaccactgtcggagcactttgctgattcacatactggcttggttacttggttgaacgacatggaacaccaaatctccatgctcgcaatgccggcacttcgtcctgatcagatcgccattcaacaagataagaacgaacgattgacacaatctatctccgagcacaaaccgcttctggataaactgaacaagactggagaagctttgatggctttggttgctgaagatgattcggccaagatcagtgaaattcttgaatcggataatgctcgctatgcagccttgcgtacagaactgcgtgaacgtcagaatgcattggaacaagctctgcaagaatctagtcagttctcggacaaattggaaggtatgctgcgtgctctacaaaacactgccgagcaggccaaccaggccgacccgatttctgcccacccgccaaagattcgggaccaaatcgaggataatgcagcactcgttgaagacattgaaaagcgtggtgaagcctttgctgccgttaaacgtgccgctactgatgttatttccaaggctaccaaccaatccgatccagcagtccgtgacatcaagaagaagttggacaaattgaacaacctatggaacgaactgcagaaaactacctctaaacgtggatcggccctggataacacactatccgtggctgacaaattctggaaggagatgcgtgccgtaatggaaacactaaaggaactacaggaagcgcttcagacacaagaaccgccagcggcccagcctcaagccatccagaaacaacaggtcgctcttcaggaaatacgccaggaaattgatcaaactaaaccggaagtagaacaggtgcgccgaaccggtagcaacttgatgtcgctctgtggcgaaccggacaaaccggaagtgaaaaagcacatcgaagacctggaccatgcctgggacaacatcactgctctgtacgccaagcgcgaggaaaatctgatcgacgccatggagaaggcaatggagttccacgagacgctgcagaatttgctgaacttcttggccaaggccgaggaccgcttccagaagttgggcccactcggatcggacattgaagccgtcaaaaagcaaatcgaacagctgaagcacttcaaagacgacgtcgatccgcacatggtagaagttgaggcgttgaacaggcaagcagttgaactgaccgagcgtacttcagccgagcaggcaagtgccattcgtgagccattgaactcggtgaaccgacgctgggagaatctactccgtggtatggttgaacgacagaagcagctagaacatgctctgcttcatctgggtcagttccagcatgctttgaacgagctgctggtctggatcagcaagaccgattccaatttggatgaattgaagcctattcctggagatccacaattattggaggttgagttggccaagttgaaggtattggccaacgatatccatgctcatcaaagctcggtagatacgttgaacgatgctggtaggaagctgatcgagaacgatcgtggatctttggaggcatcaaccacccaggataagctgcaacagctgaacaagcaatggagagatctattgcaaaaggctgctgatcgtcagcatgagctggaggaatctttgcgtgatgcacaagcattcaccgcagagattcaagatctgcttggatggttgggcgatgtagacgcaattatcggtgcaagcaaacctgttggtggacttccggaaactgcttccgaacaattggaacgatttatggaggtatataatgagcttgaggagaacaggccaaaggtagaaacattgatcgcacaaggacaagaatacgtacgtaagcagacgcagatgcaggtttcggccagtaatctacagcatacgcttagaacattgaagcaacgctgggacgctgtagtttcccgagcctccgacaagaagatcaagttggagattgctctgaaggaagctaccgaattccacgatgctctacaggcatttgtagaatggttgacgctagcagagaagcaactatcatcggcttctgcagtgtctcgagttcttgaaacgattcaacaacagatggaagagcacaaaatcctacagaaggacgtttccatacacagagaatcgatgctcttgctggacaagaagggaactcatttgaaatatttcagtcagaagcaggacgttattctgattaagaatcttcttgtttcggttcagcatcgttgggaacgcgtagtggctaaggccgctgaacgaactcgtgccttggaccatggatacaaagaggcccgcgaattccacgatgcttggttgcagttgactacttggttgaaggaaactgaaattacgctggacacgcttgctgaagaatccaccaacgatgccgttaagatcaagaagcacttggagaaactccgagagattcaacgccacctgcagtcgaaggaaagcttctacgatagcacaatgcgtaatggtaagggattgatggaccgtgctccaaagtccgacgaacctgtgctttcgaagatgatgaacgaacttaaggattcttggaaacgtgtatgccacaagagtgttgaacgccaacgcaaattcgaggaggctttgttgctgtctggacaatttgctgacgctctacaggcgttacttgaatggttgcgcaaagcaaaggctcggctggccgaagacggcccagttcatggtgatttggatacggtaacaacacttgtcgatcaccataagcagctagagtctgacctggacaaacgctccgcacaaatgcaaagtgtcatgaagactggcaaggatctcgagaagtccgatgaaactcgtgagaccagcaagaacctaagggaattgcagaaactgtgggaggatgtccaggatctcagcacccgtcgcaagtcacgtttggaagtggcattgaaggaagcagaacgcctgcacaaatccgttcacatgcttctggaatggttgtccgaagccgaacagaaactacgttttgccgcagcggctccggatgacgaagcccaagccaatgatcttttggatgagcatgctcgcttcatgaaggaactacgagagaaagagtttgacaaggaagagaccctcggactggctaactctattctgagcaaggctcattcggatgcggttccgatcattaagaactggatatcgatcatccaatcccggtgggacgagatttcgcaatgggcgctcagccgccagagcaagttggagtcgcacctcaagtcgcttaaggatttggatgaatcgatcgaggaactgctggcttggttggctggactggaagctactctgctgaaccttgaacaagaagcactgccggatgagattccaccgttggaggcgcagattgctgaccataaggaattcatggaaaacactgcccgtcgccagggtgaggtggatcgtgcctgcaagccacgtcaaccgccaccagggttgaaagaaacgcgaaaaccgtcccgcggtgtgctcaagacaccagttttcaagggatcacgcgatcaagggcttaattcacgtcgtacaagtcgtgtgagtcctggacgtgaaacccagacgccggaacgggatcgcctgccgcactatggtccacgattctcgccaagcaatcaacccgaaaccgagcttcgctccccacgggccaagctcttgtgggacaagtggcgctatgtgtggatgttggcgtgggaacgccaacgtcgcctgcacgatcacctcctgtacctccaggacctggaacgcgtccggcagttcagctgggaggagtggcgcaagcgtttcctcaagttcatgaaccacaagaagtcccgcctgacggatctgttccgcaagatggacaaggacaacaacggactgatcccgcgggaggtcttcatcgacggaatcatcggaacgaaattcgacacctcaaagctggagatgaacgccgtggccgacctgttcgatcgcaacggagaaggactgatcgactggcaggagttcattgcagcacttcgtccggactggcaggatcgcaagccgaagaccgacgccgacaagatccacgacgaagtcaaacggttggtgatgctgtgtacgtgtcgtcagaagttccgagtgttccaggttggcgaaggcaaataccggtttggagattcccagaagctgcgtcttgtgcgtatcctacgaagtactgtgatggttcgcgtcggaggaggatgggtagcacttgacgaattcctggtcaagaatgatccttgtcgagccaagggacgaaccaacatcgagttgcgcgagcaattcatcctggccgacggcgtttcacaatcgatggctgtctttaagccgcgcatgtccgtttcgaccggttcgggatcgactcaagcgggctcacccatcccgactcagggcccgattgtgaaggtgcgagaacgttcgtcgaaatcgatttcgatgtcccggccgtctcgatcgtcactatcggcgtccacgccagattcgctcagtgataacgaaagtagcttaggaactcccggacgtttccagacgcccagccgtaaaacatcagtgccaatcagatctcagatgacccccggtggatcgagggcaaactcgaggcccagctctaggccggcaagtcgcgccggatcgaaaccaccgtcccgtcacggatcaacactgtcgttggatagcaccgacgatgccaccccgtctcggattccaacccggcggataaccagtacaacgactccccggccatcgcgactgtccgtgggttcgaccacaaccaccacccggaccaccaacggtgtttcgtcgaggacggcatccggtgccgcttcacccgcccccacgagaaacggtggcatgagtcgatcgtcaagcataccaacgcttgtaggaccaaatagcaggaaaacgagtggaacttcgacgccgtccggcatgcaaacgccccggcgaacctcggtggagccccaaacgcccggcagtacgcgaccggatcgaagctctcggggaacgacacccgccaccgagaagcgtgccccgtttagactttaa

SEQ ID NO: 40 - DNA, 3058 bp, Aedes aegypti
aataatgaaaaattcaaccttatatgcgtatttgataaacaaacgttattaatatattgacaaataaaacatccaatttcagggagttgagtaatgatcatttactatattcaaaacccgttccataaacctgataaacaagtaaaacaacaataccacgtgttcagtgaagccatcgactattcacggcagcacgtctccgagaaaacctatttaccattaaaactcacttgactctgattagcgacatcagaatcaacacaaaatcagccgccgaaaacataatacgaaccatcgcggaagcgattaatcatagcgcctatctattttcctccccatcgatgcaccacgcacatcaacatcactgtcgtcgcccgcattcgatctgtctgtgcagaagagcggagatcatcgaatcaacgaacttacactttatgagacaacctcttcgtctcgcagttcggtcttgttatcaaaacaaacaacaccacaacaaggccattagaagacacacatcgtcactgtcagcgagagcatcgctatgcaggcagccgagccgaaccgacttgcatgcaagttccgaaccgaacggcttcgtgagcgatgggtggtggggatgacacgaagtcgaaccgagcatgcgctcgggtgagcttcgtgcctcctggtaggcggcgctgacagccggttgccaacgaaacggccgacccggagaaccgagagaagtgatgaacggccgcagtcgaagcatttgcagttattcttctgctagcgctcgagtgtatcgcacgcgtttggaccgcactctcgtatagtctacttggaccgtgtctcgttgttttttactgagtcgcctaactgttgggagaaattctttctagtgaaagaggtgtgaaacaagtgtgtctggggagaaacgaaaggcgcgctgataaccttgaaggataatttgattgagctaagtgaagaagcaagtgaaaaagcgtataacgctgaaagctattgtgacaaagattaaagcgaagtttgaagtgttggaaaattttccgaggaagacgatcttccaagtgtttctagtgcatacaaagataccggagcacatccggaagtaaagtcgccaaaatttgtgtcaaacgagcaagaaagatgaaggccatcacagcggtgtgtgctacgggagcttcggtgccggcgattgccaacggccgagttcagcgacaccgtgatggtgaaaacgccgagatccaaatgtacttgtcgaagctgaaggatttggtaccgttcatgccgaagaaccgcaagctgtctaagttggaggtcattcagaacgtcatcgattacatttgtgatctgcagagtgctctggagtcacatccggctgtgaacagttttgatcccgttcaggccttggctagtcatcagaatttgtctgaaccaatggagtccacaccggtgggtcctcggcagccgctgggagtgcgacctagcccgaacatgatcctggcgaatggtaacattgccgcgaacgcctccactagtcctgtcgtttccagtagttccagttccagcagcagcagcagtagtagcagtatcagcgagtcaaccaatgtggcgaaagacaaatcgacgtgaattgtcatcaataaaaaaaattgtgaacaaaggttgaacgcccaccctgggactcgacccgacgatgcccgtcacgccagtcccgttcgttggccgctgctctgcatattgagggagtaaggagatgatctcagcttcgaactgaacaatacaaaacaaacagaaactgactgtcaaacaaacaaaacaactacacattacgcataatcgcaaaacaaaaaccaacggtcaacgtttgactgcgaagcacttgaagcaaccagaacaagatagtgtggacgtggccactgcatccagaactgtttgagcacgcatgcgtcatctttattaattattaattattataataattctgtgatctatagaatatgtttttcctcccaaatggaagaagtttacttaaacgaacggtcataaaactgatttcattctcaagcggaacaagaacaaaccccaaggcgctgctgccttttgacagacactcgtcaaaatgcgcggcgacgcttcgtagaacaatagtcatctgtcaaaagtcgacacagcttaccggtcataggaggcaacctcttgtacaaagtgtagattttagttacgataacctcccattacgtttcaaaattcgaaaatcatcgagaaactgcaattctcgggcaattcagattaggtttttttttctttcattacctgtgtaaaaatgttgttctgtacgcaacaaaatcgatgacttataacgtttgttttttagtttttagtcaagaagaaggcataatctttatttatgtacatatagcaaactagaacaaattatatttgttccttttgaagaagtaatttataaaatagtgagactctgtcagataataaacaaatgaaaaaatatcataattcaaaaaacaacccgtttcctttgattcaacgcaaagcttctccaaaaagtcacggcctgcttggcattcttcagggcgctttttaaaaccataccatcgagacgattgacgaaggaagccatggagagaaaccgcatccgcataaccttttaataaaatccacttttcttcccgttgccatcgccgttttgttgtctgcttctggtccattgcgccgcccgcccttctcctcctcccttcgtcggcccactcgctctgtcggtttgtcgtcatcacgatcatcatcatcccatcataccgcggcgaatcagcccggaggcaataccaaagaatgcatgtgtgtatgtttgagtatgcctacatctctcacatataacagaggatggcgagggaaaaaaaacgagtgcacgtgttcaaatcagcttcatccgctgtgctcgcatatgtgaactactctcagccctggatgccaagcacccagagccgactgcgatggggagtacactgtaatttgaatttgagcagtttttgatgggctt

SEQ ID NO: 41 - DNA, 1470 bp, Aedes aegypti
tcacccacccactcattcaaaacggcgtccatcaacggtgcaggtcatcatacgaacggaggcgagctaaatatgcctggtggtccgactgcagcgcccggaacaccaaactcaaaggctaaggatgtctcgccccgggtcaagattgtggtagccctgtacccgtttaaggcgatcgagagtggcgatttatcgctggaaaagaacgccgaatacgaagtgatcgatgactcgcaggagcactggtggaaggtcaaagaccagcacggtaccattggatacatcccgagcaactacgtcaaggaaaaggaactgctggggctgcaaaagtatgactggtacgtgggggacatgtcccgccagagggccgaatcgctgctcaaacaaaacgacaaagaaggttgcttcgtggtgagaaagtcatccaccaagggcctatacactctatcgctacataccaaagtaccccaatcccatgtaaagcactaccacatcaaacagaatgctcgcagcgagttttacctctcggagaagcactgctgtgagtcgatcccagacttgatcaactaccaccggcacaattccggtgggctagcgtgcagactgaagacttccccctgcgatcggccagtgccaccgacggccggtttatctcatgacaaatgggaaatccatccctcggaactgatgatccttgaggagctgggttccggccagtttggtgtagtgcgacgagccaaatggcgcggatcgatcgacacggccgtcaaaatgatgaaggtcggcaccatgtccgaggacgatttcatcgaagaagcaaaagttatgacaaaactccaacatccaaatctggtgcaactgtacggcgtatgctccaagcatcgacccatctatatcatcaccgagtacatgaagcatggttccctgctcaactatctgcgaaggcacgaacagtcgttgatcggaaatatgggactcctgctcgatatgtgcatacaggtttgcaaaggaatgtcctatctcgaacgacacaactacatccaccgggatctggccgcccgtaactgtctggtcggatcggagaacaccgtcaaagtggccgatttcgggctggcacgatacgtactggacgaccagtacaccagttctggtggtaccaagttcccgatcaagtgggccccgccagaggtgctgaactacacccggttctcgtccaagagcgacgtttgggcttacggtgtcctcatgtgggaggtgttcacgtgcggcaagatgccctacggtcgcctaaagaacaccgaagttgtggaacgcgtccagcgaggaatcattctagagaaacccaaaacatgtgcgaaggaaatttacgacgtgatgaaaaaatgttggtcgcacagccccgaggacaggcctggcttccggatactcaaagaccagctggcagcggtagctcaaggtctcaccgactaa

SEQ ID NO: 42 - DNA, 1287 bp, Aedes aegypti
atgattttcctccctctcttgttccacaggggaatcgccaaggccggagaaccgaacaacatttcgccgctggcgaacggcatgatctacatggacccggcgatccacgccaccctgaggcggaaacagcggcggttggcgagggagaatcccggcgtgctggcggctattgccaagggtgccaacatggccatcaacgagtgccagcaccagtttcgcaaccggaggtggaactgctcgacgagaaatttcctgcgagggaagaatctttttgggaagatcgttgaacgaggttgccgggagacggccttcatctacgcgatcaccagcgccgccgtaacgcacagtatagcccgggcgtgcagcgaaggatccattgagtcctgcacgtgtgactactcgcaccagagcagggcaccgcaggccagcaccatgggtgcggtggctggcgtgagggactgggagtggggcggatgcagcgacaacatcgggttcgggttcaagttctcgcgggaatttgtggacaccggggagcgagggcgaacgcttcgagagaagatgaacctgcacaacaacgaagcgggacgggcgcacgttcagtccgagatgcgccaggagtgcaagtgccacgggatgtccggctcgtgcacggtcaaaacctgctggatgcggttgccgagcttccgagtggtgggcgatctgctgaaggatcgcttcgatggcgcctcccgggtcatggtgagcaacagcctgcggaccagcgtcaacgaggcgacgctctcgaaccgggccaacccgaatgggctcaaggcgcagaaccagctcggcggcagcagtcccgggggacccaacagcgtttcgagcaattcgatccacgcccggagtcaccagcagaagaagatcaatcggagtttcggggatttccaaaggtggaccaagtttctatctaagattttcgaatttccttcttccatcaacaggtacaacttccagctgaagccgcacaatccggaccacaaaccgcccggtacgaaagacctggtatatctggaaccgtcgccggggttctgcgatcggaaccctcggctgggcattcagggaacgcacggccgccagtgcaacgacacctcgataggggtcgacgggtgtgatctgatgtgctgtggccgaggctaccggacgcaggaggtcatcgtggtggaaaggtgcgcctgtactttccactggtgctgcgaggtaaagtgtaagctgtgccgaaccaagaagattattcacacatgtctgtga

SEQ ID NO: 43 - DNA, 3099 bp, Aedes aegypti
atgaatgccaacaaccaccacgatgtgctgctgcagaacaacggacatcacgattcgaacaaaattctgaacgaacggcacgagaaggaaaaaccggtggtcaaatctaagcccaaggagctggacgggtacgtcgggttcgcaaacctgcccaatcaggtgtaccggaaggcggtgaaaaagggcttcgagttcacgctgatggttgtgggtgaggccggtttgggaaagtcaacgctaatcaactcgctgttcctgtcggatgtgtatcatccggagcagcatccgggtccatcgaaacggatcaagaaaacagtgaccgtggaaagcacgaaagtattactaaaggaaaacggggtcaatctaacactgacggtcgtggacacccccggtttcggaacggccgtcgataacagtaactgttgggtccccatcgtggagtttgttgagaacaagtacgaagaatatctgacggcggaatcgcgcgtccaccggatggcgattccggactcacgagtgcacgtgtgtttgtacttcatcgctccgtcggggcacgggttgaaaccgctggatatcgagttcatgcagcggctgtgcgacaaggttaacatcattccggtcatttccaaagcggacacgctgacgcccgaggagattacacactttaagaaacagattctcaacgagattgcccagcacaagatcaagatatacgatttcccggacccatcggatgaggaggaggatgccaaaacgctgcgacagctgcgaagtcgagtgccgtttgccgttgtaggtgctaatgccatcatcgaaattgatggtcgtaaaatccgtggtcgtcggtatccgtggggtgttgtagaagtcgaaagcctagaccactgtgatttcattgcgctacgcaatatggttatccggacgcacctgcaggacctcaaggatgtcaccaacaacgtccactacgaaaactatcgctgccgaaagctcgccggtttgggtaacgacggaaagaccaagctgagcaataagaacccactggcccagatggaggaggaaaagcgcgagcacgaatccaagatgaagaagatggaagccgaaatggagcaggtgttcgaaatgaaggtcaaggagaagaaacagaaactgaaggattccgaagccgaactcaccagaaggcacgaggagaggaaaaaggctttggaacttcagatccgcgaactggaagatcgccggaaagcgttcgaaatcgagaaagccgagtgggaacaacagaacggagtcacgctcgaagagctgcggcgcaagagcctcgaagcgaacagcaaagagaaacgaaatttttgtgaccgcgtcacttgcatcaagaagttccgatgagtccaagggcaggcgcgtgtttggatcactgctgcgtagacacactagcttcggagcccccgataccgtacgtggcggcaccgggctcttgggatcttcctctgccattactaccactactagcgccaccatcaatactaataacagtaataatagcacggtgccacccagtccgcaagagcataacgagtcctaagcaagttgattcccgagacacctatcttttttcggtcaccaccggtcgtcgttttgtcgggcaggacttggctctgcactagcttcacacaaattgatcattaccataccgatggaagagcagagaatgcaataacttgtgctaacgaccacaattgagaaaggaaaaagcaataacgcttatcctgcgtaggttgcaccaactgtttctactagtttcacttctaccatagccgaggaagataaataatatcataggaaagaaagaagcacatcatcgcttaaaaacacatacacaagcaacacatcagcacactcatccattgtgcgaaatctagcagtacttagcaacactaagcaaaaccaatgggaatcgcatacccagctattaccacttattagggattagtctacgtaaataaccactgctaaattaccatttcccttcgattgctcgcttgtttgtatcctttaaacaattttttaaccattaagtactctgtttcgaatcgtttcatttgtgacaagggacaatttcatgacaatttattataaaactatgtaggaaagtaacgataaatctaaaacattaaaaaatcgaacaaacgctaaaaatatatcattaaaacgaacgatcacatttgtacacacactcgtttcaacttcatggaccatgtgttttgttttctgaaagtgaaaataaatctatacacgaatgtgtcattacattgaaaatatcggttttttatcattcatccattcactactcatctctgtatgtgataaaccctgggatcaacctttcttgaatgtttgccattatgttttctctgtgctatttccgtttcagttgtctgaccctatgtttgttagttcagttgtgtgtttgtaattgttttgggttctgtgtgccgtcctcaccctgcgttgaacagctctcgaatcgtaccacgaaaggttctgattagttcggttttatgttctttcagtatttgtagtataatcgtcccatcgtcattatcttaatgtaaccctatatttaaataatattctatgtgatatttgtctaaaattctcatcttaaaccatatcctttccattcatgtagccgttgataacgtatcataggttgtgtgttttatgtagacatagtatttattgcaaaatttagcttgaatatcaacacatattgtattagtatcctaggcatgttttgtttagtgaatgtatcatggtaatattttcattgtttctcaattgattgaatactcatcaacgtatcaaattctgaataaggatcatggcaaaagcggatggttctttcggatctagatccgactgaggatcattctatctgcaaatctttacaattatcgcatggacagctcctgtcagaattgtggagtacttatcccatttgttatgatttctgccggaattccgaatgttttgtctgaaccagtgcagaaaaaattgtaagattatagatattcattcaggattaccgtaatttcgggtgaaatt

SEQ ID NO: 44 - DNA, 2358 bp, Aedes aegypti
atgacaatgagtacaaataattgtgaaagtatgacgtcatactttacaaattcctatatgaattcagacatgcatggccattatcctgggaccggtgtggatggtttggataccagtcaacagatgtaccaccacagtcaaagccacgccagccagggaaacatgcctccgtatccacgatttccgccctacgaccggatgggttactatcagcaaaatatggaccctgccggatatgcgagagccgatagcccttcaagtcaggtgggtggagtgatacctcagcaaacgaatggcaatcctttacagcaaacgcaagtacaacctcaacagcagcaaccgattgtttatgctagctgtaaattgcaggccgcggtaggaaatggcccaaacggacttggaacctacggtgctgaaaatggatcccctccattggagcagatgggccatcatatgaacaccgcacaaatgacaatacctcagcatcacatgggacacgcacagggtcaggattgttttcctcccgatcaggtgcaccagaatccacagcatatgggcatgtacactaatacgggtggtggtccgcctggtgttgtaccccagcaaccaccaaatatgatgcaccaacaacctccacagctacaccaaggacaacaaccaccgccaaacagtcaaaattccaactcgggccttcagtcgccactctacccatggatgcggagtcagttcgaacgaaaacgtggtcgccagacgtatacgcggtaccaaacgctggaactggagaaggagtttcactttaatcgctaccttaccaggcggcggaggatcgagatcgcacatgccctgtgtttgacggagcgccaaatcaaaatctggttccagaatcggcgaatgaagtggaaaaaggaaaacaagactaagggcgaaccgggatcgggtgacgagaacgacatgacaccgccacagtctcctgcgtaaatcggtactctcggtgtccatctaccggccaatatagcttgaatgaatgatgttagtgacttttgtaacattgaattttctccttcagtttaggtaaatcacagcccacgttttaaatttcatgtcaaaaacaaataccatatttgttcgatactattcgacatttgtacacttaaattgcagatcagaacaactacgaataagaatctaagagattttggaaaacaaaaatttgttatacccattgagcgtactttagtaacaaaaaatcaacacaaattaccttcgtagtagacagtttgcgacagacacaacccaatggtgaataatttattatgctagcaaaacgaaaaaaagcaaacaactcatgtgacctcaaaactaatgttaatttagaaatacatgatccaagaattcaaaaatctgataacagattgatggaaacagaaagtaagtaaaaatgtgcaatgcgaagaaaatcttttatccattttagataaaaggtacatatttgtggaaggataaatagatattctaataatatacgtacaaaagtgcttcaatattcatacacaaggtatttcctgacggtcgacccagaaaataaaaaaaaatattcggacactcgcattattcggaaacccatttcgtgttagtactcgagataatcacacatcataaaaataatccattttgctattgatttctgtttccaccataatttctccaaacaacaacagtagagaggatgtttgaacctcagcaagaggtatagagcagaagagagataatacccaaacaaactataccaaaggcaatagaataatttaattattgcagttcattttcattctgcgtccatttattatttaatgaatatctcacttggaggcagcaatcgtaatttatttgaatatttcattgttgttactcattcgtacgtgcccataaactctatgaaacaatattggaggaccgatttctcgtcatctgtataatagtttacaggaaagcagtcatgactccagtgatgagagttctattttcaccttgagttggataagtacatgaattggaacaatcaggcgctgctagtaatttgataaaaatcaaaatcgatcacacacatatatacgaaaatgaggtatacgactcttgtagaatattgatagtatggaaaaaatatttagaaatattttcaataaacctgctacacattgtcatccaaaattcagtttggcagataaaaactggttatagtaaatcaataccatgtgcgattgcatttattgggaaaattgaaggaaaataggacacttaagcaaaataatgtgattgttctgttgtgttgcctgctattttggaagacaggcaagtaac

SEQ ID NO: 45 - DNA, 1907 bp, Aedes aegypti
tttctgttatttgtttgaattaattgatattatctccaccctaatcccagtgtgtcgtttgtgtgaactgtttctttgactccacatcgagaatttcgtgcgccagcagcagtacctgtccccaggaacccctgaaagatgtcccgttacactcaatcgaaccctggcagctacgctcagacatataagctggttgtagtaggaggcggaggtgttggaaaatcagcaattactatacagtttatacagagctactttgtaacggattatgatccaactatcgaggactcgtacacaaagcaatgcgttatcgatgatgtaccggcaaaactggacattttggacactgctggacaggaagagtttagtgccatgcgagagcagtacatgcgatcgggtgagggattcttattggtttttgccgtaactgatcatgccagcttcgatgagatgtataaattccacaagcaaatactgcgtgtcaaagaccgcgatgaatttcctatgctgatggtaggaaataagtcggatttggatcaccagcgagttgtgtcactggaggaagcccagcagctgagcagacaactgaaaatcccttacatcgaatgcagcgcaaagcttagaatcaatgtggaccaggccttccatgaactggttcgagtcgtccggaaattccaactttccgagagacctcttatcgatgagaagggcaaacgaaaaggcgggaagaaaaaatgttgcatcctgtgaagcatgagtgatggaaaattgaatcgcacaatttaacaaattttcgaaagcacaccgtttacgtcaatgtgcatgagtcaataatgtgcagagagaatattttatggatgctatctattctcgagtttaaaagaatacatcgattactgccgtactaatattttttgttggatcgttacaaatgtgtttggacaatacaaactgtggcacaaccacaaaactcttacccccttaaccatgaattatttacagaatcggaaacacaaatcccaacgagtgccatacgtttgcaattagttgtttacgactataacgaaaaacagatacacttacgaacgtgcctaattgatattcgatatcatcggttttactaaatggcatatcttaatcagcccaggagaggaacgaaacacatcaagtctagttgatcgtcacgcattttgaacctagttttgtttattttttaattcgaattgaatgatatcaactaatttcactaactcctccataacaaatagacaaattcttatcgtgtctacaagatttcaggacaagtgttggaacttatcaaatattatatcaataacatattttaaagaaaccgaaacgagtatatttactactacttatgtgtaataagacttttactgtataggtagctggatgttgcattgcgctttatcaacgagagaaaatattaatcaaatatttatatatgtttacacaataaagaatcacgcagacaacggcaacgctataaagcataaaaaggcgccattattttattacgtaacgctaaattcaggatttttctacaacgtctttctgttcatacattgcgctttcaaaaggcaatttctaattattttattttggaacattctaatgtgttacgtaataaacgacgccaaagaaaacgtttttgaattgtacgcaatgctatatcaatattaaccaaaataactagctttaaatgtgcttaaaagttattcgaaacagatgttgcaaaatgataaaagaaaaaaaaaacacaaaattcggaaaaggtgctaaattaaacagatttatttatttcaatgtttgaattgaagaacattttaatttggcgtattgttgtgcagtaatatagttataaaaatatatgtattgaccaacta

SEQ ID NO: 46 - DNA, 4977 bp, Aedes aegypti
gcgaaccgttcgaagcgaggagagcccaagagaaaaataagaacgcgatcgtgcgcagcttagaagcagagcccgagcatgtgcgggcgcttaagtgcaaaaagaaaagtgaaaagtttcttttcttttcacaccggctaatttgagggtcttttattgctggaaaagccccgctccggacaagccgagggagagaatacgcgccgcacacaagagaaagagcgaatcccgcgcacgatcgatcggcagaaaacggaggatgaaaagaaactaaaaaaggaggtggtgacgagtccgcaaagcatacacatatcgggtaggccgtcggacagcggcgaagaagcggaagaagtgaagagaacaaaaacaaaagcgagtaagcgctgcaagcaaaaaagcgtgccgatgcggggcttaaaagaaagaatgagaaagggagaccgatagcgaaaaatgccgaagcggttggcagtgatgcaaaggcaggagcgagaaggccatgtctcaccgtgccagagcgagacggaagtgtctttcccatgccagcagctgcttctgctgagagtggagagtggagtggtgaaacaatccaacaaagtgacgaagacgacgacgacggctgcgacttcgtaggtgctaagggcataagcgcgcgccgagagagcagtagatgcaagccagacatgagaaaggtgctgctgctgcccgaaggatatcgtcggtctagtagcgcagaacgtcagcataacagttttcgtgcgcgatcgtgattgatgttcgttcgactcggcggcccccattgatttgccgtgttttgtggaaagtgttactttagagccgtcgcatattttggttttggatggtgtgggggtttacggtttatgtgagatcgacctcaaaacttgggaaggatttagaggattgtacaccctggatcctggagtgtggattcagtttgagaattccggcgccgttggtgatcgatctcgagaggaccgtgtgtaccggcggtgtccttgaaggatagtgatgatcaagttagtgaacggaggaaaatgatcgatccagtgatagccgcgtctgacagtgttaggaaatagggtgaggattcttgccgaaaacgaaagttggtgatcgaaagagttgacagaggtgattagagcttgttaggtttgaagtgataacgaagtaaccggaagatataagtaacgctgaaacggaagaggaaggacgatggaactggtgtcgatagtgttggtttgcctgatggcggtcagtgcgaacggtgaggtggagagcaaaagcaaacccggacgaggacgggggtccatgtggtggggaatcgccaaggccggagaaccgaacaacatttcgccgctggcgaacggcatgatctacatggacccggcgatccacgctaccctgaggcggaaacagcggcggttggcgagggagaatcccggcgtgctggcggccattgccaagggcgccaacatggccatcaacgagtgccagcatcagtttcgcaaccggaggtggaactgctcgacgagaaacttcctgcgagggaagaatctttttgggaagatcgttgaacgaggttgccgggagacggccttcatctacgcgatcaccagcgccgccgtaacgcacagtatagcccgggcgtgcagcgaaggatccattgagtcctgcacgtgtgactactcgcaccagagcagggcaccgcaggccagcaccatgggtgcggtggctggcgtgagggactgggagtggggcggatgcagcgacaacatcgggttcgggttcaagttctcgcgggaatttgtggacaccggggagcgagggcgaacgcttcgagagaagatgaacctgcacaacaacgaagcgggacgagcgcacgttcagtccgagatgcgccaggagtgcaagtgccacgggatgtccggctcgtgcacggtcaaaacctgctggatgcggttgccgagcttccgagtggtgggcgatctgctgaaggatcgcttcgatggcgcctcccgggtcatggtgagcaacagcctgcggaccagcgtcaacgaggcgacgctctcgaaccgggccaacccgaatgggctcaaggcgcagaatcagatcggcggcagcagtcccgggggacccaacagcgtttcgagcaattcgatccacgcccggagtcaccagcagaagaagatcaatcggtacaacttccagctgaagccgcataatccggaccacaaaccgcccggtacgaaagacctggtatatctggaaccgtcgccggggttctgcgatcggaaccctcggctgggcattcagggaacgcacggccgccagtgcaacgacacctcgataggggtcgacgggtgtgatctgatgtgctgtggccgaggctaccggacgcaggaggtcatcgtggtggaaaggtgcgcctgtactttccactggtgctgcgaggtaaagtgtaagctgtgccgaaccaagaagattattcacacatgtctgtgaggggacggcgaaggagaacgaagaacgaaaaaaaacgtcgacgaaagctcttttttcgcgtccacgtttgtccgtcggcgtggcgttgatctctgaatcataatcttgagacctgggttgaccgaaaaggggtggcgtgggagaggcggcagtggtggtgggaggtcagtcgcgcgaccgcctcagtccagtttccagtcacatcgcggcggtgggaaccgaagcacacacgagaaaaacgagaacatctccttatcttaaatattcgacttttgttttaagttataatggatgacattttaggcctccttgcgagagcgttcgtctgtagttttttcttgtgaggaattcctgccctcctcttgggagtagctgaaaaagtttaagataaaaaccgagcccagattaagattctgaaatcaatccacggaggtgaccaggcggacagacaaagaagaaattgtaaatatttccgcttctttttttataaatatattatttaattaactaaattgacaaccaaaaatattatatattttcgcttggtacttaattctttggttattttttgtgttcgcaagagaaaaataatgctaagaagaaggtctccccttgcccgttttgaacctgtttccccgtctgtggaagtgtatcatatacctaagtatttatttactcgaaaagcagctagatgtggtgaagcaacagattacaaaagaaagcgaaaaactgtttcagtattaaatgtctatttaatcttttgattaactgtagcgactaagatgaacctgaaaacgcattgaccttgtagctttgtaagcgaaaacgagatcccagttattataacgcattgtaagattgttttgtttaggataagaattgtacagaacgagaaagagcaacgaattttactaagttatgcaaattaatatttttttatgttttagagtatagtggaacgaaaaaagtaacagactaacaatcaaacgaaagactgatagaaattaaaacaattttgcctcgagagaaagcgagaaagaacgatagctttgttttcaaaatttacagctgtttagtagaaatatcagtgcaggcactaattttgcagaaaataactattctaggatcggatttgagaacgtgcgtttttgttgaagagctgattttcggctgctgatcgtaagtctgttgaggtaagtgatctcgctagaatcagtttctgttggaggtaaagctttcgaacgaatcttgtgggcgataagtttgacaaccactttgattcgtgatcccgattttctatctcattcgcacattaaacgcatcaggttgaattcaatcagtattcatcacttatcatctcgatgacgctatccttttttggatccatataccatcccaggttctagaggacggctactgttgaatttctcctcaaacggatcacgatcaaagtccttgaactctttgcccacaactttttcaacatcgaaacattgaacttccctcgaacttggttcaaacgagatcattaatctcactcttatgaaacgatttccgaaaattcctcccttcaacaaaaactcccgttttcgaatcctctaaaacgtaaccaactttcccagtttcatcatactgtgacggacagaatcactgtttattgtttatatcgattaaggttatcttcttcaagtgtttgtcccttaacgccccttaacagaaagatcaaaatagaacaatctaatcaaaagccccctccaacattgtaaatatagtcgccataagtgagctctaaacccccccttaagtgcttgattggtctcgatctaactagtaacttattaactcctctctcgattggatcagtgcccatagaaacaaacgtaagagaagtccccctctgccttcgactgtacatataggaagcaaagaacacagcagaagctcttgcagcgtcgtacacaagtgatagtaatgtttcaaagaacactctcggttttaactacttaactctagagatgacaaaagaaatgtgttgctcttcgtctttagcagcgcgaaacgcaacaaatataggctccctacttagttagcaactaatagcacataagaatggatgtttgtctcccgctttttttgtcatattcatacacaccatacacttacacttttatacattgttagatagacgaccgtgtcaatggatgttcagttttaagatgagtatacgtgagagagagagagagcgagcgaatgtgagagtgagcaaaacaaaacaaaatccctcgattgccaacaatcgctggactaacgaaagcaacaaataacgcaacgaaaatctaacacgcttttttgtattttttacatattataattgaatgttgatacagaaaaaaaaatattggtgaaaacacagattcgaaaaatagaaaatgaaatttttcatgacaatcgaaa

SEQ ID NO: 47 - DNA, 2524 bp, Aedes aegypti
cacagacaagggtacaaacacacccgtgctgaagcctctaggaggggtaccccacacgcacagagcggttgctggtgtgcggtattcgcgcgcgccgtctgatgccgtacggagtcagggaggaatcggtgagcgatttttaaaaacagttccatctgagacattgtgtgaattacatgtgtcctgagaagcgtgatccgcgaagaagctcgactgagttttgggaagttgtgttttggtgaaagctcgggacgtgattcgcgcagattttgaacgatcttggaaatcgatcgaagtgaaattttgggggtatcctcacacgaggtgtaaaacgacttggataagaaaggactctgtcagtgatctggtgtgattcgtaacggaaagacacgcgctattcttagatcgtagtggcacgcgtacgcatgcttggaagacgctaccgagttgtacgatagtggagtgagagttgttgcaactgttaccatttgatggattagagtgctctggagaaggatatacaagtgcggaaaatcagtgaacacagtggaaataaaagttaatagattacgatccaagttggaatcattaagcgaaacgcagatgcatcttccggctagcagcgagtgtcaaactcctccagaagtggctaaaagtatggctgatatgttctcgaatcttcatgacatgctgcaggagtatcatggagagctggtgcaaaccggatcgccggcggtcctctgttcagccctgccgacgcactggcgctccaacaagagcttgccgtgtgccttcaaggttatcgccctggacgacatccaggacggaaccgtggttacaatcaaagccggcaacgatgagaattgtcacgccgagctacggaattgtacggcgatcatgaaaaatcaggtggcgaagttcaacgatcttcgcttcgtcggcagatccggccgagggaaatcattctcgattacgataacaatcagcacgtatccctgccagatcgcaacctacaccaaagcaatcaaagtgaccgtcgacggaccgcgggaacctcgatctaagcagaatttcgcctatggccatccgggtgcattcaatccgttcatgctcaatccgggatggatcgatgcggcctacatgaactacgcctggtccgactacttccggcagcaccagcaactgcaggcccagcaacaagcgagtcaaccgaatccggtcacggcagcaggaaaaggttcaccaacgttaccaacgccaaacggtacaactggacctcttctgcctacgccaccagcagacttcatgtccctgtcgggagcccagccaactccaaacggccttcctaccccaaccggtccggtgttacccaatggagccacctatctcccccagtttccctttggaccgcacgccgatctgcatctaaaatctccattcctgccttacgacatctcaccacttcgtgccaacggtctccgaggacctcaccagctatccgccaccatcacactttcctcaagtgacttcatctcctcgtcccgcctttctcccgcctcctccagaaattctacttcctcccctccatcaaccctcaatcaatcacaaatcaaaatgagcattgaactcaactccaccaacgagcactcgtccggcgaagagtccgacgatgaacacatcgacgtcgtaaagtcagccttcgtaccgatacttcgacctgctccaacttcgtcagctgacaccacctcggatgctcatccgcatgcaccactgaaatcggaaacacccgattcaacaaccaccactcccagttctccacctcctccagcaccaccctcggcacgctgcgaactgaaagcaccgtcttcgaagaaaccccaattccacgaatcagcgccaagtgaaccggcatccccggagaataccaaactgaagtcgccgaaccttatcatcaagcagtcggcaaaaaccgtttggcggccctattgagagtatctgctgctctccaaggtgctcctctcccggctcgggaagtagcttgtagccaataattcagagttctggtgatattaatgttaggaggataatcggtgattttagcaagtagcaacagagagaaagacgtcaatttgtacatactgaaccgcaatatgtgaatatgttgtatagttctacaactagcgctatgtgagatttctttttatattagagatatgaaaatcaaaaaatcgtatatagaacagaatgttttaagttggactatcggaaatttgggttatgatagactcgaattgatttctcaatttatttagcaatcaaaggtaccaacaatcggaaaattttgtaaagattaatattaattttaaacttaatttaatccctagcaagtaaatgttgaaacacatgaaacaggtacatttttatagtacaaaacgtggtatttaaggacaggccgtagaccgacactggaatatgccgaaaagtaaaagaataaatctttataaaaaatctacaacaattacaa

SEQ ID NO: 48 - DNA, 2283 bp, Aedes aegypti
atgtcgctgtgggcacgcgtcaaccagctgccgcagcccgttctcgagcagatccggtacatctatggcaacagttttccaatcgaggtgcggcactacctggcggaatggatcgaggagcgattgctaaacgtcccagtctaccagcacgaacaggacagcgcctacgagcaggaagctgccaccttcctcaaccagctaatcaacgagctcgagcggacggccatcaacctcccggaggacaacgtcaccggccggatccgcctgaacgagtcagcccggaacttccgccaactattttcgcacaatcccgtccagctgtactcacatttgatcaattgcctccaacgggaacggcagtgcatagcctacccggaagaatgcgtcaacgtgcaggacccggaaattgccgaagtcatcaacggtctccagcagctgcagatgttggtccgggccaacgaaaacgacaaccgcaatctggtcaaagactacgagcatctgctgctcgaaattcacgaaattaccaagaacaaagcacagatggaagccatcgataatgcccagctgcgagagcacgcgcgggccgctctggtccagcaggaacggaacgtaaacgaaacggtaaccctcatcaccggcaaacgcctgaacttggtcgacaacttccgcaaaacgatccagctaacttcgcaagtgcaggaaaaagttctgcacaagtacctgacacagtggaagatcaaccagggtttcgccggcaacggggcatccggcatgagcgccagcaatctggacaccattcaggcgtggtgtgaaaacctggcggaaatcatctggaataccaaggaccaaatccggttggcgatgaagaacaaatccaagctcaacatagaggagcccaacttgcccgacttcctgccccagtcgctggtcgaggtgaccaatctgctgaaggccctcatcaccacaaccttcatcatcgagaagcaaccgccgcaggtgatgaagaccaacacccggttcgcggcgaccgtccggcttctgatcggcaacacgctcaacatccgcatgagcaacccgttggttcgggtttcgatcatttcagaagcacaagcacaggccacgcagcagtccaacaaggcgtcggagcagtcgtgcggagagatcatgaataatacaggaaatctagagtacaacgaaaccacgaagcagttatcggttagttttaggaatatgcagcttaagaaaatcaagcgagcggaaaagaagggcaccgagagcgtgatggacgagaagttcgctttgctgttccagtcaagctttgcagttgggcatggcgatttagtcttttcggtttggacgatctcacttccggtggtcgtgatcgtgcacggcaaccaggagccccagtcgtgggccaccatcacctgggacaatgcgttcgccgacatcaaccgggtgccgttccacgtgccggacaaggtgtcctggaacctgctggccgaggccctgaacacgaaattccgcgcctcgacgggccgctccatgacgccggagaacatgcacttcctgtgcgagaaagcgttccgcgctaacctgcagtatccggtttcgaacgatctgaccatcacgtggtcccagttctgcaaggaaccgctgcccgaccggaccttcaccttctgggagtggttctacgcggcgatgaaggtcacccgggagcacctgcgcggaccctggaacgacggcagcatcgtcggcttcatccacaagtccaaagccgaagactatctgctcaagtgctcgcggggaaccttcctgctgcggttctccgacagtgagctgggtggcatcacaatcgcctgggtcaacgagagcaacgacggccagccgcagatcctgcacatccagccgttcacggcgaaggacttcgccacccggtcgctgtccgataggatccgggacttcgaggatctgttctacctgtatccgaacaagccgaagaacgaggcattcgatcggtacacgaccccgcccggacagccccggaatcgcaactacatcccgtcggaggtgcgggcggtgctcatgccgagcaacaacaacccgatcagctatccgaacacgcccaactcgtacgggcacctgcagtcgccggacgcgtcccgggacactcccaccagcggcagctacaatctggagaacgaccaggtcaatcatctaccgtaccaaccgttggccgacctggagctggaaaacattgacatgttcgcgtcgtcgtacacctag

SEQ ID NO: 49 - DNA, 1935 bp, Aedes aegypti
atgacaaattctggtcatgcagtggttgtctgggagttcgaatctcgcggagccaaatggctaccgtatagtccagctgtttcgcagcacctggaacgggctcacggtaaaaagctcacccgagttctgctgagcgatgcagatccatcgttggatcagtactatgtcaacgttcgaactatgacacaatgctgtgaggatcaggaatttgctgtgacaaacgttcggagacatttctacaaacctagttcaccagctggcaaaggaaccaaatgggagtggtgcggatcttctgggaacgattggcatagctatactatggaggttcaatgcgtgatcgaggaagcttgggctcgaggtgaccaaacaattgatcttacgaagagtcaccttaacctaccgtataccataaacttccttaatcttacacaaatacgccatcaaaatgggccgctaagaagcatacgtcggatacaacaagcaccttacccactcgtaaagctaccaccaaatcaagcgaccaatgctactcctcaggcttctctctccgttccaaaccttcctccaaaaccaaatcaattaatctcaagtggagcgagttcatgttcttcgaatacatccggttctcaacaatccacatcacatctccattcaaagtcaaaatcccagccagtgctgtgcgccaaccaacaaaaacgagccacaaaagctctcaaagtcggcaaacaaatagacatggttccggttacgccgaccaatctcgctcgtcaaatattgcacaatctcaacatattcgggacgaaacattcccagcatcaggaacttccagattacccccagagctccaacccatccacctctagccaacaccagagccatcatcataaccagcaacaattccaatccaatcactcccatcagcaatcacttcgaagtcaccccagtagccgatcaatgggaggatttcaaaggcaccggagcaagtcgcgcagccgaggtgaatcgctgatcgaaaccgattcttccagcatcaactcgggacggaggcccagtgtggatactgtgtccacctacctcagccaggagagcaaagatagcaccggacggaaaagtaacaacctcggatcggtttccgatctgttggactgctctatgggcagtgatgacgtttttacgccggcttcctcgcagcagaacattcccggagcgattgtcggagtggatccggccagtgatatgatatcgcgattcgtgagggtggtggatccgcctcagtggccccatgctcaaccctgtccgatgtgtatggaagagttgcgccacaataaccataatcctacggtttccctgtcgcgctgtcagcatcttatgcatctgaactgtctgaacgagttgattttggggcagcaaaaggaaaatcaaaagagtctatacatcgaatgcccgatttgcatgtcagtgtatggggagaaaattggtgatcaaccgccggggacaatgtcatggatcgtcattccgagaagcctcccgggtcacgaagggcagaacaccatccaaataacctacaatattgcatcgggccttcaaagcaaagagcatcctcacccgggacgggctttcttcgccgtgggattcccccggacatgcttccttccagatggccttctggggcgtaaaatactgcgctatttgaagatagccttcgaccggcggctactgttttcgattggccgatcggcaaccactggaagggaggatgtggtcctttggaacggcgtggagcacaagacgcagtattcgatgtttccggatccgcagtacatgcagaggtgcatgcaacagttggtgcatcttggcgtaaccgattgagttcggtgccattcggtttagtgagttgttttcgattgttttgttttaattttctgttataatcga

SEQ ID NO: 50 - DNA, 2925 bp, Aedes aegypti
accaatgcatcaattgtaaaaatagaaaacctaatgccgaacaagcgatacaacataacagcgaccgtcctcacctctaaccgcgagtatgtttacgtcggagagcggccacagtttaggacattgtcggatgattatacaccgggaaacataaccaaaattgacatcattgatttccgtaccaataaccaggacagtgaaaagttggatgctctcgttacgtggcagccggcgccagataaaacttgtcactatgagatcctgtaccacgcaagccatttacaggattatcattctaagacggtggatgttcagaaggagttgtacaaacataccataacagctttggagctcaactcagagtactatttgggaatccgagcaaaaaacattcgtaattcctcgaaagaaagtgaactgaagtggcacacgtttcacacacctagttgtgtggattggcacaatagcagcgttatttgtgcaccagagagcgtatccaacgttcaagtgagcactttgtacctttctggagacaactatcaattcaacatcacttgggacaaaccacgattcactccggataactacattgttcgaatatttgatttatctttagatacgaatacggatgatgaaccttcacattcctttatgcgtaatgtaagcggagatgcaacggccttactgatagattcactcgcaatccacggtgcgcgatatgagcttgtcatctctgcctacgcgaacaatcggtcttctcacacaacgaatatcaacgatgcaccgatctggcgtagcccaaccgaccactggcatggaggaaggctggccgttatcatcctaactccggtgctgacgctaggattgatgaaaatattcatctccatcatttgcaaacgtagagccaaggtgaaacggtacgaacaaagatgcgaatacttcaaggaactggaacagaaagcacccattgacccaagtaccgggtttgaaatcaaggtgaagaacattcaagaaatcgtgcatcccgccactttccctagcgatctgatagcacccattaatgatgaaatggaaattagcgtcgatcaaatcaggctgctggacttggtgggagaaggagccttcggaagggttcggaaaggaatattgctgcatccggtgggaacgtacactgaggtggccgtcaagatgttaaaggaatgtcccagcctagaagatgtcaaagagttcaggcgggaaatagaggtaatgaaatcggtaggagtgcatcccaacatcgtttgcataattggccactatactcagaatgttaatgaaatgatgctgctgacagaatactgcagtgaaggcaatctgttgaattttttgaggtcggagtggcataaagtattgcaaaacagggaccgctcagcttccactacaaaacaatcgcttaaagcgttgaccccaaaagatgacgttttcgaaggatgtcgatcacctagcctggaatgcaacaaaaagcctgaaaacgtatttaattttgatgctccttttatacacgataagaagtctttcgcctacaagaatatctccgatcacaatacaccggagccaacagaatctgcaccggagatgaaaataacggaaaaccgactatatcctttgctgaatgatacttttgataataactttagcctttgcgcagaagtcgagtccaacgacctgaaagacaatacaaaaatatgcactaattcttgcaaatgtaacgtggagatactgcaatcaaacagcagtgaagacatagaaacgtggaccaaaaggacaccctgcagcatcaaagtttccggatgcgagtgtgatagcataagtaacggaagcggagcgcaatcaaaacaggacgaaatatgtaatatggttaacaatcagtgctattataaagagctgtgcagtgagaaacgaaatcaaagtgaggaatacatcattacgagcagacaattgctcgaatttgccaaacaaatcgccattggaatggaatttttggcccgcaataaagtggttcatcgggatttagcggctagaaatgttctggtttgctatgacaaagcagttaaaatttcggactttggtttaagtcgagacatataccaacagaacctgtatcgcaaaactggaaccggcaagcttccgatcaaatggttggccctggaatcgcttacgcatcaagtttacacctcgcagagcgatgtttggtcgtacggtattttgctgtatgaaatctgtactctcggaggcaatccttaccccttgctgtccacgtgtgatttaatcatggaattgaaaagaggctatcgcatggagaagccggacagctgtagcaaagaattgtatgaattaatgctttcctgttggagtgcattacccattgacagacccacatttacaagcatacacaaccgaatggaggaactgatgtttcaaaacatgaaaaaagatatgattgatctagatgctataattgacattcaaagtacaaagacaagttcgagtgaacattcatacttaaagccagtggagtattaagattacctgaacgatgtgctaattatcccatgactatacatttttgacaaaagtcttatgtaaaagaacagaatgattgattgaactattttaccagatgattatacactaaatacatatttttaaaacaagttttggaaagaaggaaaaagtcatcaacggaccacgaaagaaattgacctttatgcaccaagacaaagtgtgctatttgacctgaatcattttttattcaagagattatccatacacttacacgctaagttcccaaataaaatagagtttatttttataaggaaatgggatgttttaatgcctaaagaacccgacgtaccttcatttatgcttcgacatgccggcatttct

SEQ ID NO: 51 - DNA, 2454 bp, Aedes aegypti
atgcgcactattctattcatagcagcgagtctcgccatacttacagttggattggaagcatcgctcagccgaggccacacggagacaagcaccggcttggtgtgcgaaacgtacgaatgcaaggacggtgactgcacggtcggtcaagaagtatgcgacgaaggcgactccgacaaaccgatgggatgcttcgtggtctggagcaccaacaatgtgaccaacgaggtcaaggtaacgatgaagggctgcttcagcaacccgaacgactgcaatgggacagaatgcatcgatacgaccatgggcacgaagaacaacctgaactactgttgctgtcggttgagcatgtgcaatcgcgagcaccgatgggtacccaatgtgaccaatgctccggaaccggttaatccagtgccgccggaatcgagcagtgtcattgtggtggctagcgtcgttaccggaaccttggccctttgctcgatgatcgtgatattcgtgcttcgacggcgaaagcagtccatgttcaacgagataccgacgatcgaaccggagattaccagttcgtcgccgaacattgccctgcggccgattcagctggtcgacctgaaggcccgaggacgattcggagtggtgtggaaggcccaattgatgtcccaagaagtcgcagtcaagatattccccatgcaggagaaacaatcctggctgacggagcaggagattttcaagcttcctcgcatgaaccacccgaatatcctgcagttcatcggttgcgagaagcgctccgagttgaacaatacggacttctggctgatcacggcttactgtagtcatgggtcgctgtgcgattacctgaagtcccacacggtgacgtggccggagctgtgtcggatcgccgaaagtatgtcccgtgggttgatgcatttgcacgaggaaattcagggcagcaaaacggatgggctgaagccgtcgattgcccaccgggacttcaagagcaagaacgtactgctgaaggatgacttgacggcgtgcatcgctgacttcgggctggcactgatctttacaccaggcaaaccttgcggagacactcacggccaagtaggaactcgtcgctacatggcgccggagattttggaaggggccatcaacttcactcgggatgcgttccttcggattgatgtttacgcttgcggtttggtcctctgggagttggtttctcgctgcaccgtgcacggtggcattgtggacgagtatcggctgccgttcgaggcggaactgggatcgcacccgacgctggaggaaatgcaggaaaatgtcgtcacgaagaagcttcggccgaggatctacgatcactggaggaatcataatggtctcaacgcactgtgcgacacaatggaggaatgctgggaccatgacgccgaggcccggctctcgtcttcttgcgtaatggaacgtgtttcgcagcacagccggtaccaggtcatgacgcccctgctgatcgagaccaacactactaacgacctgccaccgaaagtagcatcggaaagtgtgtaaaacacttacagcaatcaaatagagatttacacccacacacttcctgatcttcctagaaccccctagaagtcctatcccgatgaagcttttacctataagctgcgcatgatttcttttacgttgaaaaccatgcttttatatgagaggaacgtccattatacgcgctaatcagtgggaaacagatagattcttaagagcatttgcgatataatatcaatcaaacaaactaagatagttatcaacctagggaaggtgagaaaacaccttcgaatcggacttacgaacgaacttgatgttcagggatatacaaactgttaacaaaaatttcgatttaagcggaaagcaatacggacacggtttggattgtcgacatggaatgaggcctttgccgattccgtaagaaatgaaaaaaaaaaaacggatcggaagaaaagaaaagcttgactgcaaaactaagtttggactgagtcacacctaatctagaaatagcgactatcccgaggatagtgcgccgaaaaagagaatcaaaaagtttggaaaccgggtttactgatcacctcaatatgattatcaaaaaagaagtaacgaaatcgtgttaaatgatatacgtctcagtgaatgaatagattttatggatcatatactttaaaaaaaaccgctagaacgaactcttttatgcattcaattttgatggaacgagtacgattagataggcgcagcgataactgcattacgcgtcgtgtagtctgtaaggttcattcaatcacatgctgctgctacacagcgtgatgttttgtgtaataagtctgcggatggctaagatatattttttataacagaattttcctccaatagtgtacttgtatgccatgattagttcaataaaggttaatctgtttagtattagac

SEQ ID NO: 52 - DNA, 2162 bp, Aedes aegypti
gttcagtgaagaacaagtagacaactgtgtttgcgtctgataccaattattagaaatcgataaaaagtaccctgtaaaaaggatagttattgtgctaaaccaaatcgaaaacatgtgaatttgcttgtaacccatcaagctaaactgtataaaatgatggtacttggaggaacctgaatcgaggatcgcactgttttgctttctagggaggtagttagctgcatttggcaaacctgagaggcttccagtatagtaaatttatgtaactctgggccatcatctcaacgtcaccggagagtgaacactggatgcaaatacaggaatcgcattgaaattttcaaggcacagtgaaactctcatctgttcggtgtcagcagaacacagtgcgaataaaaataacatggggaacaacgctacatccacaaataaaaaagttgatgctgctgagagcgtaaaggaatttttagatcaagcaaaagaagattttgaggagaaatggaaaaggaatcctaccaacactgctgccctggatgatttcgagcgtattaaaacgctcggaacaggatctttcggaagggtcatgatagtacaacataagtcaaccaaagattactatgctatgaaaatactggataagcaaaaggtagtcaagcttaaacaggttgagcatactctcaacgaaaagaggattctacaagcaatttctttcccatttttggttagcttgaagtttcatttcaaggataattcaaatctatacatggttctggaatatgttcctggtggagaaatgttctcccacttacgtaaggtgggacgattttcggaaccgcattctcgtttctacgctgcgcaaatagttctcgctttcgagtacttacattatctagatttgatatatcgtgatttgaagcccgaaaacctgttgatcgattcgcaaggctatctcaaagttacggactttggttttgctaaacgcgtgaaaggaagaacatggaccctttgtggcactccagaatatttggctccggaaattattttaagcaaaggttacaacaaggccgtcgattggtgggcactaggagttttggtatatgaaatggcagctggctatcccccattttttgctgatcaacccatacagatctacgagaaaatagtgtccggaaaagttcgattcccgtcacactttggctcagagttgaaagatcttctaagaaatttgcttcaggtcgacttaaccaagcgttatggtaacttgaaagcaggcgttaacgatattaagggccacagatggtttgcctccactgattggatcgctgtgttccaaaagaaaattgaagctccgtttataccacgctgcaaaggacccggagacacaagcaactttgacgattacgaagaggaagcattaaggatctcaagcaccgaaaagtgtgcgaaggagtttgccgaattctaagaaacgcgaaaagaaagagtttaatacactgcaatcatcaaaaaactagaattttatagaataaattgtacgtcacaaaactctcaaaacaaggcaaatagtaatgaccaatcagaccaaaccactatcatcgcaaagctgattgcccatccagtacaaaatcgatgtgtcattagaattgtaatgaaattaaaatcgtctatacgctgctgttaccacaatcaaatgatcatcccaaacgtactggatacttgctgaaacagaaatatctgatgtcaactcggcacgactgctgataacagtggcttctcaagctttttttataatggagagtttaggtatctacaacataaactaactcgattatcatgtcggattacataacgcaaaatacaactgaaaacatgttataacattacacaattatactaagtaacgttgcatgattcttcaacagcagtataataaataaatatgaagcaaacaatagttctatagacaaaaaacgtttaaattaatggattttatatacattactataaatagcaatgtaggcttccttattttatttattgtataaaaatattgagagcgttgtcgggtcagtgaagagtttgattcgaatagtactatgtgctgttctgttaataattattgttagttgtatatactttccttacaataaatctctgctgataac

SEQ ID NO: 53 - DNA, 2187 bp, Aedes aegypti
cgaaccatcgacgagaaagcaacgttgagaagcgcgctcgagtgacgatcgacccgcgagatcaagttttgttttaagttaaccagacactaggattgtgttgagattctgctttgtgttgggagggcaacttctttccagaaaggtgcaccacagaaagactatactactggggattgtcgtattgccggacgtcatgctggaaggaaggaagattctggtggtatggctaggcgcggccgtggggctgatctgtttggcccagtttgcctactcgtgcaacgagatggtctgcgccagtatagtgtccaagtgtatgctgacgcagagctgcaagtgcgacatgaagaactgctcctgctgtaaggagtgctccgagtgcttgagctatctgtataccgagtgctgcagctgtttggagatgtgcccgaagccgaacgaaactacgaacgagctgagcaagcagtcccatgtggaagagctggagggcttcccgaatctgttcaacgtgctgacctcggaggaggatccggaggagcgctggaggatcttcacgtttccgatcgatctggacgcggcgatgtacgggtcgaatgccgagaccgggatgaagtacttgatgcattctagcgacaacgacctgaagccgcgtctggacactccgtccaaaatgacagtcaactgcaccgttgcctacatggcccaatgcatgtcctggaacaagtgcaaggagagctgcatcaccatgggagctaccagctatcgatggttccacgacggttgttgcgagtgtgttggacaaacctgcatcaactacggtatcaacgattcccgctgtcgggagtgtccggagaataaggacctggacctggacgacatacccaacgaggacgagctggactatggagatggagttggtccgctggacaacggaggcgtcgaatcgaccaatatctgaacggaggcgtggtgggcgttggtggtggtcacggcagcgatggcagcgacggtacctgttgggatctaggaggagtctacaggagagaacaagaatagcagcgatggagcgtcaggtgtaatgtgccttattagaagcggtggttcgtgtatttggggggaaaacgaacgaaacgcttagaattttagtgaaactctgtgtattagacggaaaacgaagtatttgatggatgtacttgaagaatgaagaagcgtatttcagagaaaggactgtgtacttcgttctacatatttaaattaaccgcaaggggagtcagctttgtgacggtgaaatgaagtattgcaactaatacttaagtatttttatttttgtaaaataaatctatactcgtatattggttttaaatttgtaaaatatttcaatcactttaatggtaatatctaagacttgggcttctttttgcctttcttgaattttcctacggcttttgcgactttggtaactgttgtaaacttatcaccaggttcgtcaatttctcgcaccattttggctttgttcccggaaattttcctcttcgtgggttgcttttgctgaagcgccctcatcagaagtcgattcatcttagtgatctcggccttcatttcttccagcttgtcttcggtatccgtgaaactgctcattgatgccatagaagtcatctccgctcgtctactgtccataatctcccggagcataatactcgcatcggcaatttgcaacgcctcgtccatgatgtgttcgtccagcgtacaaaacaatggaaacttgagaaatttcaaattcacaaagaatccttccgatcctcgaacgagccatccgccgggcatgttcggaaccacgcgccattcacctttcggaagcttctggcctcgttgattctccgcttgtggattgatgtgctgcaccagaatcttgcggagttccttcggtttgactatgatgatgtacgaatggttctcgaagaacgaactcgggaacatccgacggatgaactcgatcggcatctcccgaagaccgcgttcatatcgttccaagattaggactttctttcgcaaactgatcagctcggactcctctttgatggcggtgatgtcactgacagcaagaccgttgatcaagttcaggatgacgatcggagcgaagaaaatgaacaggacgaagagaatgatcttgccaccggagaagtcaac

SEQ ID NO: 54 - DNA, 4833 bp, Aedes aegypti
ttgctctacaccacgtacatcgacattcggctggcgaatgtcaccatccagcagaacaccacctgctcggtggagatcctggtcaaggatctgaacgaggcgtccgccatggacttctactacgatcggggcctggtgtgcttcaccgagcacaactccgagacgatccagtgcgcccagatgcggggagatggggcgccgcaggccaccgtcaacaaaacagctgtgataacccacgggctggacaagcccgagggtctagcgatagattggtataccgataagctctactggacggacggcgagacgaaccgcatcgaggtcgcgacgctgaacggaaagttccagaaggtgctgatctggagtgatctcgatcagccacgtgccatagctctagtacctgccaggcggttcatgatctggaccgattggggcgaaagtccaaagattgaacgtgccagcatggatggcgatccgcaatcgagggtggtgctggtgcacgaccggatattctggccaaacggattggccgttgatctggaaaatgaactcatctactgggttgatgggaatttgcacttcttggatgtgatgaacctcgacggcagcaatcggaggaccctggtcaacaacctagactacccttatagtttgaccttcgcacccaactacctcttttggaccgattggcaagacggaaccttacattattacaacatagccaccgaaaaacacgaaaaaattttggacagtcccgtcgtcccaatcaccatccacgcatgggacccccgtcttcaaccggcagcagataacccctgccggagaaacaacggcgactgctcccatctgtgtcttctttcaaccaacatggcggggtatagctgcgcctgtcccactggggtcaaactactcagccggacacagtgcgccgatggtccgcaagatatgttgttcgtggtacaacgaactcaaatcagtcggatatcactggattcgccggattataccagcattcagttgcagttggggaaggtacggtacgcgatcgccatagactacgacccggtggataactacatctattggtcggacgagggatcgaacgcaataaagaaggtacgacccgatggcacgggtatggtcgaagttgtcaacacggagatccagagccctgatggactggcggtggattggttggcgcgaaatttgtattggacggataccggaactgatcggatacaggtatgccgcttggatgggtcgttcaggcgggtgttgatctacgagcatctggaagaaccgagggcaatcgcgttggcaccgacgctgggttggatgttctggagtgactggagtgagaaagatccgaaaattgagcgagcttcgctagacgggacggaacgggtgttgatcgttcagcagaatttgggttggcccaatgggattgctttggatgtggaggcgaggaagatctactggtgcgatgcaaagatggaccggatcgaggtcgccaatatggacggatccggtaggaatattatcctgtcggacaatttgccgcatgcgtttggattgagcctgttgggtgattatctatattggactgattggcagagaagatctattgatcgagcaaataagttgaatggaaatgatcgaacagttatcgtggaagcattccctgatttgatgggtctaaaggtcgcgaagcttggtgatgcgaaaggcaacaatccatgtgcaatacggaacggaggttgctcccagctgtgtctcaaccgaccgagggactacgtctgcagatgtcagatcgattacgagctggatcgcgacaacaggacttgcttcataccatctgcgtttctgttgttttcaagacacgatacgggaagcatcggaaggatttccatcgatagtcacaaccatacggattacgctccgtttagaagtgtgattgacgcccattacctggacgtcgacatagccgatcggagaatttactgggctagtcaaaagcagaagcacatttcccgagcgtacatcaacggctcgaacgtggagaaaatcgttgaatccggattgattcaaccggaagggatcgctgtggattggcttgctcacaacatctactggacggatgcggaagctagacggatcgaggtggctaggctggacggaagcagtcggcggatcttgatctggaaggggatagaagaaccgaggaatctgatcctagaaccacgtcgaggattgatgtattgggcagaatggccttcggattctatccgtcgagctgtgatggacggaagtgagttgaaaaccatcatttcgggagccaaccttgcgactgggttaacgctggatccggacactcgccgtctgtattgggcctgtcagagttcgccgattgctattgaatctgccgaatgggacggcaccaaacggaaagttcttgtgacggcagattccgacaatccgtttgttccccacgccgtgaccttatacaaggactacgtctactggagcgattggaatacgggagagatcgagcgcgccaacaagaccaccggcttcaaccgtactcttgtccatacgaacctgaagtacaccaattcgctattagcattccatccgttccgccagtccggatcgaatcaatgtcgaaccaacaatggaggttgttcgcatctgtgtttggcgctgggtcaacggaagatgacttgcgcttgtccgacgcactacaccttgacagcgaatcgcgtatcctgtagtccaccgaagaactacatcatcttcagccagcggaattcgttcggacggttcatgcccaacacaaccgattcgccggatgtgcctctgccggttacggggaagaacatccgcgccgtggagtacgacgttgtgacgcgttacgtctactggattgacggtcggggtcccattatccgacgggcgtttgacaacggtaccagcgccaaggtgttcatcgacccggcttcatccccgttcgacatggtgatcgatccgatagggcgactgctgttctggagctgctcgcataccaacaccatcaacattaccactttggatggcgaaatcgaccgcattgggaatgtcgacatcggcaactctgagaaaccacgtagtttggcgttacatccgaccaagcggttgctgttctggacagacgtcggtaccgcgcaatccatcatccgcgccaaacttgacgggacgcagcggaaggagctgatatcgcggctcgaaggaatcacggcgttagcgctggatccattgacaaatcgactgttttatgcccacggcaaacggatcgacatgatggatatcgacggcaaggagatcaaacccctggtgaccgaacacatcagcctggtatcctccattgctgctctgaatggatacatctactggttggatgagcgtcccgggatggagcgaatttccatgatcggtgaaaaccgtcgtacggagattcagaagataccgcacatcacggatattgtggccgtatggacaccggaaccgaggatgctgcgaaatcacacgtgcaattcggcacgcgccaagtgcagtcacatctgcatcggtgcgccggacgacgtcaagggtgaagacgtctgcggatgtcctcaggggttgatgttgatgaaagatcgacggagctgcggagcgctgccggtgtgtggaccggatcacttcacgtgtgcggtgacgttctccagtaatggcttagatggagacaacaacaaggactgcattccggtctcgtggcgttgcgatggacagaaggattgtccggataggtccgacgaactagattgtccggcttgcggagcggatcagttcaaatgtcagtctggggagtgcattgacaaacatctggtttgcgatggaacgactcagtgcttggatgggtatgatgaagcggtttgctgtaagcatccggaagacttccagtgtccaacgagtaaggtctgcatttcgtaccacaatatttgcgatggcgatgagcactgtgctaatggggaagatgaagccccggagctttgtgccgagtataataataggaggatggctcccagtggcagtaaaattactatgctgattgtggtagtcatagcggtggctgtagtcttcatagtggtctacctcctgcagacctgcaggtcccgatttggcgctggatcttcggagcccaaggaagatcaagcagccgcaccactctctccaggcggtctaaacaagaatatccgtgtgtccaagctgacctccgtggcagacgctgtccggatgtccacgctcaacagtcgcaacagtaccaatagctacgaccggaaccatatcaccggagcgtccagctccacgaccaacggaagtagtctgattggatatcctctgaacccgcctccctcgccagccacgacagcgggttctgcccggtactcctcgaactatcacccgtacaaacactacaaaatcatcaatcagcctccaccgccaacaccctgttcgacggatgtctgcgacgagagcgattccaactacacgagcaaaagcgcccgaagcagggatcgcatcggcgggatgggaggcaccagtagcagtagtggccgcggcggcaccagtggcaacgatcggtacgattcggaaccgtatccgccgcctccgacgcctcggtcacattaccacagcgacgtcgggggaatgctcccggaaagctgcccaccctcgccgagttccagaagctcgacgtacttttcaccactacctccaccgccttcgccggttccgtcgccatcgaggggttactcgtag

SEQ ID NO: 55 - DNA, 1565 bp, Aedes aegypti
atgtggatcccaacgacagtagccctcagcatggtggtagccttcgcggctgcagccatagaaagtaatccagcgaggccggttctgttcggaagtcagaagacagcgcctcctcgaggaccaccttccgatagtatcgtcgacaacggaaactacacggagtggcgtgtattcgatcaacggcaaagtcactcgaacgcccacagcgtggacatgttcccaatgcgatacgttagcaattcgaagttctatcgaccaggtggtcccattttcctgtttgttggaggaccttgggagttggagcagcattttgtcgaacaggggcattttgtggacttggctgaggagaacaacgcctttgtggtagccaatgagatgcgttattacggagagagcttgcctgtaccgaatgcatctcgcggaaacttgcgtttactccacattgtgcaagcatgtacggatattgccaggcttatcgtgcacataagatacgaagtgttgagagatcctaacgcaagagtgatcgtggctggtgtgggtttctccggctcacttgcacactggacacgactgcgttatcctcatctgattcatggagtttgggcgtccggtgcgatgttgcaagcaaacgaaaattacagagagtttgccgaagaggttggagagtatattcgacgatatggtggcaatgattgctacggtgcactctggagaggtttccgtacggccgagaatttgatcgatgcaggacagtcgcaaaccgttgataaattgttcaaggtatgcactccgatcaacggtaccaacccactggacgttgaagcatttttctacggtattttcaacgaagtcgtttcgaatactttgcgtcccaatctcagacagaacataagaaacatgtgtgatacgttgactcatgaagatcacgatagtagcctaacagggttggccagctggataactggtcagttcccagaagcagagtgccttgcaatggacttggaaagtatcgtacagctgttccaggaaaccgattggcagcacgatgtgcacaaatctggcgaacgacaatggttttaccaacgttgtaccgaactgggatggcctctgacggcagactcgatgaatcaaccgttcggtgtccgaatctcctctaatcttttccaacagctttgtcagcgagttttcgatggctggctcacttcggacgttttccggtcacttgttcgacagacaaatactttgtatggaggaaaccgaccggaaatgaggttcgtgttttacactcatggttcgctcgatccgtggaggttcaccggtgtaactacggtgctctacaacaacaactacgtcaatgtcattcgaggtgctatccatggagaagatttggcctccatttccgatctggactgggctgacttgaggcgcagcaaggaggaggttggtgaaaccattcgtcgctggttggagaggagagtttgaagaggcttacaattgcaattggaggattttcataagccacgtagataaaatttcctccatgtacacttttgttaacacaaaat

SEQ ID NO: 56 - DNA, 1735 bp, Aedes aegypti
ccaatccaaataccagcttcaccggcttccaagatcagctggacaataattagaaccggcttctcgcaacgctgctcgtttctccatagaccgtttacacttcgtccatccaacacacatccgtcatcagtttcgctctcgtgctctttctctccgaacctgcatcacccagtataactaatatgaatcctcccgcctatgcgcagaagacgtccaacgcaaacgacgacttcacgatgtcctacacgcgctcgccacaactcgaattcgagttgtttgttttcggttttttttggcaactcttccactagttctgaatgctggcggtgtggtgcggtactgcagtgagggggctagggttaattgcaaattgccaatgcttaattctgcgcgcgatgttagaaaagatcacggcgagttgtctaccattagacgttagtgtttcggtgactgtgacccagtgtgcatccttttcctgttgtgactgcagaaatggttcttctgaggggagatcctgtgaaattggcgcttccgctgctgatggtgttgagctacggaagttctgtgctgggaaatggactgatacggaacgactgtgtgtgtgatccgctgaatgccttcctcgactcgctgccgcttaatcgtgaacgaacagatcaattgctagagacggatggctatcagggaagagcacacagagttgtcacacaggatggctacgtgctgaagctgtatcagatttggcgcgatcaacagccagtggtgaactcaacacgtgggacgatcctgctgcagcacgggatcatgcattcttcatcggactggttagtgttgggaccgggtcgatcgatcgcctatcagttggtagaccttggttatgacgtgtggctggcaaacagtagatctacgatgaactcgcatcagcacgagaagttctgcacttgttcaaaggagttctgggactacagttggcacgaacaaggcttttacgatctgccggcgatgatcgacacggtcctgaacgaaactcagcagcagcgactccggttgttagtctactcagaaggtggagctatggcaatggtcatgctctcaacccgacccgaatacaacgataaactgatcgcgctggatgccatggctccggcagcgttcgtctccaacacctggtaccgctacctggccataccgttcgccaagatcccgaaagtcttccggtcggcttacgcggtatactcaactaacgaagtcacggtagaggcctgccaaacggagtaccagatatgctcggatctgtactttcaattcctgaacggcgagagcgtcggcatgaatcggtcctgggtggatcgaatctaccaggccatgccggcaggaggatccatcaaagaggtcctgcactacgtccagctgatctggacccgcaagttcgcgcctttcgatcacggtccgtcgaagaacctgcgactctacggacaacgaacgcctccggagtatccgctggatcgagtgtctgtgccggtgaacatccactacggactacgggataagatcgtcgatccggtgggagtgatgcggcttggttctcggctcatcaacagcccaagggttcgcatgaggccgtacgacgagctgcagcactcggactttatctacggcgatgccgcttacaatatggtgtacaaagatgttcttatgtggataacggaataaagtgaatgggttaatggagccg

SEQ ID NO: 57 - DNA, 716 bp, Aedes aegypti
agcgcttgccgtgagtagactgcgccactcgtttgcttcgaacttgttcataattagttgagtaaacaaaaatcgataggaagaagaatgtcgtttgtcatccgcaaaatcatctccactggcaaatgtcctaagcctttggccccttatagccaagcggtggttgccgatcgaaccgtgtactgctcgggggtcatcggtattgagttggacgaaccgaagctagtaaccggtggtgctgctgtgcaaactgccaaagctttggaacatctcacaaatctactcgccgaagctggctccggtatcgataaggtggtgaagacaaccgttctgctagctgacatggaagattacgcagctgttaatgaggagtacaaacgagttttcggaagcaactttccagcgagaacgtgttatgccgtatcgaaacttcctctaggtgctgctgttgagattgaagccgtcgggattgttggagacgtgaaacatgaaatgtgaatgttgaaatgtgtgcaagttttgctcaataaatataaatctcgtttgcaatcttcctccatttatgttcagtgttactatccgagcagtaacataatcaaacaagtatacatgttaagcaatatattactgcccaaaaaccatcttttgtaacacaattttattgcgattcagtgttagaatttaaatatttgaaaaatatataactctatacgctc

SEQ ID NO: 58 - DNA, 709 bp, Aedes aegypti
acaatttcctccttgttcaatagcacgtagctacttgtctagccatcagcaatcgtatcacatatgtgacgatacggtgagccatcctcctacaccctatagatagtggagcatatgcactttgatgtactaatcttcctagtatatcgctatataagcatttgatactaactagagtgaagtacagtccatcgcagcactctcaagtacccagaactgaacaaatgaccgccaccaaagagtttacccgccaggaagtggcgcttcgagacggcaagaacggtagtccaatatggatcatcattcgcgacgtagtgtacgatgtgaccagctacgtggacgaacatccgggagggccagaactggtcaccgatttcgccggccgggacggaacgaaggatttcgatgactttggccattccagtacggcgatggagatgctgaagcagtacaaagtcggcgagttgaattattgtgatcgagctaaatttcaaaagcaaggatcgaattggtcaccggatggagcttgtgttctgccggacaagaaacgcagcaagaagcggaagtttattttctgtggataaattgactaagatatagccgatggaacgttacagattgataattattcgtttaagaaactaagctactttatttattctatttaagtaatttcttgttatgatagctcaaatatacattacgtttt

SEQ ID NO: 59 - DNA, 1503 bp, Aedes aegypti
gtgaaagtgatcacatctcagcgggacgcggtgaaactgtgattgaactgatagaactgtgatcaagatcaactcaacgaagtagaatgttgtcggttctgtcgagagtggctcagcgggggaggagcttatcggctgtatccgcagtgcagcgctgttatgcatccacgggaggaaaggaaccaagcaaaacggctctgtacgaattccatcaggctcaaggtggaaaactggtagactttgccggttactggttgcccgtgcagtacagcgatcagagtattattaaatcgcatcattacacccgcgagtatggatctattttcgacgtgtcgcatatgctgcaaacatatttgagaggcaaggatgtcatcagttgctttgagtcgatttgtactgcagatataaagggactccgaaatggcactggaacgttgaccgtgttcaccaatggaaagggaggaattttggacgatctgattgtgagtcgagtgtcggaggatactttgtatgtggtctccaatgcatcccggaaggatacggatatggcagttatgaccgatgcagtggcatccttcaaatcccaaggcaaagacgtctcggtgcagttcctgtccagcgatgaccaatcactcctggcaatccaaggtccacatgccgtttcagtcctgcaaaagctgtgcaccaaagacctttcccgcttatacttcatgaataccacaacggacactattgccggcgtagaaaactgccgaatcactcgttgtggatacactggcgaagacggagtcgaaatttctatcccatccaacaaagccaccgacattgcttcagcgctcctggagcaaaaagtcggcaaccttaagttggcaggtcttggagctcgcgattccctccgactggaagccggcctatgcctgtacggcaacgacatcgacgagactacgacccccgttgaagctggccttctctggttggtggccaaacagcgccgcgcagaaaacaatttccccggctcggacaagatcaacaatcaaataaaaaacggcgtcactcgacgtcgcgtcggattcaagatgtccgcaggatcggcccccgcaaggcaacacgtggaaattttcgataacgaacatcacaaaatcggagagatcaccagcggctgtccgagcccgtgtctgcagcagaacatcgccatgggatacattcgggaggaatcgaaaaaggtgggcaccgaagtgacgctcaagattcgggacaagttctaccacagccaggtcgccaagatgccattcgtcgcgacacattattatcagcaaccgaaataagaaagtgccgaattgtttgcctctaggttgaataatgtatgctgtgcatgtgtgttttggcgcgtgtagtatttatgtttgcagcttatcagttgaccccggattggacgggatgaatcgtaaaagttaacggcctgacatatgataagcaatcaatagctcttacaacgtatggaaa

SEQ ID NO: 60 - DNA, 787 bp, Aedes aegypti
gttgaggattaaaacaaaaatctcggtataagtagttagtaccttggtagcttttaacatggaattgtgtctcgcggataaaaagattgtagttactggtgcaggccagggtattggcaatgagttgtgcaaaacgctggtcaaattgggcgctaaggtgattgcggtctcccgatcaccaggtccacttgaagcgctgaagacggaatgtccctccgtgcaaattattcaagtggatttgagtgattggggcgccaccagaactgcactggagaagatcgatcgcgttgatgggcttgtgaataatgccggaatcgctattatcaaaccgtatgatgaactgaccgagaaggacttcgatgacacattcaacatcaatatcaaggctgcgttcaacgtgtgtcaaatcctgatcccgaagatgggcccaggtgcaagcattgttaacttgtcctccttggcagggttgaagtccttccaagggcatagcgtatattcgatgacgaaagctgccatcgactccatgacgaaaagcttagctctggaattgggcgagcggcaaattcgagtgaacagcgtcaacccaacggtcatcctaacgcggatggggcgcgacaactggagcgatccagctaaggccggtccactgatagcgaaaataccggctggacgtttcggcgaggtcaacgaagtggtggagcctattatattcctactgagtgacaagtctgcgtacatcaatggccactgcatgccactggagggtggttatttggcaggaaattga

SEQ ID NO: 61 - DNA, 6228 bp, Aedes aegypti
ggaaatataatagttctactgtcttatttcaaatggaaactaaatgttagtaatatgtattatctggaaaaccaatcacatatttattaatcttccattagttatccataataaacagatttacatattcctaaatggtaactaccttggataaacgtgtatcactaccaacactcgattatacatatatccttacttcgatttgcgtctcactcctgtatcgatctcgctattttcctttgtatgatcttgagagcactccacaagctcacgtgtctccgaggaaaatccgcacctggtttaaagcttcccatcttgctccactccaccagccaggtccccattaaagtctcgtaatcaccaccagcagctgcaccatcaaccaaccagcacataaccccgttcgaagaatcaacggttattttcttcgccgcgtgaacaccttcttaagggtaaagacggttgaggtgcagcgcgatcacgctggtggtggaggtggtgctcgtggttcccgtgaagatcgcgctcgctagacagtaacggtgagagagagggatcgcggcgagcagccgccgttgactttataaatacaatccgccaaccgattgaactcatcagtcttcacttgcgctttcgtggtgtcagacctttctctcgcgatcttgaggaaaagcttggagaagtgttgggtgaagaattggggttgagcaaaactgggataaaagcgtgctgaactttcactgtttgcgccgccatcagaagaaaaagaagaaagtgaattccgtttgaactttgcgccattcggccgaatcctaaaatgaaagtgaaactgtattaccgaatcgatcgacggttcgaaagtgacattacctaacaatgctgaacgcagagtgcggacaccgagtgtgttcgaatgattgaaaatgatgtgatataatcttctctgtgattcacatgtgatcccggaaacaaacagcaccaacgtcgagtatgtggccctgggacggcaagttccgccgaagatctcgctcaagcggacgcccctggaggggatgtgtccctcgagggaaccgccgccctgtgttccggccagccgccgctaccggacccacgatggcacgtgcaacaaccggaagaggccacgctggggctcggcccagatgccgtttcatcgcttcctggcgccggagtacactgacggtgtcgaggggatcagacgatccatcgccaacggaccgctcccatcggcacgtttcatcagcctggtagtgcacggatcccgccaagaggaagcccccgtcacgatgatgttggccctgtggggtcaactgctcgatcacgacctgacggccacggcccaaccgcgcagcctcaacgggtccactccgcgctgctgcgggcgcaacgacgaaggcctccatccgtcctgtctgcccatcaaggtcccgctggacgatccgtggctgtcaccgctgggcgtccgctgtctggagttcctccgatcggcaccggcccaaaggcgcgattgcctgctgtcctggcgcgagcaaaccaaccaggttacctcgtacatcgacgcttcgcccatctactcgagcaatccacgcacctcggataacgcacggatcttccgtaacgggttgcttctgttcggacggggaccgcccagcgaagacgtttgcttccgggcggcgcttgccaaccagtgcatccgtccgggagatgcccgaagcggcgaacagccgggattgctgatgctccatatggtctgggtcaacgaacataaccaaatcgccactcagctctccgacatcaatccgcactggagcgatgagaaactgtaccaagaagctcgacggatcgtcggggccatgttccaacacataacctaccgggagttccttccgatcgtactgggcaaagaggtgtgtcatttgttcgaccttgaactggagaccagcggattctacacggggtacgaccccagcgtgaatccaacagtggcgaacgaattctcgtcagctgcgttccgattcgggcactcgttgatacaaggatcgtacatgagagccgacaggcatcaccggttcattccgaacaacgtgacactgcacgaggaaagcgccgaaggagatcttggcgggccgggctcattgcatcgattggtccggggcatggtcaatcaacgtgcactgaagcgcgatgagtttatctccgcggagttaacgaaccacctatttcagacaagaagtttcccgttcggattggacctggcagcgatcaatatacagcggggtcgagatcacggaattcagccgtacatgaactggcggataccttgcgggttaactcccatcaaggattggtcggatctggaccgcgttatgggcccagcatcggctttgcgattacgcaaagcttaccgctcagttgacgatatagatctgtttgttggtggtctagccgaacgtccggttgttggaggtatcgtaggacccaccttttcctgcatcattgcccagcagtttggcaatcttcgtaaaggagatcggttctggtacgagaatcctggattcgagtcctcgttcacgccagcgcagttggagtccatccgccaagtagcgttctcgcaagttctttgccgagcacttggaggtggtaccttgcaaccccacgtatttctaccagctgacgccgtacaaaacgaacgactatcatgcgactcgaaactgatgtcacccattgacctagaaccgtggactgaacgtgacccttttacgagaccaaacgacgagccaaacgccgaacaaagtgacaatgacataagtgcagcacaatccgtattctcaactaccacaaccagaaaaccactgaagaacgccaacataatcaacaaagtagactttattccgaacggcaatactggacaccagataccctccaacggacaaatcgtactgaactctcctagaccttcaacgacaatagtgaacaacaagctagactttaaccttaacactccacgaccgacccctgcacaaccgactcaacctagacctgttccacagaaagacccaattcctacgccatctactgttatagacaacaaactagatctgacaggaacaactgctcctccgaaacggaaacctaccaggaaaactacaccaagacgacgaccgacggctgctacaaacctcatcatcaacaatatagacttcagcttgaaacgtgactctaccgacaacgttaccgacgacgaagaccttgaacattcgttgaaaaaacgtgacttgaacctatcgaagttgtttacaaaagaagacaacgcaacgctactgtctacaaccgacaaaaacgcacttcgaagcggctactacggggcacctgcaccggcaccaccctctgactacgatgacgttaacaactacgactacaacaatgactctgacccgccagtattcgttaaacccggatatggccatgactcaggttacggacacgtgacagaaccaccgccaaacccatactacggaggttactatacgactgaaaaaccaacgccacctcctcacccaccatactgcgcttacaactgctacaatccacctatgacaacctacaatccctacggactggacacccgacgacctaccaatcgacgaacgactcccagacgaacgctttccaacaagatcatcaacgactatgaccacagtcaacagcaggacagacaaacaaccaaacgaccaccacaaacgcaaactcagacaactttccaaagacctggactactagtaataaacaatgttagaccaaatgacaaaccaatctttctatcgtctgctccttctgcgcctttaccttcttcatctagtctcaattctaatgtcttccttcaaaactctcagaaaccttcctcttcatctgcctctcaatctgtcttttctgtcgaccctagacctcagtactcttcttctagacctgcccatcatcaatctgctctaccttcgcctatcttctctcagaaaaagactagtctacgcaaacctcaaaagcatctacagacggacagcaaagaccgactgccttcccgaatcgttcctcctcttcttatgcaagactacgactatgacattccggacgccaaccgacaagatacactgaacatccacgaacacgacggctacctccgacccgaacagaacaagtacgaacctcttaaaaagacctacgcacacgcaacctaccgcaactacagccagtacaacgcacacgaaccgtacatcgacagctatacattacaaccaccgacgaacgcaacgctttggccacgcaagaactttgaacagcaccaacgatacgccgaccggtaccaacaaccaatggaagagacagacgatgaactggaccaatacgttggaccgtacatagaccgggacaaagaaacgaaagaccatgactgcgcagactcagacgtgaccgacaatgttgaccttactgaacaccatactgacgatgaatctaccagagacaatacgaataaacatgatcagactgacgaaacttttacagtacaaaacactgacctggaaaaagctgtgacagacgaagacactgccatgaagtctaagacattcacaacgggcgttaaaacaaaggacattaccaatatcaaaggcaagacaagttcgacgaaacaatacgtgaccacgatagactatcatggacctgatgacccgcaacaaaaacaaactgacaaaaacttatacatcatacgacattatgcagacaaactaacacgtgaacatgacaacgttgacagaaaagtaacagacaatgtagaccttactgatactgatacagaattggcaggaatagacgtgacaaacctcgaaacaattgaccaacgattgaaaagcatgactgataaccaaaaacacgacaaaaccaagttgatagaagcaaatacctcgatcgacgaaactgttgaactagaaactcttaagacactgaacattctggatacggacaatgaaactgatacggaacgccaacatgacgaacaacagtcgactcacctagtacggactgactacaactcaacgtctgaaaacacgacagacgacaacctacaacagactaatgaccaactatcacttactggaatcactcacaaaaatgtactgactaatacgaatagcaagactaaaaaccaagaacataccccaactgagactcagacttcaggagaaggctcatacgaagactacatgaccgttgacaccaacaattcgccagacttatcaattttacaaaccaacttgacgaataaaccaagcttgaccaagacgatcaaaggacaaacgtactatgacgaatatgatgacgatcacgacgccactgccgaccaggatctcctacaaaaacccaacgccgaccaccaaacgaactccgacccaatagaccgactgaccttacaagacatccacgcccgaacgccagaccgagccgacccaatagaatccattctaccactggacgagaccgacaccaccaacgaccctccaaagcccccacaacctgaccaaacaacgcaaagacccacgcgaccggaccgacgcccgacaccccaccaaagaagacgcagaccgacttccaacgcaaaacgaccgacttcagcagcgacgtcgacaactggactcggacacggacaccacgaccgacgacaaccgggaattgcgctggttcccttcgtcctactaactagtatcgaaagaccggacaactgggtgatgttcaacgtggccaagtcgaagaagcgcaatccactgccggatgttccgcagctgaagagcgatgcgttctcgctgagcgagctaccgaaaccgatcagtgcggaagactgataccgtttcggggaatttcttttgtaaacagcatttgattgacctatgggacgacttgctacgggacgacttgctacgggacggaatgactaatactttgactgcacttaaatacggcggacgaagttttacttattactggaaagaccttcaacctttttactgtactaagacctgaccatgactatcacatagcttacaggtattatcaactgaatcgttgacgttctggtgtgcaggttcgattgcatgaatttgttattatttattacactatttatttattgatatttattaaaacaatttatgacaaatgaaa

SEQ ID NO: 62 - DNA, 2058 bp, Aedes aegypti
atggccactggaaatcgtaaattgcttgccttgctgcagcgccccttggagcctacgttctaccctaaggacgatggaaggacggttattgacctgccggaaaactatctcaccgaacgctacaggccaattggtgcgaacattcagaaccgatttggaaacgacgcagacacccgaattccagttcgcaatgttggtagtccgaatattgcctttgcggaggccattcctcgccgtggtggattttccctgtttaaccagagagatcgtagggttgctggagatctaatttcattgttcgtgaatcaaccggatcccgaaacgctgatggcagttgctgcctatacacgagatcgtgtaaatccagtcctgttccagtatgcattggccgttgccattcaacatcgaccggatactagggaactgaatattccctcgttcttggagctgttcccggattcgtttgtagatccctctgtatttcccaagttgcgtgaagaaggttcggttgttcaacaggagaatcggatggtcatcgacattccgttgaacttcactgcttcagaacgcgaagaggaacaacggctggcgttcttccgcgaagatattggagtcaaccttcatcattggcactggcatctggtgtacccaggggatggacccgatgcagttgttcgtaaggatcgtcgtggagagttgttctattacatgcaccaacagctgattgcccgatacaatgtggaacgtttctgtgcacgtcttgcccgagttcgaccgctgaacaaccttcgcgttcccatccctgaaggttacttcccaaagattattagaagtttgaccaatcgtgcattcccaccgcgtcctcaaaatcaaattttgtccgatgtcaatcgagtggatgaccaggtggttttcactataacggatttggaaaactgggaacaacgcatctcagacagtattgatgctggatttgtgatgggaatgaatggtcaacgcatccctctgacagaacagaacggtactgatatactaggtaacattatggaaccttcttcactttcggtcaaccgtcaatactatggaagctatcacggaaatttgcacaatgttattgcatacagccacgatcctgagggtcgtttcttggaaggctatggagttgttggagagttccaaacggccatgagagatcccaccttctatcgtctgcacgctcaagttgataacatgttccatcgccacaaaaacactctgccaccttatacggccagtcaactcaactacaacggcgttcaaatccaatctcttggagttcagttgaatcgtgctaatgctcctgcgaacgtactgctgacctattggcaacgatcgcaagttgatttggccactggattggactttgggccacaaggaaacgtatttgcctcgttcacacatttgcagcacgctccgttcactttccgtctgatggtcaacaattctggcgctagacgtcgtggaacttgccgaatcttcatcggtccaaagactgatgaacgcaacattcctctgacctatcaggaacaacgtattctcatgattgagctcgacaaattcaatgttacattgaaccctggtgccaattctattgtccgtcgttcggagcaatctagcgtgaccatcccttacgagcgtacattccgctcggtagcaatgtccaatcaaccaactggcgctgaacagttccgcttctgtaactgtggatggccatctcacttgctgattcccaagggtactccagagggaatgaccttcgatctgtttgcgatgatttccgacttcaccggcgatacggttaaccaggaattcgatgaaaacgtcgactgcaacgattcgcattcgttctgtgggcttcgggatcgtctgtatccggatcgccgtccaatgggttatccattcgatcgtcctgccactggcgccactcgaaccttgccggatttcattagctcgaacagcaacatggctctcgcgaacgtacaaatccgattcaccaacactgtaattgctagaacctga

SEQ ID NO: 63 - DNA, 1474 bp, Aedes aegypti
gtattgagaaatgcttgatggtctggattagaacagggtccaaaatgaatcaggtttcccaatatattgtttaaaaaaatttatatattttgactacagataaaagcaaaaaataatgatatttttactcatttcctagagaaaatttgttttgagtaacatttttatttctattctgcgattatcgaaattattagcttttcccagtccccgtacatgtttaatcgttaatttacattcattcttatcaaaaccaatccattatcaatagtttaacgttaatatgttaagtataccggctgcgactgtgtaaatgtatgttatcgcaccactgcattcgatcgccagccgatggaaaaattgatcgttccacagttcggtttgatcgttcgatcggtacacttcttcgcagcaggatggcaagcatcgtacgtaaaattgttcacactgccaagtgtccaaaggctttggctccgtataaccaagccgtagtggccgaccgtacagtttactgttccggagttctgggcatggaactaggctcacttaagttggtcgatggaggagctgcagttcaaactgccaaggctttggaacacttgacaacactgctggaagcgtccggatcaagtattgaaaaggtcgtcaaaacaaccattctgctggctgatatgagtgattacggtgccgtgaacgaggagtacaagaaagtgttttccaacaatttcccggctcggacgtgctttgcggtcaacaaacttcccctgggagcatcagtggaaatagaagccattgctcttaccggagaagttattcaagtgtccacatgacttgccacaaatgtctagatcccaagcaagacctgtgctgttaatccaaccaatttgggtaccggtgtgaaatgaactagaaactggaaacgatagacagcatctagcaaagacatttgtgatatgctgctttaagcacatttagtcgagcttggagtgactgtgttatagactggtttattcaataaatatttttagcgatatacattttatttcattttttaataataggcattgcatggccctctatccaagcaacattctgaattttcaaacaatctacaaacatcttcaagagtaagtgaactacggagacacatttgaaaaaaaaaaactttttcaaaggataaaaataataaagttcttcgacaagaagaattagaatccgtggtcagtattacatcatcaggtatttatgttgaaaaaaaaaaaaatcaaaatttttcaaggagaaaaggcgccgtccacaaactatgtaatgcttccaaaaatgggggaggaggtaggctcaagcattacgtctcatacaaaatttaaaaaataaatttcaataaaggcttcaaaattgacagcatggccttctggtgcctttggtggacttgttttgaaacgttatttaatgaaagcgtcatatttgtttaaaa

SEQ ID NO: 64 - DNA, 2317 bp, Aedes aegypti
agatcataagttatgcgagaatttctcttaaaaacctcaccaaatcaaggtgtgccaatttttgccgactttcccctattgttaaattgcggttcccattcccatcccaccccatacggtcaccctcatctatgaccatcagtcgtttcgcatcgattctctcttctacacactgtaggttactatcgtcagtttaggtcgcgccatacacatcgtcagttcgtcgtcgtgccggaatggtgtagcatatatccctcgaaaaagaaagcaaagtatctattatacaaccatctatcggatcgccatcgcacctaccagtgtgtgcatttttcgccggatcgaaagcctttactgtgcggaattgaaaatctagttatcctagttggtccccgtaatccgtaacaacccacttaaggtcaagatgagcatattctccgctgtcgaagttggaccccccgtggaagtgtttgcgctgaaccaggcctgcttgaaggatcccaacccgaataaggtcaacctgggagtcggagcctaccgtacaaacgagggcaaaccctggatccttccggtcgtcaaaaaagccgaagcggccatcgtggccgatggtagcctcaaccacgagtacctcccggtgctgggaatggatagtgtgaccaacgccgccaccacccttctactcggtgacgactccgaagccatcaagagcaaacgtgccttcggtgtccagtgcctgtcgggaacgggagccctgcgggtcggtgccgagttcctgtgtcgcatcctgaagcgaaccacgttctactactcgtcgcccacgtgggaaaatcaccacaaggtgttcgtgtacgccggatttgccgaaccgcgcacctatcgctactggcaccaggaccggcgcggaatcgacttcgagggcatgatcgaagatctgaagggggcccccgaaggtgcggtcatcattttgcacgcttgtgcgcacaatcccaccggtgtggatcccacgcaggaccagtggaagcagattgccgatgtttgcgaggagaagaagctgttcccattcttcgattcggcttatcagggattcgccagcggtgatccaaacaaggatgcctttgccgtgcgctactttgtggagcggggattcgagttgttgtgcgcgcagagcttcgccaagaacttcgggttgtacaatgaacgtattggcaacctgaccatcgtacagaaggacgagtccaccaaggcggccgttgcctcgcagatcacgctgctgatccgtggaatgtactcgaacccaccggcgttcggtagccgcatcgtgaacttggtgctgaacgatgccaccttgagggccgaatggatggaatgcatccagacgatgagttcgcgaattatcaccatgcggaaggcactctacgacgaattggtggccctgaagacccccggaacttgggaacacatcacccagcagatcggaatgttttcgtacactggactcaatgagaaacaggtggacatcctcatcaaggagttcagcatctacctgctgaagaccggccgaatcagcatgtgcggcttgaccgagaacaacgttaaatacgtggcgaaggcgatccatgaggcggttacgcgcgcgtcttccaaaatctagatttaagagcatcgctagcaccctcttatagcaagtctattgttcgtagaacgattgtttgttgtttccttatcaattgtgtgtgattgtgcgcgccatctgcaaaaaagggcagcgcttgttcgattctagatacacgttttcgtcccccaaatccttcaggtctagcttgaggcacgggacaccaaaagcatttatttcgttattattcagtgcaatcggttcgaaaaaatattacattttgcaatcaagtttacaccaatatactcaagtcctccactagaaagcccgcaaccggaagtgaccaaacaaatccataagcaaagcatgtacaaatttttctataaattctggaagattaacaaacaacggtagcattgacattttgataatcaaagtttttctacgcagcgaaaataagaaaaaaaaaatcaaactattacacggcatcgatatgtattccagcatttacgtaatggcactagaatgagcatttagataaagcaaatatatacggtggttattaatcaaaaataaaacagctcaaagagattatctagaccgtggatttgaagaatcatttatcgctagtccaaatactgctgctgtctctgtatcctctcgtttcccgtttttacggctttcgactctaccctcttcttgttcttg

SEQ ID NO: 65 - DNA, 2805 bp, Aedes aegypti
atgcttggagtcgtagttcagaatacgactacacataactttccaccactttcagatcggtttttgcattggttgtggaatatacatttgttcaaccccgatgacccttgcgaacattacctgttgaagtgctgtaaagttccgaaagatctagacgataatgaacaggtcattgcgccgccctcatccagcggtgaactcattattgcaccacctagctcatctggaaatctgatccagcctggagcagaggatcgggatgggtcaggatcagcaggaactgattcttctggcggaccaggatctggcggacatggttcgggaggtgctggttctggtggtctgggatcaggtggacaagagaccggagggctaggatctggcggaaccggatcaggtggacttggaaccggtggagttggaccaggaggccatgggtcaatacctggttcgtggtcagaggggcctggaggtaacggtaattatcatggtggtcatcatcaatacggtggtggtaactacgctggtagtgtttcacaaacaattataattactcacatatgggtcagcacggtccttgtatacctggaacgcatactggaaatgttgggggagcgggaaggcccaatgcaggtggctcatctggtcaaatttcgggtagtggatcatttggaggaaccgcaactggaacatctggtcaaagtcaaactgcaacatcgactggtgtatcttctggttcatcgtctggcactatcggtcatgggtcaactcatggatcaacgggacatggtgcaagctatacaggatcttctactggaggagcacctagctcgttgcaaagtccaaatggtcaaacaagccccacaactggtgtgccttctggatctttacacggatcaactggacacggtacatctaccacgggatctactaccactggaagtgcatctaattatacacaaggttcatataatcaaaatcattcatctggacaagcttcccttcaaactggcacttcgaatgttggagagccagacaggctcaacgctaggtggttcgtctagtcatggagcaagccagtcgggttcatccaccggcagcatgcttgcgccactgaaggattcatctgtgcaaaaccaatcaggcccatctactggaacttctactggatcaagcggacccactacacatcagtccggttcatcagctgcaggaggatctgcacagggttcatatggatcatctgggtctacgcatggatcaaccggccaaagtacaagtcaaggttctttcggacaaagtggttcaagtacagcccaaggatcatctggacaaagtggcttcggatctcataatttgaatggtgcaaacttggttgcaggagatttatacagcggaaatattccaactgggtcagctggtagccatggcagcaataccggaggatccgtacaaacgggaagtgtagtgccgggcgttagtaccgtaacaaaagaccaaattagggatacagaaaccacaagtacgggtttatcatccggtacggctcagcagggacacttgtcatcaagccaacagcagtcttcctcgggaggatcacaacaaacttcaagtggcagccacacaaatgtaggcggtcatgaaggtgagggtatgtcatctggtacggctcagcagggacaattgtcttcaagtcaacagcagtctaccactggaggatcacagcaacagcaaacaagtggcagccatacaaatgtaggtggttatggagtatctggtggtacgcaccactcctctgatggatggaaggatcataccgagaagcatggtcatgggcatggtcatagttatggtcaaggtcacggacatggtggtggttatggcaataattatggtggtggatatagtagctcacatcaaaccgatcatactaccgtgtcaccaatcaaatcgcctcatgacaatgcaggatgtggtttccgcaataaagatggcgtaggtttccgcattacgggcaactcggacggagaggcagaatatggtgaattcccctggatggttgcaattttgagagaggagaaagctttggatcaagtcatcaatgtttatcagtgtggtggatcattgattcatcctctagttgttcttacggctgcccattgtgttcagaataagaagcctcatgaaatcaaagtccgacttggagaatgggacacccaaacaacgaacgaaattcatgatcatcaggatcgtaacgtacttgaaatcgttttccatgaaaaattctacaaaggaggtctattcaatgacgtcggattacttttccttgacaagccagctgagattattgagacagtcaataccatttgcttaccgtcacaggattacaatttcgattacagtcgctgcttcgcttctggctggggaaaggacgtgtttggaaaggaaggcaaatatcaagttatcttgaagaaaattgaacttcctattatgccgtacaacgattgccagaaagctctacgaacaactcgattgggagctagattcagtctcaataagagcttcatatgtgccggaggtgagcccggaaaggacacatgcaagggagacggaggttccccacttgtttgtcccatccctggatcagtcgatcgatactaccaagcaggaatcgttgcttggggtattggatgtggtgaaaagggaatccctggtgtttatgctaatgtggctggatttagaaactggattgacgagcagcttacccagcgtagcattccacataatacctatatcgctgtgtga

SEQ ID NO: 66 - DNA, 1583 bp, Aedes aegypti
gtgtgagcggggtactgaaacatgcgcggatactggtgcactgattgcacatgtacatcaatattatttttaatttaaaaatgtggcttggaaaataagtttatggtataatattctccaaccgaaacacagcgcacaatcattatgttactcgccatacgatttgtgactctgctgcatgtgactttataagttgactaatttaaattaattcacgaaacaatacattgcacattggacattttcaaatgttacgctagtagttgctcccctgttttctacggcgcaacaagtgcaaggaaaacatctaacagaagttcccctttccccatccttacggcatccggggtaatgagctcttcactggatcctttgaagcaggacgagcagagtcccattttgcatcaaacaggcttatatttaaaaggattcaacgatttttcggaatttatccgcagcacttttatggtcgcacacttttcttgtcgttcgcaaattactggtctgttttgatacaagcagccgccaggcgtttgacgtgcggatgttgcatatgattttttttcgctgctagcattctgagtgcgactctgcgttaatttttgacaactgctggcagaacgaccatctttctccttcggtacggaatttagtgcgtgtggtgaaggtagattttgggcacgaaaaaactcgattttcaacaattaaattgcttcaaaatgctttcgagagcagcacttttggccgccgccaagaagcccgcaggcctgatcctggcccgtggatctgcctctgctactgatggcaaccgtccggtgcgagcggaacaccccggcaaagttcgcatgggcttcctgcccgaggaatggttcaccttcttctacaacaaaacgggagtcactggaccgtacgtcttcggcgccggcttgctgacctatctgtgctccaaggagatctacgtcatggagcacgaatactacaacggtctgtctttggccatcatggtcatctacgccgttaagaagtttggaccggctgtggctgcctattgcgacaaggaaatcgatagaattgaaggcgaatggaaggccgaccgcgaaaacaacatccaacagctggcccaggccatggaggacgaaaagaaggaacagtggcgtgccgagggccagaccctgctgatggaggccaagaaggagaacgttgccctccagctggaggctgcctatcgtgaacgcgccatgaccgtttaccgtgaggtcaagaagcgtctggactaccaggttgagcgccagaatgtcgatcgtcgcatctcgcagaagcatatggtcgattggattgtgaaaaatgttgtaaagtccatcaccccggagcaggagaaggaaactctgagccgatgcattgccgatttgggagccattgccgcccgcgccaagtaaatgtgtaatatgtggatcaatgaccgggcgtcggtattcagaccttgtagagcgaagtaagtattcgttttctgaaaagttcgacgggaaagatttgggagtaaacaataaattgaatacttttatcaagttagcgcgatatccaaa

SEQ ID NO: 67 - DNA, 2953 bp, Aedes aegypti
ctcaactgcttcaggggcagcatcctctcgtaggcagccaagatatagactaccctaaatcttatctccaaggactcttagctagtttgtgttaagtttttttttaattcgttctctgtgtactgtgaattttttttaacacaaaaagaaaattagtgatattttttcgataacaattcgtaagcacatgtgaaaattatgtgtcttctagaaacacgtttgtgatacaaacaatcggactacagtgatcgtgtaataatttaatcgtgcgtcgtttgataaccctaaacgaaccagaagaaaagttcacaatgacctccaattgtgagatcacggtcacgagcccacaggaggcccagaccaagagcagtatcatcgtggtgtccaatcggttaccgttcgtgctcaaacgagaccccaagagtggtcagctcagccgcaacgctagcgctggcggtttggtaacagcggtagctccagtcgtcatcaagggcagaggtctttgggtcggatggtctggcatcacgctgtccgataaggacgaaatccccgaatcggatccttcggatcgcacacctaccgcaggacttctttcggatcaggtcgtatcggtcaatgtagaaccggtgctgttcgacagctattacaatggatgctgtaatggaaccttctggccactgttccattcgatgcctggccgggctacattcaatgcagaaaactggagtgcatactaccaggtaaataaggaatttgccaccaaaaccgttgaagcgttagagagatgcttgaagcaaaagaagaacccaggtgtgccaatcgtgtggattcacgattatcatttgatgctggctgcaaattgggttcgcgaggaagctgacgaaaaaaatctaccatgccacatagcgttcttcctgcacattccgttcccaccgtgggatatcttccgcctgttcccatggtcggatgaaattctgcaaggaatgctggcctgtgacatgatcggtttccacattcgagattattgcttgaatttcgtagactgctgccaacgaaacctaggttgccgagtcgaccgtaaaaacctactcgttgagcacggaggcagatccgtacgcgttcgacctctgcctattggaatccccttcgacagattcgtcgaattggccaaaaaggcgaaacgtgtgctcagaaccaatcagaagatcatcctcggtgtagatcgactggactacaccaaaggattggttaatcgccttaaggctttcgaagtacttctggagaaacatccagaacatcgagagaacgtaagcatgctgcaaatttcggttccttcacgtacggatgtcaaggaatatcaagaactaaaagaagagatggatcagcttgttggaaggataaacggtcgattcaccacggccaactggtccccaattcggtatatttatggctgtgttggccaggaagacttggccgctttctaccgggaggcttccgtctgtctcgtgacaccacttcgcgatggaatgaatttggtcgcgaaggagttcgtcgcctgtcagatcaatgaaccaccaggcgttctgatagtatcgccttttgccggagcaggagagaccatgcatgaggctctgctatgcaatccttatgaaatcgaatccgcagcagaggtgatacatcgggccttgaccatgcccgaagacgaacgatcgctacgaatgggtcgcatgagaaggcgagaaatgcaacaggacgtcaacagctggatgaggcagttcctcaaagccatggattcgctggaagaagatgaaatcggtacaacgacgatgcatccggtcacagtggacgatttcgacgattacctgctgaattacgtcggattcaaccacaaactggccctgctgctggattacgatggtaccctggccccaattgcaccccatccggatttggcaaccctaccaccagagaccaagaacgtacttcagcgattgtccaatcactcggacgtgtacgttgccgtcatctccggtcgaaacgtggacaacgtcaaggccatggtcggcatcgaaggtatcacctacgctggaaaccacggtttggagattcaacacccggatggaagcaagtttatccacccgatgccaatggagtacgagggtaaaatgaccaaactgctcaaggccttgcaggaagaggtctgtcatcacggagcatgggttgagaacaaaggcgctttgctgacattccactaccgtgaaacaccgaacgagctacgagctgaactggtctccaaggcacgccaattgatcacggacaatggattcagtgtcaccgaggcgcattgcgccgtagaggccaaacctccggtccagtggaacaagggtcgggcttccatctacatcctccggacggcgttcggtgtggattggagcgaacgaatcaagatcatctacgcgggagatgacgtcactgatgaagatgccatgatggccctcaaaggtatggcagccacgttccgcgtcacgaacgcccagatagtcaagacctcggccgagcggcgtttaccctcgacggattccgtcctgacgatgctcaagtgggtcgagcggcactttatgcgccgcaagccccgatccaacagtctgacctacaagaaccgcaagaaggactgcgtcaagatgcagctggcgttcgaactggttccgagtccaaaccacagtgccgccaacagctccgacgagcgggattaggcgccactggcaactcactcgatgatgttttagcaaaagcaatttagtgtcttaatctagggttatttaaatagtgctaggtttttataaacgcacacaagtgaaatatgattttgctttctgttttactgttttcgaatgtttctcttactgtgagattatttaaataaaaagttgaattttagtctaagatgaaccaa

SEQ ID NO: 68 - DNA, 882 bp, Aedes aegypti
attacattcgttttctgtcattcgagaatttcattgcaaacagtcagcagattttgtgtttcaagttaataaatcaagttatttaccagaaaattgccgtgaaaatgttgggctttgaaaattttcccgaatacgaagttcccggagtgcgccaggttcaattttatccatatgaatccaacggcgggagcgtggttgcgattgctggagatgactttgccgtgattggtgccgatacccgtctcagctcgggttattccatccatacgcgtacgcagaacaaactgttccggatgtcggaccggacggttctggcctctacgggatgttggtgcgacactctggccctgaccagcttggtcaaagtgcgaatgcagatgtacaaggatcagcaccagaagaacatgacgacaccggcggtcgctcagatgttgtccattctgatgtacaatcgccgattcttcccctattacgtgtccaacgttttggccggattggatgcggatggaaagggcgtaatctacagctacgatcccattggacattgtgagaagacaacgtaccgtgccggtgggtcagctggacctttgctgcaaccggttctggacaatcagatcggcttgaagaacatggtcaatgtggctccaactccagtgcagttggacaaggccatctccattatcaaggataccttcatttccgctacggagcgagacatttacaccggagattccgttataatcaacattattactaaggatggcatcaaggaagaaatcgttcagctaagaaaggattaagctaatatggttggtaagggtgggaggtttttcttatgcttttttgatttattaacacccaataaatttgaatgaaggattt

SEQ ID NO: 69 - DNA, 1178 bp, Aedes aegypti
ccccaatggttccgaatttggcagcactgtgccatggtcgcttgagcaatgaccgtgcgcaaagtgtaatcagtccacccgcgaagcgaagataagcgcaactgaggccgataactgattgtgtacaaagctgcgtacacaaacaagcttcggttggagggaaaagagagagggagaaccgcagccgaatcagtttgcgagagtgaaccgagctgcgcgaaggtgttttcgattgcgtgaccaatttcatctgaattaattttattccgaatgatgggcatcaggaatacgggcaaactagccggcaaaacgctcttcatcaccggagcatctcgggggatcggcaaggcgatcgcgctgaaggcggcccgcgacggagccaatgtggtgatcgcggcaaaaactgccgaaccgcacccgaagctgcggggaacgatcttcacggcggcagccgaaattgaagccgccggcggtaaggcgcttgcttgcgtggtggatgtccgcgatgaggtcgccgttcgggccgccatcaagcaggcggtggacaaatttggcgggatcgacatcctggttaataatgccagcgccatttcgttgaccccgacggaacggaccgatatgaaacgctacgatttgatgaataacatcaatacgcggggaacgtttctggtctccaaggaatgcatcccgtacctgaagaaaagcacccacgctcacatcctgaacctgtcaccgccgttgactctgaacccggaatggttcgcccgcaacctagcctacacgatcgccaagtacggcatgtccatgtgcgtcctggggatggccgaggagttccggaaagataacatcgcggccaacgcgctctggccggccaaactggtccacaccgcagccgtggacatgatccacggtgatggagccgtggccgtgtcccggaaaccggagatcatggccgacgccgcctatgccattctctgcaaagatcctcgcacctgcaccggaaacttcttcatcgacgaagacctcctccaggcggaaggcatcaccgatttcggcgagtactcctgtgtgcccggaaacgagcggaacattcgcctctgcggtttcgtcgaccctaatcgatcgaaactgtgaaacattcgaaatcattggaatccattttgaatttcaaaagccag

SEQ ID NO: 70 - DNA, 1194 bp, Aedes aegypti
aatccagtgccagccatcgtcgggaacggttccatagtactgcgcgtggcttcccggtttccatttcgtttttcctttattaagtttagttgtatagtaggcatcggcttttaaggcatatatctaatcaatcagcataccaggctgatttagtgctgctattgtttcataatgaagctatttgttgtgcttagtgtgcttctggtcggggccctcgcccaagatggacccaaagtcactgataaggtaagtgtaacttccgtcaattttagatcgtagcttgttatctttttatgctttcccttcttcgcagttttaaattggttcagtgtattcttctatctgcgatctctgcttgcctagagttatgcatattcctcttacccagacgtctcgtactcttcttttacttgatcaaagtcaatttgcgggggttcactgggcttatgaaccggtttatcccgttgcaaatcattcgatggatctttcaattgccaacaaagaggtcttctttgatatcaccatcggtggaaagccggaaggtcgcattgtgattggtctgttcggtggaaccgttccgaagactgccaagaacttcaaaactctcgccgagaatgcggagggcgaaggctacaagggcagcaagttccaccgcgtcatccaggacttcatgatccagggcggtgacttcacccgtggcgatggaaccggtggccgctcgatctacggtgagcgcttcgccgacgagaacttcaagctgaagcactacggcgctggatggctgtcgatggccaacgccggcaaggacaccaacggatcgcagttcttcatcaccgttaagcagaccagctggctggacggacgccacgttgtgttcggcaagatcctggagggaatggacgtcgttcgcaagatcgagaagaccaaaaccgacggacgtgaccgcccggttaacgatgtggtgatcgccgacagtggttccctgccggtggacgctccgttctccgtggagaaggctgatgcctagattaataagaaaggtggagtacaggggaaagattggttatcttatagaagaatttgcgaacaaaaagtcccccaggagtgcatttattgtgatttaacacaaatgatgatgatggagaagttgataaaggtgaagaataaattgatgaacagtgatttttaatacaa

SEQ ID NO: 71 - DNA, 2139 bp, Aedes aegypti
taaatcgatttaatcctcgatcatgtctcgcagtactccctcgttcgttgctgggatcggtcgtttcccctggtgggctcttcttcaaactagttgcgcgcccttttttccacctacacaatgtcgttcggacaagttttaaacacctgcctaaagggagttatcgatcgaatgggagttctgactgcagccgccacaaggacgaaccgtgaatcggtgattgtacccgttaagaaacaggatatttcgcttaaggcacaaaacgcgcagccgattgtggcgttaaagagtaaagaactctacgagccacgtgtcacactcgacaacataaatccggcgatcgtgaaaatggactatgtagtgcgaggggaggtccttatgcgagccggagctattcagaaggaactggatcagggcgtcgtgaagcctttcaaggaagtgattcgggccagtatcggagattgtcaggctatgggacagcaaccgatcacgtttctgcgacaggtcttgggactgatcacgtatcaaccgcttttcaacgaccctaccatcccagaagatgccaaagaacgagcccgcatcatcctatcggattgcgtgggcaactctgtgggttcctacaccgattcgagcggaatcgaaatcattcggaaacacgttgctcagtacattcagaatcgggacggtggaattccatccgatccgagcaatataatcatgtcggccggggcaaccggtgcaatcaagtcgctaatgtccctatttcggtgtacgatcgatggcaagctgccgggagttatgatcccaattccgcaatatccaatgtattcggcgactatttccgagttggagatggcgcaggtttgctaccacttggacgaagatcgcggatggggcttggacattccaggtttggaacgttcggtgaacgaggcgaaggagacatgtgtacctaggatattggtagttatcaatccgggtaatccgaccgggcaggttctgtcgcgggaaaacatcgaaagtatcattaggtttgcttataatgaagatctggtgatcttcgctgacgaagtctaccagtacaatatccacgaggagaattcggtgttccactcgttcaagaaggtgatgatggagatgggagctccttacaaccgaatggaactgtgcagtttcatgtcctgctcgaagggttacatgggtgaatgcggtattcgaggaggatatgtcgaggttgtgaatatgtgcccgaacgttaaagccatgcttctgaagagcatttcggctttggtatgtccgtccaccatcggacaagcctgcatggatgttatggtgaatccaccgaaaccgggcgaaccttcgtacgagttgttcataaaggagaagaacgccgttctgacttcgttgaaagagcgtgccaaattggtggccgatgcgttcaactcgtttgagggcttctcgtgcaatccggtccagggtgctatgtatgcgtttccacgtattcaactgccggagaaggcaattcaggcggcgaggaaggccggccagctcccggacgttttctacgtgtaccaactgttggaacaaacgggtatctgcgtcgtaccaggatccggattcggtcagaaggatggaacctatcacatccgatcgaccattctgccacagccggaaaaactcaaacatatgttggacgtgttacggttgtaccatgaaaatttcttacggcagtaccagtgatgggctgaattattccttattttatttataagcaccacaaagataagtactgagctaagtgataggcgttgttcaaatttgttgtaaggatataaatatttgaaaataaaaagccatagttagaactggtgttagatcaataaaaacagtccttaagattaagcttttcaacatttgatcgtacttggatacagcatcagcgtagctaggaacccttttttcaatttgggtaataagattgagcacatattgtatgttaataactggaagaacccgttttgctctagattttttttttttaatttttaagtgtattccggattgaaggcagctcaaataagcatttttttgatgtacaatcatctgggaaatacaatggaaatttaaactggtcctggt

SEQ ID NO: 72 - DNA, 3053 bp, Aedes aegypti
atgggtaccttgcaacaattggccgtcatcaagggacagcagcgtggattgatccctgcccttctacatcggaacttcgaggccaacgttgataaattctgtggaaccgatttggcgctgattttcaacgatgacagccgaggcctcaccaagaccaactacaacgttttgaactcgacggccaaccgcgtggcggcggccgccatcgacgatatcgtaaattgtcacaaatcgcaaccgaatcgggacggagattacatcatcgccgtttgtatgcagcctagcgatcggctggtgacgactttgttggcaatttggaaagccggtgccgcctatctcccgctggatccgacctttccgccgaaccgcatcgagcacattctgaacgaggcacaaccggtgctggtcattcacgaggactacgaaaatgtggccgtgttcggcgcaacgccggctgtttcctacaacgatctcaggaaaaaggctagcgacatcagcaatgcaaacattcttccgcagcaaatgctgggcgcgggcatgaacgaactagctttggtactctacacctccggaagtacaggcgttcctaaaggtgtccgattgaatcacgccaccattctcaatcgcttgcaatggcagtggaaccgattcccctactcggaaacggaaaaggtcggtatattcaaaactgcactaaccttcgtcgattccgtcacggaaatctggggtcccctgttgaacgggatggccatcgtggtcgttcccaagaaggtaaccaacaacccggagagactcgttgaactgctcgaggagtacaaaatcgagcgcctggttttggtcccaaccctgctgcggtcattgcttctctatctgccacttcagaacaaacaacttttgtacaacctccgcatctgggtatgctccggagagcctctacagctatcgctggcaaaagaattctttgactacttcgaagagggagttcatcagttgtgtaacttctacggatcaaccgaagttatgggagacgtcacgtacttcgtttgcgaatccaagaagcaactcagcaattttgagaaagttcctattgggtatcctctggataacactgtgatatacatccttaatccagaacttcaaccggtcaaacccggtgatattggagaactgttcgtatcggggtcgaacctggctcagggctacgtcaacggtcgtgatccacatcgctttatcgataacccactggccgtagaccccatctactcgagactctaccgcacgggagatttcgcttcagccacaaagggatgtgtctactacgaaggtcgcactgattcccagatcaagatccgtggtcatcgagtagacttatcagaagtggaaaagaatcttctgtcgctgcctggcgtcgataaaggtattgttctatgctatcacgctggagaaatcgaccaagccttgctcggattcatcacggtcgaaaaggactctaccctacaaactggattacaaattgaaggcgcactggagagtaagcttccacactacatgatcccacaggtcatcattcttgacagcattccactcttggtcaacggtaaaatcgatagacaaagtctgttgaaaatgtatgagaacacaaacaacaacgatgacgccaccatcgagatcgagtatgactacaccggtgttccggagtgcaaaatggctatggcccaggatcttttcaccactgtgggtcaggtcattggacgctctacgcgtagtaaaatttcactgcaaagcaacttctacgaattaggaggaaactcgttgaactcgatcatcactgtaacacaactctgccagaaaggtcacgcgataagtattaccagtttcattggtgccgaaaacctggcagaaattttggataaaatgtacagcaaccagcagcacatttccgaacacgaacaaactgttggaaacggttcttccgttactcaagaatttgaattcgagtacaaattgaagctctctgcgcatccactggccgacgaacacaaagaagacgcgatcaacatcctgacgtacagtttctacgaaaaagctgatctggaacgatggatcaaaccgttgatccgggagcaggactatcgggatattctggagactatttgggatgttctgatcgaaaagcagctcagcttcatgatcaaggatgaaaccggaaaatcggtgggtgtctctctgaatttcgatgctcatgacgaaccggagccagaagtgaacaataacctagtgataatctttgagttccttgaatacgtggaaaaacctattagggaacaaaagttaccacaaggtaagaatcagattctacactcgttcatgatgggtacctgtgccgagctgagcgctcaagaaaacatcgaggctatgcactttatggagagcgaagtgcttaagatcgcgatccggcggaactttgcgggtattctgacgactaacaccagtccgctaacccagcaacttggatcgaacgtttacaagtacgaaaccatgctagattacaaaatcaatcagtacgtctacagtgacggaagccgaccgtttggcaaggcgggagacgatcagcgggtgatcgtgcactggaaggacatccgaaaacagcactgaacgtgttccccaaagatggttgaaagggctattggcataattagtagtgttctaggtaccatatttatcgctgcaataatgatctaatttaatggctacacaagaataggctaagaaaccatggaacagtatgtcgaaatgtaaccaaccgtagatattgatagcaaatgtaaactgtaaggtattgcactgattgtgctgcaagaatctttacgagttagttgtagcactaggtgtgtaagtgatattttaattcttaggttgatcgtacaaacaaggtggtcttagacaagtgagaaaggaaactgtgagaggatgttagttttgtaagttatttgtttctggattttaaggaaactactatttatgacaataaatcgaattatgactcattcgtg

SEQ ID NO: 73 - DNA, 688 bp, Aedes aegypti
ctgtcaaacactcagcctggactggggattcgcgtttgtagaactttccttcaccaaagtgtgtagaagttgtatcgtttccttctgtgaaataatccggattttccgcattcaaaatgtcctacgttgccagaaagggaccgcaagtcgtttcggctcttggtcgatgggcttacaatctgtccggattcaaccagtacggtctgcaccgtgacgattgcctgtacgaggacgacgacgtcaaggaagcgatccgccgtctgccggagaagctgaaggatgagcgcaactatcgcatcacccgggcgttgcacctctcgatgaccaagactatcctgccgaaggaacagtggaccaagtacgaggaggactgcaagtatctggaaccgtacctggaggaagtcaagcgcgagcgggacgagatggccaagtgggaggccaacaagtaaaaggccagacaaagagtgcaccactcattgttatgattgtaaatgcaacctttccgggggggcttccgaaggaatgtccctgggaaacgattcaaaacttaggggaataataaactgaaatctggagcgaagtgctaaagtgtttcattcatttagagtaggtttgtatgctaatgtttcatgaattttacgaatattatttatattcagaaggccttgctttagggagcaggatccta

SEQ ID NO: 74 - DNA, 931 bp, Aedes aegypti
gttcatattttttcaaagttgggttgattcgtggctccgtgtgcactgggtacaacaaaccgatttaatgggctcttcaaagttagcgtgtgaaatgtcattattgacaattattcatttcttgcatttcttacataaaccgagcaaatcaaaaaacataaatttgtgcaaaagattgttgtgtacaatgatgcgttcagcgattgctcctgtcgttctaaatggttggaaatcggtagttcccaaatggacggcagtagacacggtaaatatgaatcaaattcgagagaagggcactctccctgtggtagagaaggataaaccggaaaagttgccatattccccttttggtactaaacaatccaactgggctgattggactgtggctcgtctagatgacgtgttgaactggggccgtaagggctctatttggcctttaactttcggattggcttgttgcgccgttgagatgatgcacattgctgcccctcgttacgacatggatcgctttggagtagtatttcgtgcttcaccaagacaagcggatgtgatcattgtagcaggtactctaaccaataagatggccccagctttgcgaaaggtctacgaccaaatgcctgaacctagatgggtaatttcgatgggcagttgtgccaacggcggagggtactaccattactcatactctgtggttagaggttgtgatcgaatcatccccgtggatatctacgttcctggctgcccacctactgcggaagctttgctgtatggaatacttcaactgcaaaaaaaggtcaagagaatgaagactctacagatgtggtacagaaagtaaagcatataccaattcatagttatttcaagcgtattttgcactgtaaacgcaataaatgtgtgtaaataaaatgcattgcgtaaatatctcgatttg

SEQ ID NO: 75 - DNA, 1568 bp, Aedes aegypti
cgttttcacggtgcagatatcgatcgcaatctagtacttcaccacgcattcctaccgctggataaacattctaccgtttcccagtctctgagctgatctgtcatcgcaaattctcttttcggatcgcgacgaacgacgtccgccatcttcctggacttcattcatcttgcagcaatcgttcgagtgaggaagagtcgcgcgttcgcgagtacgagtttgttcggagtccggtttgtacgattctttttgtggtgcggtgatgaatttgatgtgtgcggtttgattgagcggacgaaagcagaaaaaaaatcctttcctttttacaatttggtggtagcagtttgtgatttcgtcgtcgtgttccattccccggaatcgcattttgttcggttacgtaagaaccctcttctgcagagaaaatagtgaaaaatccgagatccgggacgtcaaccgagaagaagaagtagagtgataagagagaagcaggtggaagaagaagaaattttcacgagtggaattttttcgtcgtcaaggcagcctgaaatatgttgaagaacgcggtagctctggtgactggtggcgcctccggcctgggacgcgcaacggtggagcggttcgccaggactggaagtaaagtagtgctgtgcgatctccccacgtccaagggtggcgacgtcgcgaaggaactcggcgacaatgtcgttttcgtgccggttgatgtcctctcggaaaaggacgtcaccggtgcgctggacatcgccaagaccaaattcggccgtttggatgtgaccgtcaattgtgccggcgtcgccgtagccgtcaagacctacaacttcaacaagaaagccgcccacaaattggaggacttccagcgggtgctgctggtcaacacggccggaacgttcaacgtgattcggctgtccgccggcctgatgggcgaaaacgaacctaaccaggacggccagaggggtgtgatcgttaataccgcctctgtggccgctttcgatggacagatcgggcaggcggcatatgctgcttccaaggccgcggttgttggaatgactctaccgattgcccgtgacctcagcacccaaggtatccgcatctgcacgattgctccgggactgttcaacaccccgatgctgcaagcccttccggaaaaggttcgtgccttcctggccaagaccgttcccttcccgcagcgtctcggcgaaccgtcggaatatgcgctgctggtggaatcgatcgtcgaaaaccctatgctgaacggagaggtgatccgactggatggtgccctgagaatgatgccttaagactaccccccttcaaaggtactaccaccaccatgcttcctcgttcccatacctttcgaacacaataagacggacagatgcatttattagtcctaagtgcgtgttgtagtgtagtagtagttcaccggtgccaatttgcttggtgaatgggattccttgttgggaactgccaagcagctgatgtgtgcatatcgtgcctatttttgaaccaggaataaagttttgctcaggagtgcatttttttgttaacttaca

SEQ ID NO: 76 - DNA, 699 bp, Aedes aegypti
agagtgactaatggacgcgaagccacccctggtcaattcccataccaagtagcgttggttatcagtttcaaccagggcagtggtttgtgtggcggctcaattatctccaataactacgttctgactgcagctcattgcgtccaaggagccagcggtggaaccgctttgtccatcgtgtttgagctcgatggaattaccatccatccggaatatacctcgaataccatcaggaacgatgtagcgaccattcgtttgaccaattcgatcgtgttcaacgatcgcgtccgaccaattcgccttccaagttcgaccgatgtccggaccttctccggccgtatagcaacggtttccgggttcggaagaacatcggacaccagtcccaacacttccgctgtggttttcttcaccaccaatccaatcatcacattcgccaattgtttggatcaatggagcaatgctgtgcacgtgatccaatcgcagaacatctgcctgtcaggtaatggtggacgatcgtcttgcaatggagactccggagggccactgaccgttcaggaagatggcgaaagcctccaggtgggaatcgtatccttcggatcgtcggctggttgtgccatcggaaggccttcggtctacgctcgggtaacgcactttttggactggattttggagaattccgatgttgatgagcaagcagcttga

SEQ ID NO: 77 - DNA, 755 bp, Aedes aegypti
ctccgatccgatctgacaaggatctgaaatttcagatttgcccatctgtttctgtcacactttttccatcgtgagtgtttcgcaagtgctcttggaaaagccagaaagaaaccaaccatgctccgctctgccgctggtcaattgtttggagtgctccggggaaccgtcggtttgaccacttcccgtctgggtgccgctggagctgtccgccattctcacagcaacgagagcgccgaggagttcgatgcccgctatgaggcctacttcggccggtctgacattgaccactgggaggcccgcaagggaatgaatgacctgctcggaatggatctgattccggaaccaaaggttatcgtggccgctttgaaggcttgtcgtcggttgaatgactacgccctggccatccggttcctggagggatgcaaggacaaatgcggcaacaaggtcaacgaaatctatccctatctgctgcaggaaatccgcccaactctgaccgaactcggaatcgaaaccccggaagaactgggctatgatcagccggaattggcgctgaaatcggtgtatgatatgcactagaatgggttgttttggccagtggtgcttttcctccccatttgcagcattagttcaaataagtgaataaagtggacggaactattccgacaagaaaaaaacgttctaagaatggttatgtaatcaatggcgattgttcgtcacagtgaaagaaatgtgaaataaaattggtaaaaatgaaa

SEQ ID NO: 78 - DNA, 1023 bp, Aedes aegypti
gtgattattattttctacttcagatcaatcgattttgcaagtcgccagcaatcatgggcgcgtccgctttaccgatcattattttctcggcgattttcggcgtggttggcatcgtcctgccgatcatcgctccgaagggacccaaccgaggaattgtccagtgcgtcctgatcctgactgcggccacctgctggttgttctggctctgctgttatatggctcagatgaatccgctgattggccctaagctacatcagaacacaatcctgatcatggcacgcgaatggggcaatccccttcccgatatggataactaccatcccgaaccgcacagtgtggccgaacactaagatggggggtttcgtcctggtgcacagggattccacacattccccgtttcattaagcatgaaagtaacatcaatacagttctaggtctgagaatcgacctgcccttttcaaagttcaatcaaggaaagaaccaatcctcccgtacagtggtgacgcaaaagcatttggcgttgcggaaccgaacaccagtccgctcggttcgatgactcattctcatcaaacgtatgctaatgttgaatgcttgagtagtattaatagttaagaaatttcctgtcgcgataaaaaaaaaacaaaatatatctatttgtaactcgattgataatcaaagtaatggaatcacgcatattttgcagggcaaagccatttgggctgggcgattatggcttatcgagaacactcacacaaaaaagtagaaacaatttctcatcacacacatatggttgcgtagaaaattgaagaaaggatcagatgtacttttttccagccaaacattcattattatagtaacacacacacaaaaaaaagttgcaacaaaacagacacacgaacaatattatgctaaacataaattacttatcatgagagtaccgcataaacacatatgttgaatgctcagcagtagtgaagtcaataaaacgtatgccaatagatgaaatcatattttaacagcaca

SEQ ID NO: 79 - DNA, 657 bp, Aedes aegypti
atggctccaattgtgctgtatcatttccccatgtcgccaccatcccggtcggctctgctggtggcccgcaatctcggattggatgtagaggtcaagattttgaacttgatggccggcgagcacatgcaggaggaattcgtcaagattaatccccaacacacggtcccgactgtcgtcgacgacgactacgtcctgtgggaatcgaaagccatcgccacctacctggtggagcagcaccagccggacagcacattgtacccggcggatccgaaacagcgaggcatcatcaaccaacggttgtactttgattcgactgttctgtttgcccgcgcttatgctgctgtcgctccgttaatgcgccaaggtgccacctcgatcccacaggacaaaaaggacgccatcctggaagccctaggaacgttgaacggatacctcgatggacaggattgggtcgccggcgaaaataccaccgtggccgatttgtgccttctggcaaccgtgtcatctctagagaaacttggtgttgacctgagtgatctgccgaacatcactgcctggctggaacgctgcaaatctctgccgggatttgaggaaaacgaagagggtgccagcatgttcggaaatggactgaaatccaagctggaggaacctttctaa

SEQ ID NO: 80 - DNA, 4431 bp, Aedes aegypti
atggatagctcgcggaagccggaaaagaagaatccccgcaagggagcgttcttcctgtcgcagctgctgtacggctggctgttgccgctgttcttcaaaggatgccgccgaggactcagcaaagacgatctcaccaagtgccttaaggaagacaaatcggaagatctgggcgacagattggaagaacaatgggaaaaggaaatcgttcgagcccggaggaaaaaccgcccacctaggcttcgtgacgctctcttccgaacattttataagcagtgcttattcgacggtttcctggtgttttcattcgtattaatcaaatcgattttaccattggttttggcgcaactgctaatccagttccaagcgccgttgaacacaacgcatctgaccacaccaagtaccgatacggtttccacgccgccagttcctgatgtcttccttacaaccacgttgcattttctacaggaccacgactcgaatgacaccaacgtcgatcgcatacgccgtagcatagctgacggaaaacattcaatcggccagaatcatcttaagccgcaagactacggcgatgatgacgagggatacgatgacctcgaagaggaagaaggcccgaccaaggagcgcaagttgacaagcgtagctgactttatcgattacgcgtggaacgatgcccactggttggcgggactattgatactactgacattgctgggatgtttctgtaatcatcactccgatctgagacaacgattggtcggagcgcggatgcgaattgcttgctgctcggcaatctatcggaaaaccttgcgtatgtcgaagaaagccgccggacaaacaccggccggctatctgatcaatctgctatcgaacgacgtcagccggttggactatggatttatatttttacattacgtctgggtgttgccgtttcaggcagttttcacgtgctaccttatctggaggcaagtacaatgggcagcagtggttggagtcgttggtcttctgctgaagaccattccagttcaaacgggacttgggcgactgcagtcggttctacggatgcgtgtagccaagcgaactgatcaacgagtgggtataatgaacgaactgatccaaggtattcaggtgatcaagatgtacgcttgggagaaacctttccacacggttgtttcgttggctcgtaaaaaggaagtccgccagattcggtgggcatcgtacattcgcgggatctatctcagtacgatgatgtttactgaaagatctacgcttttcatagcgatcgcaacttgctattttgagggtcgcccaatcacggcagatattgtgtttcctatggcacagtttttcaatattctccagttaacggcggccattttctatccattggctatttcacttggtgcggaagctttggtgtcgattgatagaattcaagagtttcttggtatggaggaacaagacaaaaagatgattggtttgaagaagaacgagaatgaattggtgaaagtgtgccctactgtagccgtagaattcaacaatgtttccgccagttgggagaataataaggacagaacattgaaggatttaaatctcacagccaaaactggacaactgctggcagttatcgggcccgttggggctggcaaaagctctctacttcagttaattttgggcgagttgcccatactcaacgggacggcgaacatcaacggagaagtctcgtacggctgccaagaaccgtggctgtttacgggaacagttcggagcaatatcctattcggtctaacctatgaccgcaaacgttaccaagaggttgtgaaacactgtgccttattgacagactttgaacagcttccggatggagataaaacagttgtgggagaacgcggaacctcactctcaggtggacagcgcgctagggtgaacttggctcgtgctgtgtacaagaatgctaacatctatctgctggatgatccacttagtgccgttgatacccacgttgggcgccatctgtttgatgaagttatgggccctagaggttatttggcaaaacaacaagcaaccaggattttagtaacccatcaggttcatttcctaaaggaagctgattggattatcataattgatagtggaaaaatactaatgcaaggaacatatcaggagttgtccaacagtgatttagacttcacaaaattgatgggatcttccgaagagaatacagacagcattgaggacgaagaggtagaagaattagcagatgaagaaattcctttcattgatggtgtaaagggcgagagtcataaactgcttaagagctcaacgtccgtaggggcacgaggttcgatgtcatgtgcttctagcgttgctgaagaccttggtcgaactgtcaatgaagatcaagcagaaggtaccctagcgctacgagtgtggactacgtacttcctagcaggcggaaacgtctgtcttcttctgttcactgctttcatgctcattttctcacaagtagtggtcagtggatcggactactttgtaacatactggacacgtcaagaggagcgtcgcattcgtgacctgccggtagattattctaccgaagatttgctcatatcctatggtattatcattattggagtcgtaactttcactatctaccgaggatacctgtttttcaacatatgcatgaaggcatcgcgaactctgcacgatcgtatgtttgcgaagatcctcgcggctccgatgaggtttttcgacaccaatccttcgggacgtatcctgaatcgtttctcgaaagatatgggcgctattgatgaattactaccgaaagcgatcatggatgctgtacaggtgctcttggtaatgatcggtattctggtagtaatcgccatgatgaatcctattctgcttgtggcactgttgggtgcgattgttctgtttgcgatagtgctcaaactatatctaagacctacacaggatctcaaacgactggaaggaatcacgcgaagtcctgtcttttcgcatctttcggcaactttgaccggcctttcaacgattcgagcaaatgcagcccaacagaagatcactcaggagttcgatgcactgcagaacgtacactctgctgtctggcagctaaccatgtccagcaatgccgctttgggattgtggctggattgcatcagcactgcgtttgtcgcctgtgtaacatttagtttcatagtgatgcatggagaaactttcagcgccaatgttggtttggccatttcccaggcaatgattcttaccggtatggttcagtacggtatacgtcaaacagcggaatctatccagcaaatgacttcggtcgaacgcgtgattcagtacacagagatcccatcggaaaatgatcctccgaagattccgccaagcgattggccttggcgtggtcacatagagttccgtgacatgtcattgcggtacgatgccaacagtcccccggtattgaagcacttggatctgacgattgcaccaacctggaaggttggaattgtcggacgaaccggagcagggaagtcatctttgataggagcactgttccgtttggcaccgatagagggaaaaatactgattgatggtattgataccggcattgtatcgttggagtctctgcgatcaaagatctctattatacctcaggatccagtgctgttcagcgctacaattcggtacaatctagatcctttcaatctgtacgatgatgacagtctttggacagcgatcaacgaagtggagctcagaacggctattagtggcttagactacatggttacagaaagcggttcaaacttcagcgttggacaaaggcagttgatctgtctagcgagagcaattctaagaaataacaaaatcttggtgcttgatgaagccacagcgaatgttgatcctcaaaccgatgccctcattcagaagacaataagagaaaagttcaaaaagtgcacggttttgaccgtggcccatcgattacacaccgttatggattcggatcgaatcctagtgatggatgcgggagaggcacgcgaattcgacgtaccgcacatacttctacagcaggagggaggtgtactgagggacatggtggaagcaaccggtccatccgaatctgaatctctcaaacgcattgcagcggaaacgtacgctgcgatggaccccaaccggcatctactgaacggcctgccaaatccttggcgttttagcaaggaaggccaataagcaagagatttcattatttttcatctattttattacctcttaagagtaaaatcaaaccaaattttgataagaaaggcggaaacaagtttacgtagtcgttaagtttttcgataaatatttacattgtttaaatgtaatgaaagctatgaattaagcacgatgaacaataaattgtctgctccgcaaaat

SEQ ID NO: 81 - DNA, 2004 bp, Aedes aegypti
tcgatgaccgtgatagggttgctattcattgcggttgggtccggtggaatcaaaccgtgtgtttcggcatttggaggcgatcaattcaagctaccggagcaagcagttcagctggctaaatttttctccttgttctactttgctatcaatgccggttccctcatatcaaccacattaacaccaattctccgagaagacattcattgtttcaatgaaactgattgtttttcgctcgcctttggagtgccggcagtgctaatgattttctccatactggtgtttgcatgtggcaaatcgatgtactcgatcaaaaaaccagcgggcaatatggttgtactggtattcaaatgcattggaaacgctttgtcaacgaaagtcaaggaacaagatgaaaatccgagatctcattggttggattacgccgagatgaaatatggaagacaaatcgtgcaggatatcaagtcacttatgaagattttggtattgtacattccactgcctgttttttgggcacttttcgatcaacaaggatctcgatggactttccaagctacgaggatgaacggtgaaataggagcattcacaatcaaacccgaccaaatgcaagttatcaatcccctgctaattcttgcatttattccattcttcgaaggtttagtataccccgttttagaaaaggtaggcattcgtactcctttgcaaaagctctctttcggcggcattctggcgggagcagcatttgttctatcagggtttgttgaactcgcactggacgaaactaatgcagttatgcccacaccaatggagtctcagctgagaatatacaacggactgccgtgcgattatcacttcaaatcggaaatacctaacttcaacaacttcaccgtgcaatcaattggcgccttcgaagccatccacgtgagcaccatgcagaacactacattccgattcacagctgaaactacggagagcttttgcgtgaaagcaaatatgtccaacatcacgggaaccttctatctgaaccctggaaatgctgtaagctacttcatcagccagaaagcaaacaaggttaatcttctagagtatgcagactcggcggaaaaggacaaacgtggccttcctcgggtgagattcttggcaaacataaaaaccgccaaaaaagtgctgctcaaaaacagctggaacactgatgctcagtataatgtgtcgttgaacacgtatgatcagtttcctgtagcggatggagaatacgacctgtatagtgacaatggaacgaggaaaattgcttctgtgaagctggaactaggaggagtttacaccgttatactgcacgaggttttggagaacgaatttaaacttcaaagacacaccgtaactccctccaactctctgcacatgctctggctggtaccgcagtacgtggtcatcacagccggagaagtgatgttctcaatcactggtctacagttctcctactcgcaagcgcccgagagtatgaagtccgtcattcaagccttctggttgctgacggttgcaatcggaaacatgctggtcgtgtttattgccgaggccaaattcgtcgaatctcaatcggtcgagttcttcttgtttgcggtgctgatgttcctggatatggcgctcttcatgatccttgcagctcgctatcactactcggaagacgaccacaaggatatcgaatcgggtgatatgaagaaaccggacattgataagatggacgacgttccatcgaagctcgatcaaggtccgttggagaagggattggaagctccaaaggcggcctacacgaacgaagcataccgagaagactgagtgctgtgaaagttagaaactaaattttctctcttatggtattaatttgttttcagtatattttttgaatggttcatttttaacctgttctgttttctgttgtgaaaatattctaaattacaattgtcgatgtaaattgctttgtagtaagatttctttaatttaaagaaaata

SEQ ID NO: 82 - DNA, 1710 bp, Aedes aegypti
atggaggtcaacaccagcacagtcgagaacctattggggattggacgagccgacgatgatcatgaccatgaggaagatgaaggggatattgtggccgccaaggcaactgccatggtagttttgttcgctgtgagcatgatttgcggaattgtgccgttcaaattggcgaaatggttcaaatggacggacagtgcctccgacgcaaaagccagcctcgtggtttccatattactgtcatttggaggaggggcacttctgtgtactactttccagcatctaatacctgagatcaacgaagccattcacgacctcacccagcagggacttatgccagagttgagtttcagtttgggagaatttttaatgtgcgccggtttcttcattatctatctagtcgaagaattagtgcacgtgtatctgcacagacatgagcgcaaaatgcatgaagccaaaatgaacgagctggaagttgccggtggcgctattatgcgaggtacacatgcgagggaaagcattattatgcgaaagaaaaacactgaaaatcgcaacggaagtatttccaccgcagatctaatctcgaatgatatggaaaaccagaagcgggggatttcggtcgcttcaaatgatatgtcagtggcgcattcagggcatccccatgaccaccacgtgcatcatcatatcccaccaacggaaacggacggaaagattgtctcatctattcgtggcctgctgattgtgctggcactttcagtgcatgagctgttcgagggactggcagttggcctggaaggatctgccgcaactgtttggtacatgtttggggcagtggccgcccacaagtatgtgatagctttctgcgtgggagtggaactgattgttgcccgtaccaagttctggttggcagttgcatacatcttcacctattcggtagtcagtccactcgggatggcgatcggaatcctcctcagcaacggttcttcttcggacgatacccaagtcgtttccgttgttctgcagggtttggcctccggaacgttgctgtatgttattttcttcgaagtactctccaaggaccggtccggattgtggcagtatttggccgtgttttgcggattcttcttcatgtttggcatcaagttcctgaccggacatagccacagtcacagccatggactgacgggagatgaccatgaccacgaccacgatcataaccatgatcaccactagcggccgatggagaaccgagaagaagcttatcgtcaccgtttgctacaagtgaacacgtgaatgtaggcagcaggagatcgaagtgacggagggtcgtaacaattgttgccgaacaattattgttaaaaaaaacgagtagaaatatgaacagtatttgcttgaggtgagccggcgtccgaaactctttgcagctgtgatagtgtgaaaacaagttttaaccttacacaaaaggatagaagcttcttatacgatttgatagatgtttaagaaaccatagatagatagcgagttttataatgaatatcggttttagtacaaaccgctggatgcttgaggatgtgattcaacgatacataatgctaaccaacagtaagattttagccgatctttacaattatcaagacttgaattgtatctgtgtaccgtaatagcatttgcttattatttttacgtcagattgtattaatagattagttttaatat

SEQ ID NO: 83 - DNA, 5458 bp, Aedes aegypti
cgatattttgtagttcgacgatttgtcagactcaaccgaaacacgaatcagagccgtagtgaacagctaagtgttttgggaaatgctgacgagtttgcgcactatcacatctcactgtcacccactaccggcatggtccccgtgcgataaagccctttacgtacccaatgattgcaggtgataagagtcgcactgatagggtgattgtggccatttcgataagtttgcgggccgatttgtgggaacaaaagcctacgccttcggtgccgaaatgtgtcagtgctagcgcgaatttcaacgggatcggttcggtaccgggagtacggtgaagatattattggtgttgcgtgggaggaaggaatccgatcaagaggacgaagttcaacgcaattcacctgcaaggtgaaggcgaaggcaacgatacgacgacggcaacgcccgtttcagcgggaaaccccactccaatcaatatgacgtccaacggacaaaagttcctcctgctgctggagaagaattggatcatccagaagcggcactatctgcagacgctgttcgaaatcatcattccggtgctgtgctgttcaatcttgctgttagttcgcggtctcgtagatcctgaatacgtagaaaagagtacaatcttcagcgctttatcaacggattcgttcgccaatcgatttcaaattaatggtgaacagctaaactattcaatagcatattcaccgcagaatgtcatactggatcgaatcatggcagatgctgccgaatcgctggatactcaagtgatcgctttcccggacgctcaaaccatggagtcgttcctcatgagccataacctggtggctggagtggagtttggtgattctctatcaaacgtaatcagccttccggaaaagctcagctacgccatacgcttccccgctgaactccggttcggttttggtctgctctcggactgggaaactcgtctcctcatggtaccgtttacgcctcgtctacgtgatccctactcaaatgacggtggaactcccagttattacgcagaaaatttcctctccgttcaaacagcagtttcaaaggccatcatccgggagcgtaactctgcatcgaaaatgcatcccgtcttcattcagcgtttcccatatccaccgtactacgacgacccgatcctgcaagctatggagcagctgctgtccctggtcatcctgctctccttcttctacacatgcatcgtgatggtcaagcacatcgccgtcgagaaggaacgacagctgaaggaagcgatgaagatcatgggactgcccaactggctgcactgggcggcgtggttcgtcaagaacatcctgctgctagtgattgctatatcgctgataacggtgctactttgtgtctccgtcaacggcagcgccatcctggagtactcggactggaccgctgtatggtttttcctgttcgtgtattgtatcgcgatcatctgcttctccttcatgatgagtgtcttcttcaataaagctaacatcgcctctggtatcgctggattgatgtggttcgtgttcgtgatgccgtacaatgtgaccgcgcagaactacgacggaatgagcactgggagcaaggtcggtttgagtttgttcttcaacagtggaatgtcgtttgcgatgatgagtaccctgcgcatggaagcaaaccaagtgggattgcggtggagcagcttgttcactccggctacagttgatgacggtttcagtgttggtacagcgatcataatgctattggtggacgcgttgatctacctggcgatcgctttgtacgtggaacaggttatgccaggccagtttggagtcgctaaaccgtggaattttctgatcaagaaggagttttggaccaagaaggaatccaaagcggaaaacgttccacgacgactaattgaaagacagaactcgaagtattttgaggcagaacccaatggaacgaatgcaggaattcagacggtcgatttgcgcaaagtgttcaacgggaataaggtggcggtcgaaggattgaatgtgaaaatgtacgaagatcagattacagttttacttggtcacaacggagcaggtaaaaccaccactatgtctatgcttacggggatgttttcgccaacttctggcacagcatatctcaatggacatgacatcagaacggatcttgagggagtccgacaatctatgggattgtgtcctcagcacaatgtactctttgatgagatgaccgtcatcgagcatctgaagttcttcggtaaactgaaaggcgtaccgaaggcagcactcgacggtgagatcgatagatatttgaggatgttggagctgctggacaaggggaatgctcagtcgcaaacactctccggtggtatgaaacgaaagctggcagtggggatcgctctttgcggtggttcaaaagtagtattgctcgacgaaccaacgtcaggaatggatccttcggctcgtagagctctttgggatttactccagaaggaaaagaagaaccgtactatgctgctgtccacgcacttcatggatgaagcggatgttttgggtgatcgtatcgcgatcatggcagatggagtcctgaaaacggttggatctccgttctttctcaagaagacatttggcgttggatatcgactgatttgcgttaagggcccatattgcaacagggatctgctttgtcagatcttaagaaactacattccggatgttcgggtcgaaaccgacattggttcggagttgtcgttcgtgttgaaggaggactatattggagtatttcagaaaatgcttgaagagttggaacggcggatggcggaatgcggcattacaagctttggtatttctctgaccacgatggaggaggtgtttttgaaggctggcagcgacacactttcggaaacagaccattctaatggaacttctattgagacgatcaatcgaaactattcgttgaacaacatgaaccttttgacgggaaatgacctgctgctcagtcaaatcaagggtcaatttttgaagaaaatgttgtcttcccttcgttcgtggggtacgctaatcatccagaacgcgattccaatcttcttcgtcattatgtcctttgtgattgttcaaagcatttccaaagatcaagatttaccaccgttgaagatatctctggatccctacaaagaaactgtgactgtattggaaggtaacgctgtagttgatccacgagtacaagcctatcagaatctattgaacaatgtgggtggatcgcatcgactagagactgtacccaatacggtgtcggagtatatcttggaaaaatcccaaacagccatctccgaagttaacgtccgttacatggtgggcgccacccttaacgatacggcctacaccggatggttcaacaacaaaggctatcacacagccccattggctttgtcgctgattttcaacgccatcatgagcaccgaatgcccaacttgtgagatcacagtcgtcaacaaacctcttccgtttcagctgaaaacaacgctgtccatcgtgaacaccgggctcaacgccggatttcagctggccttcaacaccgggttcgcaatggctttcgtcggtgcactcttcattctgttctacatccgcgaacgaacatcgcgtgcaaaactactccaatatgtcagtggaactaacatcgctctctactggaccgtcgccttcatctgggactacctcatgttcctagtaacctgcttgctgtacattgctacgcttgccatctttcaagaggaaggttggtcgtccttcgaagagcttggacgcgtattccttctcttaatgcttttcggagtagcattcctgccgactacctatctttgctcgttcctgttcacagtaccggccacaggattcgtagtcgtcatgctgatcaacatcgcctccggagcaatattcttcacagccgttacgttgctcaagtttgatggcatcgatctggacgatattggcaatgccctcgagtgggttttcatgttcttcccgaacttcgtactcacacacggactgaacaatatcaaccagatcaccagcaccaattcattttgtagaaagcagtgcgcccttgttgatggctgctctctggacaacacctgcgcatggagcgagcgatgctgcgttccagatgtgttctcctttgaagagcttggtatcaatcgcaacttgctgttccttgcgtttgtgggagtctcgtcgttcttggttattttggcattggagtatcgtttgatacacagaattattgatagtgtattcaaacgaaagcagccttgggcaccggccccagtggatgaagattcggatgtggcagcggagaagaaacgagttcaagctatgacgcatgtcgagcgaaaccagtatagcttggtgatgaaagacttgaccaagtactacaagagtttcctagcggtgaacaatctctcggtggcgatcgaccgttcagagtgctttggattattgggagtaaacggagccggaaaaaccactacattcaagatgatgactggagatgagaacttctcctccggggaagcttgggtcaagggcgttagcttggcgaccaacatgagcaccgtttatcagaagattggttactgtccgcagtttgatgctttgctcgatgatctgacaggacgcgaaacgttgaagatttatgcccttctgagaggagttcgccatgaggacgttggtaatgtatcgctgactctggcggaggacctgaacttcctgaagcacatcgacaagaaaacaaaggagtacagtggcggaaacaagcgaaagctgagcacggctttggccttgatgggtaatccatcggtggtgtatttggacgaaccgacgacaggcatggacccaggggcgaagcgtcagttctgggacatgatctgtaaggtgaggagttcaggcaaatcgatcgtgctgacatcacacagcatggaggaatgcgaagctctgtgcacgcgactagcgatcatggtcaacggagagttcaaatgtttgggttcaactcaacacttgaagaacaagttctccaaggggttcctattgaccatcaaggtgaataggtcagaagacgctcaggaacagcagcgaaggattggtgaggtgaaggcattcgtgatgaatcagtttggcggggcagtgttgaaggaggagtatcaagactcgctgagcttccacgtaccacaaactgatctcaagtggtcggcaatgtttggattgatggagtccaacaaggatcggctgagtattgaggactatgcacttgggcagacatcgttggagcaggtgttcctgttcttcacgaagtaccagcgtatagtctgagcagctgatgaactttgtttatatacacttatttattgtaaagctaatacatacgaatcttgttgtttgaaacaaaa

SEQ ID NO: 84 - DNA, 180 bp, Aedes aegypti
atgaacttcacaaagttatttctcctgatcgccgtggctgttcttctcctgaccgggcagtctgaagcaggtggcctcaagaagctgggaaagaaattgggaggtgcaggaaaacgagttttcaatgctgccgagaaggctcttcctgttgtagctggggctaaagctctaggaaagtag

SEQ ID NO: 85 - DNA, 2638 bp, Aedes aegypti
atcttcaccttaattactgtcagccaatttagcatccaaagaaatacatccaattcacagatgttaacaaacggcaccactgccgtcattcagaacaataatctcgctaatcaccatcactcttgttcaatggcgcgcaaatcgtttcccaatctaataagtaagtagacagcaggttggcatggcgacgcgacgcgggttgctgttaaagtaaacgaattccacatcacatcagctcgcgcaaatctccatcggttcgttgttctctaatctgttctacctacagcagctctctgatgggcccatactgcgatctaagctcactggtcgcccaacagctgagcggagcagagaacaaattgctgcttctagcatcgttatttaatcgctgcagacgatcgcgcgcgcttcaggtgaaatatacaaattttgtcttcagtgcagtctcgttacaatccaaacggaatcatgaagctgttttcatgttagcgaatcgtgtaacgccgcaccatacctgtaacccacttttcgataagataagataaaatgcgctcttatcagcggtggagtaccccaaccgattcaagtataatgcaaccggtgcgattggggctctcatttcgacggtggatcgcgatacgagatattctagaatcgacgtccgcccatcaaagacggaagtgtgtcccaacaggaatcaacgtgcgttgtgggattaggaaatcaagtgcgcaaaagtgactcatcccgtgatccgtaacgttcgaaactcgtgtaggaaaattagttcaattatatccgcaagacagtgactgcagctagtaattaagtgaataccaagacgattgttatgtgcgaatagaagaatttccaatcaacgatgaagattctagtgaagtgttcaatcgtggcgatctgcctgggattgatcttgaccagcacagtaggcgccgccgatgatgacgacgccagcaaaaacagcacaagcgacaaaaaagataactctaccgatagcaatgccaatcaaacatccaacaaggagccaaatcctctatgcaacacgtgctcctgcaacgccaaggagcgaaccttcgactgctcctcgatgaagctgtacaagctgttcaacatgagcgactgggctacgttgaacgacagcggagtcgccaccgacaagatgatcctcagccgtaacggcatcccagaagtgcctcaatttcccaagttcgatgtcaaagtgttggatctgagcttcaacaacatcagcgtcatcgtcaagaaggccttctactacctgaaggatctggaggtgctggatttgtcgcataacatgctgactcgaagagcgctcattccggagatcttcgaaggaagctacaatccggacgagtacctaccgatggaaaagttgcgggtgctacgcttgggcaacaacgaactgcactcgctggatccggatctgttcgagcatttgcccgtcctggaggagctgagcttgaaggagaatgtgttcaagatcatcgatcagtcgacggaggtcgccatcgggaacattatgaccctgagggtgttggatttgagctacatggagctgttggagattccgaagcggatcttccactccccgcaagggctgcagtatttgaacctgacgggaaacttgttgacgagtgttcctgaggcgttggactacgcgatcaatctgaagtggctcagtttggacgagaatccgatagagagtattcagggggaaggcgtattcccggcgatcaagacattggagtacctgagcctttcctacattacgccgttgaaggtgattggacgcggggcgttcagcaagttggaaggtctcaaggagatacacatttgcaacaatccggagctgacgcatctgcacggagaagcgttcagccgggccaacgcggacgatccggggcgaatggagtggccccgagtgaagcagctctacctgcataacaacaatctgagtatgttggactcgcagctgctggcccggtgggacgacatggaggtgattgacgtgcgggtcaacccgtggttgtgcgactgcgacaaccagtggatggtggagaccctgctggcgatcatcgagaagacgacgcccaaaatcatgaacaatattgtatgcgccgcccctgatcagatgaagggcctttcgatggtcgacctggagcacaagcacagccagatgcgttgcctggacaagtacggcaacaggccgcagaacgatggcgctctgttgattggcctgctgatcggcatcttggcgggcattcccctcaccgcggcggtcatcatgatctaccggcggggttgtttcggcctggtccgccggggaccggccgacttttcgcgggctttctacacccgtgccaccaacgacgaaaacttctagttcgtcagcaattgattgtgccaaataatagtaggtctccatagagtgagacgatttctaagtcagggtttgtgatgacattttagttatgcctttccattcaagatagtgttagtaggctatgacttcatcagtgattagtgttaaggtgtgtgtgaagaagcatccaagtgagccataataaaatcgattacagggagtatttctctgacagtgact

SEQ ID NO: 86 - DNA, 489 bp, Aedes aegypti
atgttcaaatacttgcttctggttgcactcgtcccagctgtaatgctgcagaatgccgacaacatcgatcacgaatcgtggcctcaggtttccatccggccatgcgctggagtacgtccaccaccccgtgcagttcggattgaaggatgtgtagagatgccgtgcctgttgccccgtggacgcgatgccaatatggctatggacttcactgctgttcaggacgctaccaacttgcaaacccgtgtgaccgccactgctttgggtatcactgctccctatgagctgccagctgaccgtgccgctgcttgcaactggctggtgcagtcccgttgcccaatctcggccggagaggatctgacttatcatctgagtatgcccgtgactgccatctatccgctggtcagtgtgaccatcgaaatggatttggttgaccagagccagcagtcccacggatgcttcgtcgtggatgcccgtgttgttgcgaactaa

SEQ ID NO: 87 - DNA, 555 bp, Aedes aegypti
atgaaagctttatttcttgccttggtgatcgccatcagtggtgtatcgtgtggtcctatctcagttagtgataacaacattggagacatcatttcggttggagttaacgtagaagccgatatcaagagtgaaattaacgctagcatcgtaaacatactggtcgcgttattggcaaatattgacctcggaccaaacccaccgccactaccaccactaccgccactacccccgttcccaccaactggattgccaccaactggactgccaccaactggattacctccaacaactccggtaacacagccaccaacttccgaagtaactcaacagccaactactccggtaacacagccaccaacttccgaagtaactcagcagccaacgactgtgtcaccctcgccgttctcaagtatccatgttgatgaaatgatcaaaactatccaggatatcaaagagcaggcatccggtgcaaatctgaccaaagagcagagggaacagatcttgcgggaacatgctcaacagttggtgcaaaaattgatggaaaatagacaataa

SEQ ID NO: 88 - DNA, 879 bp, Aedes aegypti
atgagctacatgtatgacgcagaggaggtcgaacacttcaggaaaatcgcctgttcccaaaggaaaattccaaagatcatggcgctgaacgggttcctggagttcttccagcgcgagaagacctttcgccccaagaagaagtttacccaaggaactattcgctattcactacacaagcaagcccatgctagtctgcagtccggaataaatttgagagaagtggttaaactgcctccaggagaaaacatgaacgattggctagccgtgcacgtagtggattttttcaatcgaatcaatctcatatacggcaccatatccgaatactgtaacgaaacgacctgcccaacgatgagcgacccgaccatctctactaaatacgagtatttgtgggccgatggggagatattcaagaagccaacgcaacttcctgctccccggtacgttgaactgctgatggactgggtcgagaatcaaatcaacaatgaagcgctcttccccgtgtcgaccgacgtgccatttcccaaatccttcccgacgctttgcaagaagattctggctagactgtttcgcgttttcgtgcatgtctatatccaccacttcgatcgaatcgtcagtattggagcggaagctcacgtaaacacgtgctacaagcatttttactactttatccaagaattcgatttgatgtcagcgaaggagttggaaccgctagccgtgatgactgctcagatgtgtaaagatgtgtaatttgggttattaaatgagggttttacatgacgcaaaactacattgtataaaacaattcgaacaatagtgagtttttaaatcaggttgttgctagcctttaatgcataataaaagatgatagggaactaaaag

SEQ ID NO: 89 - DNA, 1543 bp, Aedes aegypti
cttttgcgctgatttcataaaagcgacggcaaccaatcagtcaaaaaactcgaactcggcccaaatatcggcaagaaatcgctttttcatccaacatctagcgcagaaaatactccaaaatgctgatcaaagtgaagacccttaccggaaaggaaatcgagatcgacatcgagcccacggataaagtggaccggatcaaggaacgagtcgaggagaaggaaggaattccccctcagcagcagcgtctcattttctcgggcaagcaaatgaatgacgataaaacagcccaggattacaaagtgcagggtggatcggtgctccacttggtcctggccctccgcggaggtcatctgtgaagccgaaaggccgttaaatcgtccggagccggaagcgggaataatttgtgatgcatgtgagaaacagccagcaggacttaaaagtccggaactaagatgaaagctcactttgattctcttttctgataaggttaaattattctgttttatcgtaatttgctgaagaataaaaaatgttcgaaagtgatccgattggaatgtaatgcggtttatcttttaaatttatgtttacttgtaatttagtttagtatttcagagcagtccagggttgaatgtagatctcttcttagagacatgatcactattttaatgtaagcctcaagattttttttttcgtataaaggttctaaattatctattttaacctaaatcaaaattgttccttcagttactttttccttattcttcttgcagtgaatcctagtacattataaaggtcccagagaaatctttatacaactaacccctcagcttcttcaaaaaattctgggagaacattactggaagaaaaacctcagatatgcaactggtgattccactctagatttttttcgtctggaatactttcaaggatttctccaccaattctcccaaaaaatgcttccagcaattttcaagttttgcttgaaggaatttgctccagaaaatccaagaactatctcatcgattcatacagaaaatcctttgagacttctccaagagtacaggattttttcaaagatcctagtagaagttcatcaagggttaccttagaccatattcaagttttaccggttaaccactggttaggattttcttcagaaattcctcttggattgtgtttcaaaattgtctgaaaaacgccattccactgaacacatcctttagggctggtaggtagcagttttcttattagagacgttcataattttaagtctctaacaaaactctattttgatcgaaaattccaattttcagcagcctagcaagaaagtttctaggttttcttctgtaatcaacatattctctagtcacttgtcttctatttatccttactaagaataaaaaaaaaataagagactccctataagccttcaaatactctaacgtgaccattccacaggttcttctcagatttatccaggaaaaaccaagaacattaaaaaaaatcccaaccaattctccaatgaatttgtccagtgaatttt

SEQ ID NO: 90 - DNA, 591 bp, Aedes aegypti
ctatcagatccaatataaatgacccgcatggtgcattctgtcacacacgatttttcactcctatccttaaaatgatgcgcttcgttgttcggatcgccgctgctctagcgatttgggcgtctatcgcctcagctcaggagcttttctgtacctcgccatcaaagttctacgtctccagagttgtgcacaattggatcggtgccgccgaatactgtcatttgcttggtatgcggatggctgtgatcgattccgaagccaaacagaacgaaattgtccggctggtggagcattcgttggtgttcaatgccacccggacggatctgtggatcggagcaagtgatctggccgaagagggcaactttgtgtggcttgaaaccggtatggaggtgagcaggacttacaccaactgggcccgaagtcagccggacaatgccgggactggggagcattgcattcacatgtggtacgaaccgtccaggaatttcacctggcagtggaatgactggcactgcgaacggaaattggtgccggtttgtgagaatataccgtaaagtgcagaaatgcaaagcactttcaaatacttctaataaa

SEQ ID NO: 91 - DNA, 563 bp, Aedes aegypti
ttccgatcagtcacgcgtagtaagtttcgattgaagtgttctgttaaaaaaatgaagtgtctagtactgatttcgctgttggccgttggttctcaggccttcttcaccccggagcaacatgaagtggccaagaggctgacgatggcctgcgcaaccgaaatcggcgaaggactgccggataatgtgggaaaccgattccgggagggtgatcttacgctgaccgatgacaagagcaagtgtttcatgaagtgcgtgttcggtaaggtaggctttatcgacgatgccggaacggtaaacaaggaagttctagtggaaaagctgagcaaaggaaatacccaggctaaggcggaaatgtttgctgagaagtgcaatatgttcgagggagccaacggatgtgaaaaagctcatgggcttttcgagtgttactggaagaataaggagatctttgcgtgagcatcgcaccggaatacgtgaaattgtgaaacgggttgttgttgattgtaaccattggcagtattacgaatgacgaataaagtgatttatgagagtgatatctcgcagtt

SEQ ID NO: 92 - DNA, 828 bp, Aedes aegypti
atcgatcgatcgattgtgtggtccggcagtgacagtgagtgcattcggcaagtgattccaaaaatggctttcctcctgttgggattggttatgagtgtggtgttggccaacgtttccggtgctatctacgaccatcagccgaagtcgaagctttgtgcgaacagttacagtgtgtcttgtttgaagatggagattgtgtcatttttggaacgactttcggaccagaacgagtacagtgttctctccggagtgagtgttgtcagggatgcgaatgtgaatgtcaccaaaacggccgatattatctcggaagtgtcaaggatcttccccaccgatcccaacaagcgattggatgaattcctgatcattaagctgaacgactatctgaagagccactcgctgcggctgaagctaatggataaggaagcggtatcgaaggcgcgagaactgttcgtggggcgtaaaggtggcagcaagctgggcaagaagggcggattggagaccatgattgctgctgcaatgatgatgaaaggaacattaggtgccatcgccatgggagggcttgcgatgctcgccggcaaagcgttgatgacggggctcctggcgatgacactggcaaccgttgttggtctcaaatccctcacttccggcggcggtcagaaatccaccacctacgagatcgtggccaaaccgatgtacacccactcgcactcggaaacggaggaggttagccacggacacggcggaggcggaggctacggaggaagctggggacgttcgcaacggctagatgtgccagcatattccggccgaggcgatctgaagctctga

SEQ ID NO: 93 - DNA, 1947 bp, Aedes aegypti
ggtagtttgtgcctcggaacaggacggttcactaagagaagaaggaagaaccgggtgcgcggtcgagaactcttgattttagcgtgtgtcgtcccgttttggtgaagttacagatagattatacagaacatgtggaaatcgtcggtggtgtgtttggcccttctgggggtcctggggtcggttagcggaacgacgaaactgcaggaacgctacagctggcgtcagttggactttgtgttcccgaaccagcagctgaagcagcaggccttggccagcggagactacgtgcccacgaatggactcccggtcggaatcgaacgctgggagaacaagctctttgtgtcggtcccaagatggaaggatggtatcccgtccaccctgaactacatcgatatgaatcagaccccgtccgggtcgccaccgctgatcccttacccaagctgggccaacaacgtggccggagactgtcagaatggcctgtcgaccgtgtaccgtatcaaggctgacaagtgtggacgcctctgggttctggacaccggtaccgtcggaatcggaaacaccacccagcagctgtgcccgtacgcgttgaacatctttgaccttaagaccaacacccgtctgcgtcggtatgaactgcgtgccgaagacaccaaccagaacaccttcatcgctaacattgccatcgacatgggacgcagctgcgaggacaccttcgcctacatgtccgatgaactgggctacggactgattgcctactcatttgagaagaacaagtcctggcggttcgagcatagcttcttcttcccagatcctctacgcggagacttcaacgttgccggtctgaacttccaatggggtgaggaaggtatcttcggaatgtcgctttcccccctgcaatccgatggcttccgcaccatgtacttctccccgttggccagtcaccgtgaattcatggtctccactcaggtcctgcgcgacgaagaaggtgccgaagagagcttccacaagttcacctacctgaaggaacgaggacccaacagccatactacatcccgagtcatgagcgaaaccggactgcagctattcaacttgattgaccagaacgccgtcggatgctggcattcgtcgctcccttacagccctgaaaaccatggaatcgtcgaccgtgatgatgtggaactggtcttcccagctgacgtcaagatcgatgccgaagagaacgtgtgggtcatctccgaccgtatgccagtgttcctcatcgccgagctggactacagtgatgtcaacttccgcatcttcaccgctcctctgagcactctggtcgctggaaccgtctgcgacgttaggccttcgctccgaccaggtgccatccagtccaaattcggtggatccgatctgtccacctatccaggcaccacccttctcccagttggctacactcaacccatcagctataccccgtcctcgtacgccccaaccgttgcccctgtcaccaagtacacagccgctccagcgtacgatcacccaacctcccacatgtacacgacccaggaatatccgacgaccgccaaggcgtaccacttcaacaagtaccacaacgtagagtaccaatcgcatggaaatggtcaagctgactaccacttcggacacggtggacactaccacgatcacgaccacgcccatgaatacggtcacgatcacggatactacggcggtggtcaacgccgtcattggggagctggcgccaagaagcccgaagcctggaagcagcagctgtactagaatcgagagaatgcaccatattagagatgtaaccgcacaattttcgttttagagaaatttaggtaaattatttgtcagtgtaaaagtactcgtcaagtttcttatgtttaagtgctaagatcgaacgaaccaactcaagtcgaataaagtaagatttttgttacg

SEQ ID NO: 94 - DNA, 730 bp, Aedes aegypti
atatgatcgtatgtttgggcacagaattatcaacaccgtagacggacttcgtccagtgcccggttcggaccgatataaaagcaactgattctaccacatcccggtatcagttccattttcttcttcgcacatcgtagatcgtggcacataccttccgggaatcgtcctagctgagacatcaagatgaaagtgttcattgccgtattcgctctgatcgcagtggctgccgctgagttcaccgtgtccaccacggaggatttgcaacgctaccgtacggagtgcgtctcttcgctcaacattcccgccgattacgttgagaagtttaagaagtgggagttccccgaagatgacaccaccatgtgctacatcaagtgcgtgttcaacaagatgcagctgttcgacgacaccgagggcccactggttgacaacctagttcaccagctggctcatggccgtgacgccgaggaagttcgcaccgaagtgctgaagtgcgtcgacaagaacaccgacaataacgcttgccactgggccttccgtggattcaagtgcttccagaagaacaacctgtcgctgatcaaggctagcatcaagaaggactgaaaagactgagtagttgttgatattgtgtaactaggagtgttaaattgaacagtaagagagatattcgcggaagaggaatttttggaataaattgattttgttggtggcttattgaaagttatatttcatt

SEQ ID NO: 95 - DNA, 491 bp, Aedes aegypti
ctcgcgagtcgtaacttttcaccagccgaaagtgatctccactgctgtggtttagagttttatcgaatattccattcaaatcgatcaagatgctgacgaaccagatccagcaggccgcccgcatgatgggagcccaggcccgccgcaactatggcgtctcggccgtcgtcctgtccaaggcaaccgatccgattcagcagctcttcatcaacaaactccgcgactacaagagcaagagcagcggcggcaagctggtcgacgccacgcccgagatcgaacgcgaactgaagcaggagctggagaagctggccaagcagtacggaggcgccagcggcgtcgacatgaccgccttcccctccttcaaattcgaggaacccaagatgggccccatcaattccagcagcgcctaagaaaaacaaaaaaaaaagctaggccactgctagacgctcttgtaaagttatcgaaataaattatctgaaatcttaatctag

SEQ ID NO: 96 - DNA, 1057 bp, Aedes aegypti
actacacgtaaatcaaaaataatcttgcgtcaaaagaacggcacgcgatttgaaggaatcagtgaagaatatagcttgaaactgaaaagtactttataaaactactcaataattcttttaactagtggtgtataataatcaaaactcaagcgctatgaatatgttagcgaaagcgttccgagtgccatcggtgaagcagttgtcggttgccgtggccccaaccaaaaacattgtcggcaagcgggatttcaccagaactatttggtacatgtgccgttcggaaaacatcaacggatcgccatcggcctttcccaaagaactcctcaaaccgaccatcagttgttcctgcggttgtgccggctcgaagcatatccacaccaaaggcgagcgtgagcttgttgaatttttgaccgaggaaatcgttgccgaaaagaaagctcagaagaagaaaactcttccaacagacatcgatggattcaaagtgaaattgaacggagctgatgtggaactcaccaagcaagctgacaaggaaaaaattgttgtatccttcaacgtaaaccacaccgtcgatgctgaagatgaagcagaaatcgatcccaatgcagataagccagaattcgcagaaatgcgaagcaaaccacaatttgaagtagacatcgtgagaggatcccagaccctgagttttacttgttcgttccttcagggcgaggcacaagaaggagaatacaatgatgtatttggtatcgatgaaataacattgttcgaaggagaatggaacgataaagtttatgcagtagcaggagatgttctggacggatatctgtacgacttgctaatgaacttcctagaagagaaaggtgtgagcaacgagtttgcagaaaaactatccgatttcagtactgcatatgaacataccgcctacataagcttactggagggtatttccaaattcaccatcgaaaagaaatagattcatcgattgtgtagcatttaaatacgttgataaaaactttaattcctaactttagctgtttctcttttatttatgtgaacaaat

SEQ ID NO: 97 - DNA, 1861 bp, Aedes aegypti
atgaaatcggctctggccattgctttgtgcttctgcctattcacggctgctactgctgctccacatccaggacttatcagctctctgaccggtattattggaaccgttgtgaatggcacagcaactgtgatcaacactgccatcactggcacgacgaacatcatcactggcattctgactggcatcactgcaggtatcactggtacgcagacgtcccttaacactgctatcagcaatgtcggaggccttatcgctaacatcacaaccggagttgctaatgccactggaaccgctctgaccaacgccttctccaccttgatcaacgctcatgttgccttgaacaatgttgctgttgccgtcgccggaaacatctctgccgatgcagctaccgccttgaacaaaactgtctcaggcctccaaacccttgctgccaacctgaactccaccattgccaacgccatcagcgccggaatcaccggaacctctaccttcctgaacaacttgaacaacctcacgaattccattaaggctgccattcagaacgttactggaacattgagcacggtccttccgaatattgcttccaacatccagacccagctgaattccacgattgctggcatcgctggacttgtctcaaatattggcgctaaccttggcactgctgttaacaatgctttgacgaatgccaccactgctctaaccaaggctgaatctgtcctcggtacgttgaccagcaacgttctcggaaacttgacaactcaagctcaagcagctgttcaaaccggtgtcaccaacatcaagaacctggccgatgctctcaagacaacgttgaccaatgctgtcagtgctggtactaccactggaactaacctggcctcagccttgaataaccttacgagcgccatcaactcgaccctccaaggtatcactggtattctgtctggatcggttcccactctactcaacaacgtgcagagccagctgaacaacggcatcagtaccctgaccaatcttgctgcatctgttggaaacaccctcggaacagccgctggaactactctcggcaatgtagtctctgctctggctaacactaaggctgccttggccaccgttgccaccaacgtgcttgccaacgctaccgctttggtgtcggccgatgtgaaggctgccgttgcggacatgcagtctatcgctagtaccctgaatgccaccctggccaacgccgttgccaacggagcagccctgaccagtggagttctgtcaacgctgaacactttggcggccaacttgaacgctacagtccaggccgtggccagtgccgtcgttacggctctgaacactaccaccaccacgacgactaccactacgaccaccacggccgctccgacgaccgccgcacccttctgcggagtcctctgccaactgattaaggctcttggataagttattcctgttttagttaacctacatagaaatgcaatttcttcacttgtgaaagttgaagtttcgtaataaatgcgcaaaacaaattataatggaaaatatttattcctcaaattgtgtccatagtaaatcaagaaagtaaacttcctgaaatatggatatacagtttattctcccttgctcgatattcttaatttcgatatcaagttagagaaccatagcacagcgcaacaaaaatacattattgcatgtctcaaggatctgattatgtgtctctagtagatttgggattgctgaatctgatgccgttctcagaaatttcccagcacgtcacaatttttagctacaggtcgccaaagttatataatacattggttttattgatgtttacctaaaatttgaagtacattttatc

SEQ ID NO: 98 - DNA, 555 bp, Aedes aegypti
cgaaaccttgcaatatccaactcatcctcaaaatgaagtccctgttgatcattggcctgagcctgtgctttgtaggcgttatcgtcgcttatcctgaacccttgctgctcggaggcctcaccgatatcctgtcaaccgtgttgaacacagtgaagaccgccctcacgaccgtggctaatttagtcaacctgatcaacaccgccctggccaatgctgtagcctccggaaatgctgccctgcaaacagctctgaccaacgtccaaactgccgctcaatccatcgaatccacactgaaaagcattgtcagctccactctcacttcgggaccgtctactcagcttagcactttgacgacgcagctgtccaacgccctgaacaacttgaactccatcgtcagccaagtcgttgctgctggaagctctgtccctgcgactttggttaaccagctgaacaccgctctggctaccgtatccaatgtggccgcacaagccaagtctcaagttggatccgttccgtctcttctcggtggacttggtggacttctgggatgagttt

SEQ ID NO: 99 - DNA, 17248 bp, Aedes aegypti
ttatttacaaactcgttcgcggtgccgtgcggttgtgtctcgtgtgtgctctccgtgaaaagttgtgttttttcgtgaaaattcgtttcggaccgggtggaaaactagtggccgaccgtgccccgtcacaatggaagtgaactgtgatggaatccggcaaagtttgcgccaattgcgggagattttcgactgccaacaggtggagccatttttaaggttatccaaaatcgcttcgtcggatttggatcgattggtcgtcgttttggggcagctgctggaggatccgaaatacacagaatccatcggggaccgtttcgggagcattttgctgctgatcgtcgccagcgcttttggcgatgtggaatgcgaagatgacaaggaagagaggaagaaggagagcaatacaaaaacagtgaatcgcgaaggtcaccggcgaaagtgcgtcgcgctttcaaagttgatcagccgctgtccggatgtgttgcgattcagcattcagtacttccgtcggaatccagcgccgttcctagcggaagacaccgtagactacacaccgacatcgaagcagaagaaggtcgaactggaagcgataacggatctggaactggtgcagtgttgctatcggtttctagcggcggatccgatctactttcgatcggtgtggaactggtcggattttttccagcagtatggcacccgggtgggatgcagtcggcagcagttctactacaatcggatattggccctggtgagctgtatgacgcagagccaaatcagtcagctggaccgggagttgccgctggaagcggtggttagagagcagttggaaagcgtggaagatgtggggactcagggatcagagacgggggatgagaagctaaagactggagagaaaatcaagtggaattttcgaagcaacgttgtgacgaacgttggagacgtgatgctgccgatattcgatgccggcaactgtgagttcttccgtgggcaggataaggaaccggatgatttggttgtggtggactcgacgcgactgaatgtgagaagtttggcgctgggtgtttcttccgggaaggctatatgcctatccggaccagttggctgcggaaagacttcattggtagagtacttggcgaggaagaccgggaggattgcacccaagacgcaggaaatggaacgtcgcttgaaatctgccctcaaagagaagggcaagaagcgcaaatcggggaagattgaagcggagttggatgtggatatccggaaactgaagaaggaagcgccaaagaatggattccttcggattcagctaggagatcaaaccgatagtaagatgctgctgggtcagtatagatgcaccgatacacccggagagttcgtttggcagccgggcgttctgacgcaggccgttatgaatggctactggttgctgttggaggatttggattctgcaacgcaagacgtgtgcactgtgctcacgaatctgctggagaacaactatctgagcgtgcctggattccgggattgcctccgtatcgaaccgggctttcaactgtttctgacgcttcgaacgcagaaatctggaaccagttcggcgcataacacctacactctgctggaaaagtatctgtacacggtcaatgttctaccgttgtcccgaccggagctgtgctcgatcatttgcactaacttccctaggctgaaaaccgtcgccagtcgaatagtggacatatatctgacgttctccagcggctgtcattcgatcgaaagcgatgagatcagtgagaacgttagcatactggacgaggatcgcaaggtgccattgcaaggcctcgaactggacggagatgacgttctgccgaggttccagtacgacaacatttcgttgagcaacttgccaacctcgggaagactggtatcgactcgcgatttgatcaagctttgccgtagatcggatccaagcttctcggtcaccagttcggagtgcgcctattttgtttttcaaaacgcggtggacatcttctgttcgcatctgccagccggcgaaggaaaacgcaacttgatcgttagcattggtggcaagatcggcatcaataaaagccgttgcgatcacttgtgcgaagactacaaaccggacgttaacgtttctgcagccgaggaggttaagatcggtcgcgttaacttgaaacgcaatttgggaggaagtttcggcgatgaaaacgacgaaaacgatcagagttacacgcacaagaaaatcaagctggataagaacgcttctacgacggtgaaaactcaagatttcaaactccagaataaggcgcctacgttttccttcacaagaccggcgtcctgtctcttggagcgtattgccgtatccgttgcccagaacgaacccatccttttggtcggcgaaaccggcgtgggcaagacaagttccattcaatatctggcctaccagacccaccacaagctggtcgtagtcaacatgaacaatcagtccgacgtctccgatctaattggaggcttcaagccggtggatctgagttacgtcatcaccccgctccggtacgagttcgagttcctattcaacaagaccttcaacgcccagaagaacgaaaagtttctcaccaatgtaagcatctgctacaaccgtggcgagtacaacgtcctcgtcaagctgatgctcaagatcgccgaaaaggtgttcacacggaagcaggacgaacagctccgtctggaaaaggtctacgaaaaatgggccaccctacagcagaagcttcaaaagctcgattcccaactgcgcaactcggttaacgtatcgtttgccttcatccccggctcgttggtcaactgtatccgcaatggcgattgggttctgctggacgaaatcaatctggcctccaccgaaaccctcgaatgtctctcaaccattctggaaccggatggctcgatcatcctcttggagaagggcgattttgtaccagtgaaacgccacccggatttccgaatcttctcctgcatgaatcccaacactgatgttggcaagaaagacctcccggtaggcattcgtaatcgcttcacggaattcttcgtcgacgaactcgtggccgaaaacgatcttctcatcctggtgaatgactacctcagcagcaccggtattcagaaggttcgcattctcaacaccgtaaaactgtaccgccggttgcgatccctgtcccagcttgagctgaacgatggcctcggcaacaagccggtcttctcgctgcgaaccctttgtcgagcactcagcatctgcagcaagaacctttgcggttcaatcgaacgcaatctctacgagagtttctgcctcagtttccttacccaactggatctcaaatcgcacaaaaccgtgctcacctacatccagaaaacactcctcaacgacgtccaccaggcgatctcccagcagattccacgccctccggaaggcgaacagctcaacttcgaaggctactggatcgagaagggacctcgcgatgtccaggaatgcgaaagctacatcctcacggaaagcgtgcggaacaatctgcgcgatctggcacgaatcatctcgatcggaaagcttccggttctgctacagggtccgacctcagccggcaagaccagtctgatcgagtacattgccaaacgcagcggcaacgtctgccttcggatcaacaaccacgagcacaccgatctgcaggagtacatcggaacctatgtggctgacgtgaccggaaagttgaccttcaaggagggagttttggtcgaagcaatgcgcaacggcttctggattattctggatgagctgaacctcgctccgagcgatattctagaagccctgaatcgagtgttggacgacaaccgggaactgttcattccggagacgcaggtcgtagtgaaagcacactccaacttcatgctgtttgccacccaaaaccctcccggattgtacggtggtcgcaaaatgctctcccgggcgttcaagaatcgctttgtggagctgcacttctccgaaatcccccgcgatgaactggaggttattctggagaagcgatgccttatcccgaagtcctacgcccagaagatggtgaaggtcatgtcggaattgcagctgaatcgtcgcagtacggccaagcagaacttcacgctgcgcgatctgttccgatggggcaatcgttacacctatgccgataaagctctcctcgcggacaccagttacgattggaatcaacacttgatcgacgaaggctatctggtgctgtcatcgaaggttcgcaatctgtacgaaaccaagatcatcgaagaggccctttacacccacttccggaagcgggtcgccgaagacaatctgttcagtctgaagaagggcacttctatggtcacgcgaggaattctggaacaactggagaagcaaaccgtctacgagaacattgtctggactttcgacatgcggcggatggctgttttgaccgccaaggccctagaattcaacgaacccgtgcttttggtaggccccaccggatgtggcaaaaccaccatctgtcaaattttggccaccatccgggggcgaaatctaagaatcctgaactgtcacatgcatacggagggtgcagacttccttggaggtttgagacctttccgcgattctgatgattctgcggaaaaagacaccaaacagcagctattcgagtggtcagatggtccgctggtcctctcaatggccgaaggtggcttcttcctggccgatgagatatcgctcgcggaagactccgtcttggagcgattgaattgcgtgctggaaccggaaaggactctgctactagcggagaaaggaggagtgaccgccgaagcatctgaatttgtcatcaccgcagcggaaggtttccaatttttggccaccatgaacccgggaggagactttggcaagaaggaattgtcgccggcgttgaggaaccgactgacggagatctggtgccgagcaaccgattccaaggaagatttgatccggatcgccgaacacatgctgcgcaaaggtatgccaaactgcgaaaccgatcctcgtcaagtggctgaagtgatcatcagcgtcgtgtttgtgcttaagaacaaggtcgacaagctgaacttcagtattcgtgatgtgttagcctgggttggttacttgtgcaagaatcagcaaaacctgtcactcgccgaatcgctaatctacggattagagaccgtcttcttggattcccttgagatgttaccctacgaaacgttcgacgagattctcgctctacgtaaggaaatcctctcggttctgcaccttctgatcaagcagcatctgatgatcaagcagttcgagctcaaacgaggaacggcagttcaatcggacgataccacattcggcatcaccccgtttttcattgatctcaatccagaacaacgtgatcgcaaaactgaatttctcttcagcgccccgactacgcagaagaacctcttccgattactctctgccctcagtctggacaaagcgatcctcctggaaggaccaccgggtgtcggtaagacatccctagttgagaacctcgctcgcgctgcaggatttgccatcgttcgaatcaacctgtgtgagcatacggatctggccgatctgtttggtaccgatctcccagctgacgatcattccctggagatcgctgaagaagaagatcaccatgcgcagaaagcttccaaattgggatcttttgtgtggcgcgatggacctcttctggctgcgctgaaagcgaaaaatacctggattctactggacgaactgaacttggccccgcaaagtgtattggagggactgaacgcgatcctcgatcatcgtggtgaggtgttcatagccgaattgaacaaaactttcaagctgggcaagaagacgcgcatcttcgcggcgcaaaacccgttgcgacagggcggtggccgtaagggtcttcctcaatcgttcttgaatcgcttcaccaaggtatacctgcggaaactcgagcagagtgatctgctgcatgtcgttgacgggaagtacgtacagaagttcggcaagatcggcgaggaaatgatcgatgaccttggaagacgaccaggacctgatgcaagcttttttgacgtcctgaaagcgcccgaggatcatacgatcaattttgaccttgcccagaaaatggtgatcttctctgaaacgctggaaactggaatcgcaaatctggagttcgggtacaagggaggtcccttcgaggcaaatcttcgagatattcttcgatggtgcgagctgttctgcaacaccaaaacgggattcttccgcaagaagttcgccaatcgagaagacacgttccgcaactttttgctggttttgttcgagaagatgaagttggtctactaccaaagaatgcgaaccgacgtcgataaaagttacatcctgtcagcgttttcgcgtgtcttcagttgcgatgccttccaattggaagcgcaagccgaagatatcgggatctactggactgataataagcttttcctgggcgatttggcggtggaaaaggtcaatcgatcggatgaaatgaaccctttggcgtccaaaacacagaaaagtttcccattgctgctagcgagtcaggtggagacgttaaggaacgtggccgagtgtgtccagctggagaaaccggtgatcttgtgcggtccgagcgactgcggcaagaccaaaatcatcaatctactgacgacgctggctaacaagttctgcaacgtggacacgatcgacgactcggttaccggcagcttccaacagttcgatttcaaccgacatctggaggaagtttcgtccaacgtggaagcggtagtgatggacgccgtgaaggacgctgcactgagcgggactgcggaaggccgaaattgtgtagtgcagttgctggcggtttgggagaagtacgctcggttgaacgacggaaaaatggcatttaccgcccaaaatgtccaatccgaggagttggtccttttccgaaaacgtctaaccgctctgcaagatgtcatcgcactgctaacagcccacaaaacccccaatcacaatcacgaccaccttggatctatggcttccgttttgcaagtcttgtccaacatatccaaacacgccgaaacactcaataccggaggtcacttcgagtgggtcgactcgaagatcgtcaaatccctcaaacatggtcagtacatttgcctagagcacgtcaatctgtgttcgtctgccattctggaccggttgaatccgatcttcgagccggatggaagtctgttgatttcggaaaagggcgtcgacggtaataacgagtcggaattgattcgcaaacatgccaacttccgagcgtttttgaccctagaccccaagaacggtgaaatatcccgagctatgcgtaatcgttgcatcgaactggctattcacaaggaagcctatagggatgacgacttaaagcggctggccttcgagagtggagtacgtcaaaattggttgatcaacgtgattttggacattcacaaagccgtcaagaaaatctctgagtttaaccaattcggcatcgctcacatcgtgaagtttgcctacctggttgctcagaatcagagaatgggaatgacggcagaaaaatgcctgatgatcagtgctttggaggtctacgtgcgatcgtccaatacagaccttctcggatacggtatagacttctaccggaacgccttgaaagatgcgatcaaagaagaaatacgaaagtccatcgtaacaccaaacttggtcaattacgacaacatcttgttgaagtccaatgaactcaccagtcttcaattgatcaaactgcaagcggaacccttactctgcgttctgagatgtcacctgaacgggttcgcggatattcctgcagctttggcagacattgctggcgcattccacgatcaagccgaaataaacttgagcaacttgaagtatctgttctatttcctatacgaagcttcgagctatggagatgcaaactgccgaaaaattttcttcgccgaatcgctgagggcactccacaacgttaaaaagatagaacccaagaaagaggtgactcctacggcggaaattactgtagacctagaagttcaagggggcatgggtcaatggagacaaactcctcaaagcctcactgaataccgcgatctgcaacacaccaagcgagaaaaaatggaattcgagatcgcttcatccatcgcgatagatgaagtactacaacagctgattgatttgaacgaaattctgttcactgccgttggcaagtttggcgcgggagaccagcttccttggaatcgatcgcttttgccaaggattcgagaatatctggaagattcctccgtcgaacagtatcaactgagtgcaaccctactgttgaacacaaccctgaaagcgatcgaagtcactagtgctaccaagttgagcaaaattgatgtcctgtcctactcgaaggcagttcatacggagatcatcaacgatacgattggcaacaaactgattgcgcagttgtacgactttttgagcagttttaagccgattatggagaaagctctccgagaagtgaccctggatcaggacacttacgccaaattggtcgggtcgtatttgtggatcaaccggttgatcgatctctcctgccgtagactgttcgtcaataaagagatcgatacgagtcttgtggactatgtcactttgcacttccaatggatccagaaacactgcctctctctgttggatgatcagaactgtagtccgttccgtgctctgaatgactccctgcaagaatctatgcagagttcgacacatccgcttgctaagcataggaagctttatgccaaaacgttctcgtgtagcttaccattctacagcgaagagcaggtagagcactatcagcgcatgatggagttcaacgaaagtcttcggctattcccacgcttaacgcggttgtacgactatgaagaattccttcagaaggtggccctgttgaatcacccgaaaacaatcgacatgaggcgatcgcttctggccaactccaagcagctcttgtcattggatttggatcatcgagaagctgagaccatgttaaatcatgccgaatatcaacaactgatggaattgtgccaaatgttccaggaagaaagcaacgaagattctgcagagcagttgattgcagcaatcgaaaaactgaatgattaccggaaatttgtggctacttatgaagcaccggaggaatacaaccacaaattcccagtcgaaatgatgccactgtatgagtatttcctcctgaagacactaggccgcgacgctgaaatcaactacgactacgttgcaagcgtccgttccttaaatctagactctctccggcttgtgagacttcagggtaattcgcagcatagatcaattctcaaaatgagcaaactacttgatgttttaatcgaatccgatgtagagttgagtgatctcctgcgagccttgccatctggtttctacaagaacataacaacctacctcaatcggttccaccgattcaactatgttttccagatgaactcgttggctatcaatcacatcgtttgctatcagaacgagaccgaagcgagctatgaggcacatctagagcaaatgtccaatctgacgatgcacggtccagtgctgaccaacaattgcctatctatcttactcaacaacagtggagaactgcgatcgactggtttgggtgaacttcctgaatggcgaaagactttgaagacgttacgtgatacgatctggaccaatgctactgtactaagcagagaatacgatcagtattctgtgggattggaaacagctgttggtcaagctaaaaagctgctcgtggagtatgaatgtgttcagaaatggtgccaagacggtcaacgaaacgttgataatgaaaagttcctccaagactttgaatcgctagctgaacagctaaagaaacttgtgaaaaagtctgcggatgtacgcgagaattctagctacgaagatcttcgcacgagttcgaatagaaatctacaatggcagttaagttcagctttaaattcgctacgcggagcgatcgaactgaaccttctcgttttcctaccgctgcttgatccagtcgagaagaacgccctgaaaaaggcgtacaccgacgaagatattcagcactacaaaacgctgatacaagtgtacgactacatggcgatcaccatgaactaccgccgttttggtgaaggcaccaagcagctatttgtcaaccacctcaattcactagaagagaaacgcaacaaactttgccggaaggtagctctgcggccctcagacaatatctacaccgatctggtcaaagacgtcaacaacttcctgatctcctgttgctatccgggaactattagtgaactgttgaagaccgccttacagtgcctggaattcgaagtggataccaaaaacccgatcaagaactgtacccacaccaaagacttccaactgcgtgtcaacgaaacgatcaagcaaatcgaactgtgggtcaacattgccgacaagtttgaacaccatacgctgaagcgctaccaagcgtactaccgggacttcttggagccactttgctgctccattgccaccctaaagtacggattgatcggcatgaagcactgtttgatcatcaagcgggactcgatcgctgtcaagtccaatggagtgttctacgacttgtctgaaaaggatgccttgacgaagattgtggaaaaattcgtgcagttcccagcggtggagacgatcgagttgttcgacgaggaagccagcggacacaaagtgaacgtttattccattttggagaagatagatcatagcgaaagcggatatttccgactgctgaaatcaaaactgcaggaggtgaagaatgctatcacattgcgtggagggatcggtgctgaagaatttgtggaccttgataagatcgttaacgtgtgcaatcaagtttggcagaagcaggaacacctcagacggaagaagcaagccgaagacgacagcttgtaccagacgaagagtcattgtgacgaagaggacgaggaagtgatagcacaacgagaaattgttgatttgttcccgaactatgtagacgaagattttgcggatttcattcaaaacgatacactggaacaggtcatcaagaaagacagcgtcaagaaaaatcaaaagttggcggaaactattactggcgatgattacacgatgatctgcgaaagcttcatctacctgatgaacaaattctcaaagtcgtattactataatccggagacagttgctgatctaccggaggctattgcacccgatttcattagtcccttccagacgaagatcgcgattgtacagcaagtgttgcaaaaataccattcggctttgaacagtaaactggatgaaagcttttatccaggcttgagttttttggtcggactggctcaagacaagtatgaggatttagatttgaaacgatccactgccggcaagtacaatttctacaaagattccaacatcgcagaagtggtgcagtgtgtcgaagtgctcaagaaaatagaggatcgtgttcaaaaactactgcaagaatggcccgatcatgccgtcctcaaggacatcatactgatcttgaaccgtatttatttgctgccttcgacggctccgatcgtccggttcagcacgggtctacagctgttgcggcagaaaatcgacgaatggaacagtgtagctcatcggctgaacaatctacgtgagttagaagcagacatcgtagagttcgtacaccggtggatgcgtatggagctgcaatactggagagaatgtatgagtcaaactcacgacaacgtgcgatccaaagcgtaccgctattggttcttcatgtataatctactgcatgagtatcttcaaagcgattcaaaggccaagctaggcaatctactggactaccgaaaggttgaacgttgtttcggtgagcaagaactcctggaagaagatgaggttgaggaaggaacagtcaagatcgacgatctgattcacgttctgaagcagttcatggaatcgtccaactacgcggaatataccactcgtctacggattttgaaatccttcgagcagtatctcatgtatttaaactacgaagacaaccgtaagaaagaaaccattatcgccgtattgcataacctgcatatgtactacgaccaattctccgacgaaatagaagagtttattagaacgaaacgcacaccaatcgagaagaaactgaaagacttcgtcaagatcgaatccttcaacaaagatctctcgtacttcagtatgcgtaacaacatcgcaagagtccatcggcagctgcacaagttcctcaaagagtttgaaacggagatcagagccaagattctaccggtattcacccccaaagacccagccgcggagatcaacgatgctgaacaacaaaaaggcaaaaatcttcgatcggaagccaagatcacctactacatggtagacgtgaaaaacttcatggcatcactcaaactgaaggaaaagttctcaatcgctagcatatcacaggacaccacaccaaatcaagaactgctggccaagattgatcggttctttgttacctcacgaaccgtagtgaaggaagcgattctgcatgcgccattcccaggtctgatctacaatctggacaccttcatgcatgatcaaatcgaatcggtggagtatctccgaggattggaagttgatcgcagccaaccccgtcccaagcagaagtcacaagccaaacaaattctgaatcaaaaacgtaaagcgttgtccgacttctacaagagtttgacccaattggggttgagtttccgcagcgggttggtggaaaacgcgatcgagtcggatccggtagatgtagcgattaaaccattctcagcggagttactcgcgcacaacagtaagtaccgtaaggtggatcaacatatcgtgttcctgaacgataaacttaacctgtactatgcaaagtgtgtgttcaagatcaaaatgttgacgaaggttctgttgcaaccgaatccagacatcgggaagatcaaccttgaaagaatcaaaggatttgctattgatctcttcttaacggttcaggatcaacgtaaggagctgggcaaatccgttgccagtgtctacgagttgagagatcgtattcaggatctcacgcagcttagtggatgcctggattcaaagaagcgtgaattcgattttgttgcgagcagacgtaagatgaatcatatgcgacactgtacgatcaaggtcagatgtgtattggagcaattcttacagcttctcagttgtgcacctgcagaagtccaagacgagctcaaaatgctaaagaattcacacgaactgactcagaagacgatggagccgattgtgaaaggagctagcgatggcctaaagcaagctgttcgactttgcgaagaattgaagaaatgcgacgaaaactacttgaccggagatctcgttcaatcaatgaacgatcaattcaaatgcatgactaacattcttgaccagttgtgcgaacgccttaagatcggcaattccgatgaacattcagtgtatgctcaaccgattcttagcgttctgaaaatagttaaaaatgtcatcgacgcagaagatcacccggccgctgaagatcgcacaaacgaagacaacctgaacaacgaactagaaaacataatccattcgattttgatcgcaatgcaacacatttacaagaagtactccactgcggcccctacggaatgttcggatgctccgaaggcactcgatgacgctgaggaaaccgaaaatcacgaatcagaatcggaacttcaaacgcagcatctgaaggaaaagatcaacgtggaccttctgcaagatctacaaactcttagcattcgaaaggtggtcggtaaaattgccaatatactctccatgcttgaacaaacaaatcactccgcaccacagttcgtgacaatgatccaaaaaattactcgactggtgccaattctggagcagttcaacttgctagttgagtattacttgatccaacagttgggagcgcacaaaatcagcacaaagatgctatcggtaatgctgacggtgttcattgaactcggtaccaagggcttctgcgtgccgaaggatctcctagaagacgaacaagaagcaggtggggagcaacaggaaggaaacgagcaaggagagaaatttggcttcgaagacggtgaaggtgagaaggatgtttccaacaagattgaaagcgaagatcagcttgacgatgccaagaaacctgggcaggaggacaagaacgacgaagaagaggagaaggacaacaaggaagaaaagggtatcgatatgagtgaagattttgactcgaagctgcaggatgtggaaaaaccggaaggtgaagattcggaagaggaaaaggacgacgaggaagatgcagacaagcagatgggagaaacagaagaaggagcggaaaagctcgatgatcagatttggggtgacgacgaggagaaagaggaaaaagataaggaagaagacatggaagaggaagatggcaaaggttctggtgaagcggatgacaaacataacaatttagattccgagaaggacaagacaccgggagaggaagaggaggggttggatgcggtagataaagcgatggatgacaagaaaaaggagaaacccaaagacattgaagacatggaaaaccaggaaggcgacgaagagcaagagaatccccatcacaatgagcttgaagaaccacctcaaccggaagatatggatattgatgaggagttcaaccttgataacgataaccgtccagataatcagaaggatgaagacgaaaatcaggaaaatccattcgatatcgacaacatgaaagataagggagatgaaaaggatgaagaagaaacagaagctaaggatgatgaacagaaggattccgagaaagatcagcaaaacggcgatgactcctcagatgaagaacaggaacaggagaatccagaaggggcagacaagctggacgataatgaagtcaacccagaaggtgaagaagagcaagaaaagcaggacgatgaggttcaacaaattccggaagaaaacaaagatgaacaaccagctgaaccagaagaaccccaatcagaggaaggtgagaatcagaagaagaagcaggatgaagctcatcatgaatccaaggataaacgatcggaagaggatcgtattgaagcgatgcccgatatagaaaataagggcaccagcgatcaagtggcaaacgaaaaaccagagtccaaacaggaaaacgaaatggacgagcaggataccggagaagataaagatggagttggacaagcggagaacgagcaatcggaaagtggtcatcaaggtattgccgaatcgaaggaaactcgtacaaagcgtgacaagaatgatcagaagcagcaacaagagaagcgacgccaaggcaatacggatgaagacagaacattgggtgatccggataaggccgagaagaagcgattgaagacggtagatgagataaacagggaagatcgagcgaacaaggaagatgaagttgaagaagatgaagacaaggaagatgaatcggaggaatatcagcacgtgaaggacgctaaacaatcggataaaacaacactggacaacgcaactgaggagcagtccaaaaagattcaacatcaagagaacaccaaggaggacgatgaaccagatgaagaacaagagaatgcggatgagctgatggatgtcgatgaacagacggaagaattggaagagaccgataagcaactgctggaaagtgagaaaaacgaaaagaagaaggacaaaccggcaaagaaggatgagaatcaacgggaaaaggtcgaaacgttggaaaacgttgaagtggaaggggagactgttgacacagcaggggtcccaagaggagcagacactacggcgcatactattatggacattttgaacgacgtgacgatcccggaggaacccaccacagcggaaacgttggagatgcgaaagatggtcgagaaggaaaccctagccgtgaatgcggctcaaccagatcacgatgatttcgaccggtggcaacacatttcgaacaagatgcttccaaatgcccgcgagctgtgtgagcagcttcgattgattttggagcccaccaaatgtacgagactgaagggcgactaccggacgggtcgtcggatcaacatgaagaagatcattccctacattgcctcgcaattccgcaaagacaagatctggcttcgtaggacgaaagctgcacagcgtgactacaagatcacaatcgctgtggacgactccaagtcgatggatcacaacaattccaaagatctgacgttgcaagccatttcgctagtttcgcaggcattgactttgttggaaagcggtcgtctgaatgtgatgtcgtttggagagtcaccgaaaattttgctgaagcattccgatcagttcgatggcgccaagttgatcaactcgctgaactttgagcaaaatcaaagccgaatcgccgagttgttggactttgtaaggacgttcaatgcagaggacacatcgtcgtcggataacggcattttcgaaaatttgctactggtgttgagcgatggtcgtaacattttcagcgagggcgagaaaaaggtgaaaaactcggtcaaattagctcgtttgcagaggatattcgtcgtttatgtgatcattgataaccctgagaacaagcactccatcatggatatccgagtaccgttgttcaccgcggatcgaaaccagattgtgatgcaatcctacctggacgtgttcccattcccatattacgtgatcgttcgagatctcggccaattgccattggtgttgagtgatgccatgcggcagtggttcgagctggtcaacagcgagcagtaagggtaacagcttttaaaagctagtaaagttatttgtgttatttcattattattactgataaaaatatttacgattgttccactgtaaatacaatttgaattagatcgcatttcaatatgttatgttgaagtactagaagcagaactttgtagttcgagagcttccactagctggtatattttcgtatacaataaaacatagtttgtactaaaa

SEQ ID NO: 100 - DNA, 1327 bp, Aedes aegypti
aagctcgtttagtcccccttataatcgaaggattcccctcaaatattcacagtggcttatgtagcttagaattttaacaaatcaaattttctcacataaaaacgggccaccttagtgtgcatgccgggaaacagttgaccaccagttggcattagcctgacgaagacccgtaaaagactggcgtgcgaaagagaccttcccccaataatgatccactgccatgcgggcagagaggggcaccacagctcgtctttgtgacttgggggctctcgcttccacgccgaaagaggtgtaggtacgaaacaaaaacaaaaactgcatcagatttagacggttggtatataaagacccatcaatggggatctccgaccgcagtctagatcttactttcttccctgaagcacaattcggttctgaatccaaaccaatttgaaaaagggggtggtgacatttccagtggaaagtgcaaagtgcgtgatctctataaagatgaagttactgattttatcagcgctcctagcttcggcctgcgcttttccgcagcgcaacaatgactacgaccatcaccaacagcatcaacagcaacaccaaccacaacagcaacaacagcaccaacaccagcaaaacatcgaaaagcgcactcaagagaccaccacttggattccgattctgaaatacaacaaggaacagggcgaagatggcagctataaaaccgagtatcaaaccggtaacaacattgtccacgaagaatccggctaccttaaggacttctctgatgcccacccgaacggagtgctcgttcagcagggtgcctactcgtacgaagctcccgacggacagatcatccacgtgcagtacaccgccgacgagaagggattccgtgtgaccggagaccatctgccaaccgaaccaccaatcccggaaggtatccgcaagggtctggaggagatctacgccggaatcaagcgtcgcgagcaggaagccaagtctaacccgaagtacgcggaaacggctgctcagcgagcggaacttgactacaacggccaatactaccatcagtgagcgcggaacgcggcggcgagacttaggatattcgtgtgtgtatttatattaggataaaccgaagcgctgacatcaggcttcctagcttaatgatgatatctttgttgaacctgaacttcttgctatggctcgcggtatcaaatgatggctgcgagaacgacttatctgaaaagaagactgtgatttcctttctctagcgtttagcgtaaacgcaaagaatggcttatccacaagcgatggaataaactttactttattattgaaa

SEQ ID NO: 101 - DNA, 801 bp, Aedes aegypti
ccgactgtgaaagtagatagatcccagcgaaaaacaaagagtgcactcaagaattaacgaaacattcggaaggcctaccgtgaagtgttcagaatgaagtgtttgattgtgttttcgttgttaacattgggctgtgccgtggcgcaggatttcaacgatggacgctattatccggaactgctgaggggcaagtttgatgacggacaatatcgaccggacaatggcggagcttatcgtccaggaagcgctggtggcttcgtgcagagaggatctggtggttccggaaatcgacgaggatccagtggtttcagttctgccaactccgccaatcgctttggctcatccaacggcaacagatttgtaaacagcgctcaagacaaatttgtgccagtatttgctcaggcacccgtaccagtatttgccccggtatcgtctggttttggcgccagcagcaataaccgaggatttggtaactccggaagatcaagtgcatctcgtggcagccaggaaggtgtcaaggaagatacccgtgaattgaacgaagatggttacttctatcggtttttgaccgagaacaatattgaagtcgctcaaaccggacgcatcgagaaccgtggtaccgaaagcgaggttctgcgcgctaaaggattctacgaatttgttggagatgatggtacacgttaccgagtagactacattgccgatgaaaatggattccagccttcgggtgaacacctgccaacaccgcctccaatcccagaggaaatcgttcgttctttgcaacttctgagtcagggataa

SEQ ID NO: 102 - DNA, 1995 bp, Aedes aegypti
atgattggacacttttggatgcggatgcttgtggtagtgtttgtagtggcactgactgtggtcgttgtcgattgtcaaaattatgatcatgagactgttggacgatttccagcattattcgagtacgatgattttgaaagctgtcgtaagacgtatcgtgagcgatacgtttactgtatagttcgagcgaagatagttccggacgatgagtcactattatggcaaaatatgagcatggtctccgaagataacttttattatgatcatcgggtgttggaacggggaatgtgtgttcaaaattgtctcgcaaacgcagacaaagatactgttgccgatctaaatggactgaatcaattgagaacttgcattaatcagcgtctccagaagagtcatgatcttcagattgatccagaccttcatatctaccactgctacaacaaaccaaacgaagagcctccgtatgacgcattggaaatagttttcttcatcacaattgcagtgctaaccctcctcgtctgctactcaacatggtatgacttatcacttcaatcggcgcatcggtataccgataattacttcagcaaatctcacaccactagtcaacaaaagttgctcactgccttctctattccgcggaatctccggcgcataggacacaccgcgaatacggaaattcggcgggatttgaatttccttgagtcgttccgtttcatccaaatgtatcggattatttcgcttcatgtggtgatggcactggtgaaggtacccaagagtaatccggaagaccttgaactgatggtcaatcaacctgcagctattgaatacgttgcagagttccaaaactatgtacaaaccttcttttccataactggaatgttgatgacgatcaactttctggagcacattcgcaaaaaccctcagttcaacatgaaatacttttgggaacgtatccgagcacggatgtaccgaatcgtcccggcttatttgtttatcctcttgctggaaacttccatcactcggcgtttcatggatggacctctggcagagcttatgattgggcaatcgagggctagttgtcgtcaaagttggtggaaaaatcttctatttgtgaacaactacatcgatacagacaaaccatgccttatccaatcttggtatctgtcggctgatttgcaactctttacctttgctcttgggtgcctcatgcttatctggcgatggccattcctgaagaaatacatccttggcattggattaacatggggacttgtcgtcaccacgatagttgcgtacttaggtcgaattccaccagtcatgaccgaagaccttaagctgtacaataactacaatttcggtcatccgtacttccaactgtaccaaccattccacatgaatatcacaatctacttcgccgggatgatcgccggttttgtgtatcatcggtatcgggaatcacgcaaagagtttttcaaatgccagctacagtttaatttgctgcaggtcttcctgttcctgtacttctttaccgtgttcacaggctggtgggtcgttcggaatcaatctgtgatttcgcctattttggtggcaatctacgccacctgtttcaagcacgtctggggcttcctgtgcactatgatccagatacgaacagctctcgccaccagctggtctcgattccgcaacttcttcagccacccgattttcattatacttgggaaactgtgctacagcttctatctcattcacttcaccgtaatagtgcaagtcgtaggttcagctaaacaacccattttctatagtatgagagcgattttcgaatatactttcacaacctgtatatggaccctcatttttggaacattgctctgcattctggttgaattgccttcgaatgtggccctgcaggagttgtttgaatccaggtcggagaaaaagccaaccgatactgatgcaagtacgccaaacagaaaaatacacaaagatcctagccactga

SEQ ID NO: 103 - DNA, 2467 bp, Aedes aegypti
attcctctagaatcagttgtgttttgtgcttcaatcagtctgtttgggaatcataatcgaaaccaacagtgtttgaaaaatcgtcataatggaactctgatattaaccagtgctgtgattcgaaaacatatttctgctgtcttttggaacgggagacgagtaactgtgtaacagaaaagctgcaaggctcatgcgaatctttcgttccggttggagaataatgagcaccagctatccagatgcaccccttgggattcgacttgtaaccgctatatgcgggaagatttgtccccgatggcaaatcaatcgattgctctggtgagttatttgctaacaagtgaaatgattaattactagtataattgacgattatgaggtgcaaaaatttgtgctgataacagataatacgtaggacaatacaaatcaaaacgacaattttaacgttgatcgccttgacattcaatgtttggaatggcaattttgcacaagaaatgttatttaatatacctacctagaatgcaattgtggtgatgaatcatttagatgtggaagagaactgacaagagtgacaatttgaaagctagtgtgattgttgtagacaagctgcatatgcaagcaaatattatatcatgcaggggaagaagatgataacagttgtaccacagttatggaaaaaccacaaatatggattaatgttgtatttaacacagaatttcttttcaattgaataagcacttagatttttttctcactcttttttttaccgatattggcaccaccgagcgctcagcaaacactgttttagacgcgatttcagcaagtatgatgcttttttgctaaggttcaaatgctcggtgctcacgctcacctatctggcgtacatgtgctatcacatgacaaggaaaccgatctccgtggtgaaatccgtactgcatcgtaattgttccggagttcaaattccgccggaattcattcacaacggtggagagcccccgaatgatagcacctggtgtgactatgcgcctttcgatggggcagattctgcggccttgctggggacgctggattcgtcgtttcttttcagctacgcaattgcaatgttcttctcggggttcattgctgaacgggtctctctacgatatttcttgacctttggcatgttgttctctggcattttttgttatctgttcggaattgccaaagtatacgatattcactcgatgatgtacttcgtgctggtacaggcaatggctggtatttttcaaactaccggttggccaggggtggtaaccattgtgggccgctggttcgggaaatcgaagcgtggcttgattttcggtatttggaatagtcatacatcgattggaaacatcatggggacattgatagctggatactacgtggaaaaggattgggcaatgtcatttgtggtgcccggatttgtaatgggcgtgtttggattcattatgttcctgtttctggtggatcaacccgagattgtggattgccacgagaaagtaggcgaccgtagaggaggctataggagaattgaggacggtagaattggagaatccggtggtaactctgatgctgaagaatcggttggaaccagtagtgaacaggatgtaaacgaacgcacaccaattataggcagtattaatcgaacacctgttcaagacgatgcaattggtttcggcggtgcattaaggattccaggagttgtagagttctccatgtgtctgtttttctccaaacttgttagttacacattcctcttctggttaccactgtacattcagtcctctacaacactgggggcagaactaagtgcagatgtatcgactgtgttcgatatcggtggcattgttggcgccatagcggctggcctaatctccgactacactggaatgtctgcatcgacgtgcactggcatgctagcgttggccgcacctgctttgctgatctaccaacaatggggtgctatctctctatcgttcaacattttcttgctcttcattgctggagtgctagtcaatggaccatatgcacttattactacttccgttagtgctgaactaggtcaacatagttctttgaacggcaattccaaagcccttgctactgtaacagcgatcatcgatggaacgggatcaatcggagctgctgttgggccgctgattgctggattgatatcatcgtccggttgggaaaacgtcttctacatgttgattgcatcggatatattggcgctcctgttactactgcggctagtgaccaaagaagtatcgcggcgatcgaggcggcgcaatgtccgaatagagtaacgtaaaacgtagtagatagcaaagcaagctgcgaagcttaaagattttcaaaaatgactacctagctaatatgaactgatttttaagcatctcaaacgaaaaattttaaataatgatcttccttttttgcggaaagcttcaaa

SEQ ID NO: 104 - DNA, 1512 bp, Aedes aegypti
atgggatttgggtacttagtcgggattttgctcattgtcggagtagttcaagtgcgaagtgattcgtgtccagtgtttttgacgttatcctcacttgcgagacatatcgaggatgcgtcgctcgttataaactggggtccagattgtgaaacaccacccgattggataggactctatactcataatccggcattgtcagagtctccgccagttgtgaagatctatgtagaaggccaaaaatccggagaaattgtaacagaacttaagttcggtaaaccacgccttccgggaggatggggctacgacgaagtccttcgtcacatcccgaaacgtcgagctaagccgctttgcttcgacttctacctggttggtcacaatcgggacaacgaacttgagaccttcgactgcctcaaaatccaaccgaattggatgttcacagagcgcagcatcggcaacgtttctctgaaggaccttttcctccctggaacacactgctctgcatgctaccaaaccaaagccaatatcaaccatatattcttgaaacgcgttggctaccgacaagatctggatatctggacacagctcgtttttggcattcgctatctggacttctccgtcggctaccacccatcccacaatggaacgcgcaatttctggatcatgaatgaaagttatcgcgtgggttggatcgtaccgatccttcatgacatccgtcgctttgcgattctctcagaagaaaccttagtgatggacttccgtcgattcccgctgggattccacaaccatccggaacagcacttagagtttctgcaggtcttggagcaggagctgggtgacctgatttaccacaggccgcactttggagatgagcagaatgacgacaccgagtccttccacctgacgatcgaccagatgcgacgggagggaaagtacatcctcgtgacgtacaatcatgcggccagtttgaatgcttccgatctcgtgtgggcgccatggaaaaagcactccagttcgttcctcaagcacaccgagttgggtgagttcatgaagaatctcttctcgcaaaagcacccggatgcaccaaaagacatcggatggagcttgcacggcgtgcagggtttgcagagcagctatgtaatcagttaattaattggttcgaaattccaactaatttagagttcgtttcagacctccgacgagagttacatgatgcccaaggagcgtgccaatctgatcaatccgaagctgatgacgatgctcggtgggccgtggagtttgagggccaacgccgtcctgctggactactttaccaataccaatcttgttgatatggcggttcacaccaatcggtacaagacgttgaagagtttcggagaggaggtggtcgttttggacattcagtgatttcaacaggaagattcatttaggactataagattaaatatgcttcagattaacgatgagattttattgaggaaaagctaatttcaatcatcaagttttaatcatcaa

SEQ ID NO: 105 - DNA, 841 bp, Aedes aegypti
gtctcgcactttcctgctgtcactttctttcaagtcaaaaccgcaaccgaaccaaaacacgtttccgtgttgttcgtgccgaaattcggccttttcaagtgattttcttccggtaaatttgtgcgtagatccccgaccatcatgactgcccgttccaaatcccggcgggacaagaataaccgcatccgccgcgccaaaaacaaggtcaaagagctgaaaaaacttaagaaaaccctcggcctcatcgacgaagatgggatggatattatggaaaaagtgaaggacattaccgaacagcaaaagaagaaggaggaagaggaaaaaatcaagcaggaagcaatggaagaaattatacgcaaggaaaccaacgagctcggcctggagacggaagagtacgttgaagtagaacatcaggaatcaaaagtaaaacacaagtacaacgccaaaacgaaacgcgatcagttcggacagtatccggtgtggtataatgcccgcaaggaacgcaggaagcagctgttgatcgagggtaagatcaagaagaagcgcggccgcccgggaaggaagacgcactttatcgatgccacctgcaattggaggggttcggtttgagtttctcgagcgattcaaacaccactttctttaattgtcttggctaattatttggtttaagtttattcttacgcgctatttctgtaaactggaggaaacacttataaataaacaatgtttcaaaaaatcaaataactagtaatatcaatatccttatgattgaaacacctataactttaactatcgcagcgttgaactcctctccaattattgttttctattttgggaaaca

SEQ ID NO: 106 - DNA, 1183 bp, Aedes aegypti
ttctggtagcttccactcttgcttagcccccgtgtgcagagaaattgatagcagaagtgttgcggtagtgaatcgtttttggttggtgtggattttgatctccagaaagaaatatctgctaaaaaagaggataataaaacataatcaaaaatgtcgctacgacttgtatcatcgccctactttcgccgtttcttactggcaaataatggcaagaccgttccatcacgcgccatgagtcgtgatccttactacgatccccgaggattcactttcaccgatatgaaaaagaacccagcggttatcccactggtcgtcatcattggcgctaccgtaacgggtctgcttgggtactgtacgtacgcttcgcttacccgtccagatgttagccttaataagaaaacctacgaatgggataccatggacgtcatgaatccaaagaagttgaagatgcgcgtcttcaaccaggaatacaaaccgatgccggaactgaacgaagcactttcttaccgggaggggtatgccaagcagcaggagtcttaataagatcaccgcctagatacgaccatatatcgctgttgttgttattaataacaagatcttgaaaacaagtgttgcgctttggtaatacatatagagtcatatagcttcaattaactagcatgagcacatccgtcgttttacaacatcatcctatccgcacgcgcttatcgcttcagcagctgaagtaagaatgcacagcagaatgccgcacgagaactatcgttacttaaggtgaaacatctcggaatccaaagacggccgacttatgacactactcgcgattttgaagtcactaaatataagaaattgtgagtcaacgaagctgaacttcttattttaagtttgtcaatggtgtctgttgcttctttcgcgagatttgtgtgtttagatacataattgacgttggattctataatgtatcaccttaaaacgctccgctcgtgggcttcgatttgctgcagcagcagccagcgttagatgtttcaaaccaataaattattatacctcgtagtgtttagtcgctgttagtaaagttagcaagcagagtgcaaaatataatacagctcagagctcagtagtcggtctcactctcgattcgtgatctaagcgaatcgtgacctggtgagattagagaagcacccgt

SEQ ID NO: 107 - DNA, 657 bp, Aedes aegypti
cattattatcacaccaaagtgtgtcaaatcagtgagaccgttcagcagtttgtagtttcgcgagtagtcgaacatttgctctattcagtgcagttcaaaatgtagcaccatgaagcatcagcagtgcgtaattgatctcgcgatcgtactggttacgattccatctctaattgttgtagcgctgctgttggagtatacgatgaaccataccgactgggctgaccggctggagtcccaaattatcgtgctgggcctggccgtggcattctttgtgctctgcatcatgatggccttgtatctaacgcatcggataggatcatgcctatggaccgggcctcttccagctgatcttcaccgtacgatcttcaccgttgtgcgggatttggagagcggtccacccccggactatgataccatcctgcaggatccaccaccatacgaaaagttggagaagtacttacttctggatgaacctcctccgtcttatgccgcttccatggcgtcattggagggtgctcatatctgataagagggacttgtttgttgatattgtttttgtttggtgtgtaccgaaaacagggatagctacatttcaattagtggtacacagcgggatcttatgagcgaataaactaaacttttgatgtgcactgctag

SEQ ID NO: 108 - DNA, 1563 bp, Aedes aegypti
atgtcagggaaaacggtacttttcctctgtttgcttcaaatccttgagaccataagctctctggggacaaaaacatcgttggctctgaattgtttccaaccgcaaaaagctggaatatgtagtcttcgttttgtcaaagtgttagaaaaagatgttatcgatagtgctacccaagcaacgtcagacaaggtgatacacatcgagcagtcacaactggagtacattccggaagttttgttcaacagatttccacaaatggaaacctttcaagcgattggtgtggggctgaacaagttttctgccgatgctttcgccaaatcgccaaagttgaagcatttggacgtgtcggtcaattcgattagcatcctgccgcaggacgttttcggaacatgtcagcacctggaactgatcaatatggcccagaacagattgcacctcttcaatggaatcgaactcataggatgcaataagcttcgtcaattgaacgtatcatccaaccaacttatatttatcaattgggatccgctgaacgatttgcgtcatttagagcaaattgatttgagtaataacttgatctcctccgttacagttccaagacatgtaaaacgcattgtagcccgcaataatcacatccataaactgaccactgattcaaattccttcatatttttgctggaacatttagatgcatctagaaaccggttgagcaatatagatgttcttgcccgcttcggtaagatgacctacataaatctctcgtacaaccgattactgaatgtggattttgcactgtttaaaaacatgccttccctcgtggagcttaatctggcccataataacatattcgttgtaacgacgtctgatgttaagctcgttgcgctcgagtcggtagatctgtcaaacaacgaactgacacgcttatctgaagccgattgtaaaggattctcacaggcgaggaaactgctcttgaataacaattatttggttaaactggaggttatgaaaggtgcaagcaactttcctagactgcagtcgatttcactgaatggaaatgactgggcttgtccggatatggaggcaatgcttacagaactaggtgcaaagaaagtcactgtcaaacctaccgatgaagcttgtggaacttatcaggtcaagaaaagaggtttatgttgtcgtgatttgagcacttcctttgatgagcttgttttgttggaatcgcaaaaattatccgagatgagacaagtggaccaaagtagagcagtatcagcctcgaccgtaaaaccaacatcggtgacgcgtcagaaacaagttcccgttacagcaaacaaagaatcagtttcccgatactctgaagagatgcacaatctttcgaattcgttgcgtgagactatgagtcgtcttgttatcatcgaagcagagctaaaagcttcgaaaagtgagaaggtcatcttgaaagattccctggaccgagcacagatcgaattgaaagccctgaatgagaagctagctcgttgtaaatctactgttaatcaacggactggacaaactgtgctgattgattga

SEQ ID NO: 109 - DNA, 818 bp, Aedes aegypti
cgtgaaactgttgtgtcataaatcagaaataaataagctttatacgaatgatgttcatctcaagcaatgtgacttcccagatctgtttaagatgccctcgcttagccaaagcaacaacccgatactgctcaagtcaactgtggtccgatgctgctccatcgcgtcggtgggtggttgctgaggggaatacgcaacaatcgccgccggtatctggagctgcaaagggtggcacttggaaaccgattgtttggcctctgttgtgttgttcacagcaacgatcgtacgcggggatctttggaacacgtcgccagttgcatatcagcatcagcagcagtagcagtagtgctagttccatcggatcgactacacaatcagtttcaccggttccagcgtcagccaagaagcgaaaaatggtcgtaaaactaactgaggaccagcgcaaggaacagctgcagcctctgctcgatgccggctggaccatggtcacagggcgtgacgccatctacaaggagtatctgttcaagaacttcaacgaagcgttcggcttcatgactcgcgtggctctgttggccgacaagatggatcaccatccggaatggttcaacgtgtacaacaaggtgcaggtcactctggccacccacgattgcagtggcttgagcgaacgagacgttaaactggccaagttcctggaagagattgccagcaagtactgagaggaatggagagtaatactcaacgcatgtaaattgttgttgtagttgtattttaaccttaagatgttaatcagtcaatatgaataaaatatgtcatatcacact

SEQ ID NO: 110 - DNA, 2542 bp, Aedes aegypti
atgatggtcatttattcattctggcccatcctgagcagtcacttcttcgcgctgtgcaacgacatccagaactcggtgcgccggacaatggccgcctccattagccaaatcgcgctgatcattggccgggaacaggcaacccgcgatctggtggccccgtacaccgagttcctgatggactcggacgagatcaagatcgaggtggtgaacacgttggccgagtttctcaaggtcatcgacggctgcgaacacgagacgctcatggatcagctgagtctgtgcctgcagccgccgctgaacatgatgaactggcgcttccgcgaggccgttgcccgccaaatcatccacctggtgccgatgcacaccaagattcggaaagagaactgcctcctgtacctgaccgggctcgcgatgcgactgatgatcgacaagtacgactttgtgcggaaggccggcgttcatgcgtttgtggcgtgctcccgggagttccaaaagaacgactctgtgttcaaattctttacggaaaactttgctcatagttcaaactggcgacgtcgccagacgtacattctagcggcgggacagatcctcgaaatggaaaccatcgaggtggaaatattccgcaaacacgtgctcaagaacgtcctcatgctggtcaacgacgtggtgccgaacgtgagaatacaagtagccaagtgcctcaaggacgtcattctgctgcatgagagcttctcgccgaccagcccggacgcggatgccatcgagcagacgctgaccaagttacgcgccgatccggatcgtgacgtccggggccataccgatggctacctcaatccagaggaggattccgtagcggccggtgccccagagacgaccgccaatgcctccacgatcgataccgcttcgacatcgtccacttcgtcgacctcctccctgtcgccacccccctcatcaacggcggcgacgacgacgcctatggcccacgacggttccgacaactactcaatagaggaattcgttattccgagtcaatccgatcttgatgccatgggcgtagcgatcaagcacatcttgaccatggaagaaatgaaattgaaagagtacgagttttgagcttggcttccactgggtgtcagtagcggaagtggccgaagcgtcgccggctatccgctgttgcggcacttgctagcaaagggacacaacagctatcatcatccacctaaattcgtttgctattttatcctagttgcaattgtagtgttttcctcttttattttgtaacgatcaaaggcatgatcgttggaccggccgatggccgagatttgatacgtcgagttcgagaacaatatatcaactcgatcgtatctttctacttagagatttttgtatagagccaacaacctggaaaagtttataattgaccattagacgagagacacctttattattagctcgtaaagagggcaaattaagtaacaaatcctattttataattacggtactgtccggcacgaagtttcaaagaaatatagcttactcgttttccctttatgtccataagcaaaagtacaactttgaagattagctaaggcgtaagagttggtggaggaggaggaagagggggtgttcaatagaagcatcaacgaataaagttctataggccaattacactcccattacgaccaaggcttcatattttaatagactgctctatagaaatgactttctttttccactcattacattcaaacattcatacaaaagacacacagcacacatacgtcgtacgtacatgagtatcgccggctggtttgatgaggttgttcatgaatcgctttagtgataaacttctttagctgacgaagtaaagtcaacctctctatcagcagcaacattgaatggggaacataggaatatcttccaaaaatcttcaagttgaccaatgttcaaaatcgactcagattcaaaaagtagaagagtttctgagaacttgtgcaaaaatatcgaaaaacaaaaaacttatagcaatttcaatattttcttgaggcaaaaaaaaatatgttgccgatagaggggcaaatcccatcaagccggcccgttagagtagtaattacacaaataatacaaagacagtatagttaattaatttacaagaaaagttcagttactcgatttcaattatattcaacaaaaacagtatccaattgctatataatataaataggcagtagagcgactatgtaagcgacgcaattgacaagactctaccaccccttaacataactaaaaaaaaactagcgaaaagaacagagaacattgttcaaaaagagatatcctagagttcgacaaattccaggagcttggaatggagcgatgcgagcactcgagtaggaagaggcgctaccgtcgtcggaagtgaaaactttttgtacattttataggcagacgtgggcgcgcgcgcagtgcttcagtaatagaccccgcgccaaacaaagagcgggagagatcgtagaacaataaatgcgagtatagaagaatagat

SEQ ID NO: 111 - DNA, 735 bp, Aedes aegypti
atggaaaacaaacttcaacgcttgctactgtcgtttctggtagctgcggctttggtctccgccgtctgtggcaaagtaggcacccctccagaagacggcgaacctcagctggatccgctggagttctcgtatctcacactgtggaagtataccctggccgagtgcgaaaagcgaggcgtcaatggatcgatcatcacccgatcctggatcggtgtgagaagatgtctgcgcaccaagctggacgtgatcgcgttcaatatggactcgatgcgactggatgtggacaatcagcaggctattttggagaaacactgcccaaacctgagacagacgagtgggtgttttgatccgtttatgaagaacgtgaaaacttgcgtccaggacgataactacgagatcttcgaggctatgcggaattggatcacggacgttctagagcatatctgtgaggacaatggagcacggataaagtacgatcgcgtgaaacacgagaagtgtacggccgaattgggccaatacgtttttgaatgtgctgcccaaaacattattgataagcagtatagtaatcgtaagtcgctttcggaagaagactgcagtatgatcgcgcgtgccaaggattgtcttgtgatcaagctcaaagaatgttcggtattttcggctgccgctcagcttttctacgataacttcatacagatcacctcctgcgctgctgccgccgtcgatgacgatcattga

SEQ ID NO: 112 - DNA, 720 bp, Aedes aegypti
atgaaaagaacaatcctgctacttgcacttttgggctttgcatttgcccaaaggcaacccgcgagggatgttatcaccaaattcaaagaggttgctccacagtacttggacctgttgaaaaccggagaaacagaattgaacaaaatccgatcagaaacaactgacttgattgccaatttccacgtggatgtcattcaaacaaaggagagcttcgttgtggacgccatcagcagagaaactgcaatgcattttcaaatcaataatcagccagaatcggttgacatcgtctgcttgggattcttgaatacgactgtcgatatgagcatgaacctcgctggcgttggattcaccaattgtatcaacaacgtggacgacgccttcaatggactagttggaaactatttcaacgtcctaggagttcaggaaggactgctaaatgaacttcgtctgctggatgttttccgtggagataacgtgttctacactccacaaaacatcatcgacaagctgaacaagaaactgagcgagcagaaaatcaatcccgagacattttcggaagacttggaacaggcggtggagaatctgaaaaatgatttagaaaatattctcaccgcatacggtgggtgcatgacccaggcggatcaattgctgaagaacggcgtggatatgatgatgatgcaactcacatttagctgtctgggcacggtcattgttccgtaa

SEQ ID NO: 113 - DNA, 2588 bp, Aedes aegypti
gtccacggaccactggttgggaaactctggataagaatgaatgctgcaaccggctgtatgactaggtataacgagactctcggcgagaacgcgacgaaaacaaacgcgtgcgcacttacgcgccaacatgttcaattgtcgatgaggtggatgcgaggcaccaaaccgtatatccaccataaataggtctctcacgctagacatgcaatgcagtattattcccaattgtatgggtggtgaaaattactgaggtgttccattgatggaattcaatgactatcgttatttctggaaaattggtacttcaatgacaccgcacttttcggggagatcctgtagtcaccgtgtgtaactgtagtgtatcgtcgaggaggagtacagagtccagcactgaatggctattcttatcgtgcgactttcgctagtgtaggcgaccaccggccgcgtcgattgccaatacatacatttcggttgattagcatggccatcagctcagccaccagcttacagccaagttcggatagatagtctaggtgcaaaagtcgtatcgcgtcttcaaatccaccgggttgtgtcaccgtgtagtcatcgtcattgcatagcacactcgtgaacgtttgctgaattacacgcgtatcgcgtttgccgaggcgttggtttgctcgttggctttgtatggaaatcgttgtatttgttgataagcgcacgaaaggcaagcactgtctatatgtaactgcggaacttggcatttggaagctcattcagtgtcgggccggaaactgtgtcagacggtcgcccggttttatcccttctattcagattattattctttagctttgttgattgagtgcggtgaacttttggtagccgaatcaaaaatgtctgcagaagagttgaaactggccgacgagctattcgacgacgccaagtaccaggatgctgtcgaccttttggacaaacttagcgaaaaggacgtagcggaagtgcagtggcgttttgcgcgggcagtgttcttcgtgtcgaagcaaaccagcaacaacgatgaaaaggcaaagcttgtaaaggaagccttcgggtacgctcaacgagcactcgagttggacgacaagaactttggagccaacaaatggtacggagcaatcctttcggagaaaagcaatctggacggagtgaccgaacggatcaaacagcttgaaaacgtgaagaaacatttcaccatagcccaggaatgcaatccaaccgatcccggaatcttgcacatgttgggccagttcaacttcaagctctcggaagtgaactgggtcacgcgtaagctgatcaattcggttgcagcgaacgcaccaacggcatcgttcgaggaggcgctggaatgtttccagaaggcggaaacactcaaacccggtttctacagccagaaccaactgtatttggggaaaacctatttggcgctgaagcagaaagataaggcccgtgagtggttgcagaaagcttcggaggtcgaagttcgcagcgaagacgatcgcgtgtgtcgtgaggaagctagtgaagcgttaaaaaagctataattcttctgttgtttcgtgcattgccatatgataatttatgagagtaggaacggtgtgatttccatttagcgtgcgccagtgtgctttaaggcagcagttaatcaacgctgcgagtcattgaattctagttatcacacagctgagagtgagagtttttgttttgtcattcttcagaacgctaatgacttaatttctcgttgaattctgagtgtggacagaagcaaaccggatccgtgagaataattattattggcgctgatggtgctttatctttatcggttgttgcgcttgatagatgccatagtgataaatacatgagtgatattccctagaagggcaaatccggcttttgtttcagtaatgaatgcctttgggggataaaaggttgtaggtgcgacctctcacccgacgaaagaatgggtctggtttacaatccctttcaattcacaatctaatctacacaagtggtgtggaatctggggttggaaaagttgtctgatatcttgatttactacgcgtcaattatctatcactttactagtagataaggaaccttaacgtggaaccgctttattatttgtttgtttgttttttttttcagcttgtttatcatcaatctaaatttactatatcaatccatcgcatctctgacacgttgttttggtctaccctttctaatttaaaattcatattgttttacataaattaattccaatgggtataattacagtgcattttcaaaatgttttaacatttttatacgtttgttatatttattttacatttatcaatcgaagttgtttgctggtcattagggagaactgatgttatctacatatgttacgtaagtaacaatagttcttccaatagttcaatactccatttcaagggattgagaattcaatcacacgtaattatggttacataacttatatatccacaaaaaatatgttgcgcataaatgttcttcgagaggtataaacaatcatgaaaaatttcaaaaatattgaaaatcaggttttt

SEQ ID NO: 114 - DNA, 2075 bp, Aedes aegypti
atggccaacattggaagggacaacatgctgaacgaagaacaggaatcgtcccaatcgaacagctccaatggttccggagctcttcaacagcaatcgtccggaggattccagttgaaatcgagcatccttcggcagccagcgactttcggatccggggctggtgctggcggaggattcggtggcatattcgggggtagttctgccgggggatcttccggaccgatcaacagcttcaatctgaagcccagcgttttgaagccttcgcacttcgggggaggattcgtaggtggattcggggacaagaaagacggtgacgaccagaatcaaacgaacagcaatagctttgccgggacgaatccattcctgaagacgcaggtcagcgaagacgacggatcggattcgaagaaggacgaggacaaatcccgggacgggacgggagaaaacggaggagacccgttggccaaattgaaccgagcgacgctgcccaagtcgaatctgtttgccaacgtgaaagcaatcacacagaacacgggcttcgtgttcggacagaatgtccacgagcgggtcaccggtgataatctgcagacggattctggttcggttccgacggccgggctgtcattctccagtgctgtggccaccaccaacaacagtaacgattcgtcctcgtcgaatcagggcggcgtttctgccggtggtcaaacttcagcagcttcctcgggagcaagtggaggaacatcggtggctccctccggtggcaacaaaccagagggaggagacgaaagcttagaggaggctgcccgccgttacgaggaaagccgaggtgccctgaagaggaagtttgacgaagtggaaaccgttactggcgaggaagacgaacggaatgtggtcgaagcgaactgcaagctgtttgcgttcgcgaagagtaactgggaggaacggggccacggaacgctgcggctcaacgataaggacagcaacgagtcgagggtcgtgttccgacaggccggcaatctgcgggtgctgatcaataccaaggtttgggccggaatgacggcggaacagtccagtccgaaaagcttgcgtctgaccgccatggacaacaacggccaggtgaaggtgttccttgtgatgacccgccccgaggtgatcggcaaattgcacaaagagctttccaagcgcatccaggtggccaaggagaacgccccagctgaggtggattccctgttacaggacgacgaagccggtaaagagaacaacaacgacaatgctgccaccaccaccactactagaccgagtgattgtgaagacgattcgacaacagcagataatgcaaccagcaaggaaaccgaaacggaagaaccttgcgcgaaaaagcgactaagttcgtcgtcttaagccaccaaccgtgtcacttttcatcaagctatctattttatctatcgtatctacaaaccaacacaaaaattaaggcaagtcatccgcaggatgatagaaaagaggtcagcactacccaatttgcttagatttccgctcaaaaaaaaacacatacaaaatggttattcaattgcatatactattgaagggtaaaattccttcccccaggatcgagaagataagatttcgggctacgagtttataaatattccactgaaaaaaaaatcattttcttccttatttccaattttaatgtgtcctaaatagatgttgaaattgaactgttcgcatgcagagacggcatgcatctcaaccacagatattgggtttgtggagaactttaaagaatctgctgccctgagcaagtgggagagatataggaggcgaatggcgacatggaactgtaaaaagcaatttcgatctgcgcggttaatcggagtgagaattgagacttcatctagagcgtcatgtcgactgtcgtcagtcaatcaatgctcgtctttgtcgtcgtttaaattattgatactactactatccaacagtagaagtaacattagtaggttcatgtttgtgtaaaaaaatgtaacgatcaaatacagtgaaatacaacaagtaacaatgtggaatgaaaataaact

SEQ ID NO: 115 - DNA, 813 bp, Aedes aegypti
atggctcacaaagtgttcctacttgtctgtgcactgatccagctctcaactgccgcggttgaagtacccggcaagctggttaaaagttcatcggatggaccttttgtagcatttgcagcagctacggaaccaacctgcgatggagtcagcgtttataccacatgtaaggactgtaataacgtgctagtttgcttgggttcaacacaaagcacgaagaactgcactgcggcgactccatccactcctttctgcgtcaacggtgcatgttctgcgacatatgacagcgttgcaggatgtactccttctggagtagcttgtaccggagttggattctacccagacgcaaaaaattgtcagatctaccactactgcgaaggtgttgatgaggaatcttctgtgtacgagtgcccgccaaactatgtgtacaatgcggaaaccactctgtgtaagcagaagatctacgccacggattgcgtaacggtgaaatgtgatgagaacaaaattttcgtcagctatggcactagcaagaaatattacgccttctgtcagttcgaaaacaatgttgccacgagcattcagttgctcaagtgtccggataactgcaactttgatggaaacagctgcgtgttcaaatgtccaggaaccggtaactacgcgcatgcggatccagtcaagtactaccagtgctactactccggagcggtgctaacattcatgacacagagttgccccactggaaagaactacgacaaggacttgcgagtgtgtgtcacaccaaaaacgacagctgctgcaccaacgatcattgaataa

SEQ ID NO: 116 - DNA, 624 bp, Aedes aegypti
attgatctcgttagtcagtctgccgttgactttcagttcaatcgctgtaagcataatgcagagttcgcgtacgattctagttttggtggtggccattttgactacggttggagcggtcccagcaggctttgccgatgtatccgatcagatttcggccacgatcgaggcggagaaaaatgtcggagtgttcaccgttgggaatcaacttccgggaccaagtggcaaagtgggtcaacaactggtctacaccctcggacaacgggtcgtaggtgatcgtctggtgtcgaccaaatcggacagcaaacagtggccaacgctgcaggacgttacgctgagcttggcctatccacagtccggtgttggagctgtcgtgacttacgtccaggtgatcgtcaagcagagcagcaatcttggcaaagggtacgtcgtgtccggaggaatcggtcagcgattcatccatttgaacatcgaagcctacagtaccaattacttcacttacactgttcaaatatttggattgtaaactgtattagtgataagaacttacctcgtaataaaatcccggattatatccggcgccaccgaacaggaagagcaacgcgtggccgctcagtatggtgaaca

SEQ ID NO: 117 - DNA, 504 bp, Aedes aegypti
atgctcaaagccatgacttcaaatcgttgctggatcgcagtggccatcgtttgcctgatgggagtggcagctcaagccggtcccgattttaggaccaagcgggaacagtatgaccacagcaagcaaatgtgcggcaagattcttcggacgccggctgccgacttggagcactacctccgttcggattatccggaaagtcacgacacggcctgcttcatacggtgtgtttccatcctgaatgggggatacgatgatgagacgggagtgaacatgggtgtgctgttcgagacctacggaggaagtttgaccaaggaggaatacgccgatgaagcaaaggaatgcctagcgttgcgggacgaggtcgagtgctactgcatgaaggcgtacaaaccgattctgtgcctgaaggagcagttcaagaagcggaatgtgttgtaaacagaagactgaataaccaattagttgattgttgaataaatgagttcaataggaatattacaaaga

SEQ ID NO: 118 - DNA, 738 bp, Aedes aegypti
aacgtaggtgcaacaagatttttaacagtcggtcaaacggttgcatcaacataaatcggtttgcctaactcgcgagcggacctgattttagtcaaatcgtctgagcgtgtgtgggctgcataaaagaaacggttcacggtctcaaagtcaagagagcaaaacgatttctggcacgtacaaaagcttagctgctcagtcgttaacagcattcgtcagtgagaatacatttttagcgaaagaagtttgtaaacgtatcaaaatcaattatattaataatattagtttccaagtaaattataatcaacataagaaacaatcctcaaaaatttgctgcgtagtttcattgctctcaaggcaacagaacaaagaaaaacaatatgtcggagctacatttcgatgaatacgagaagtacaactttgagttcgataagcacatgttttctggccattcgggaaagcagcgaaccaagaaggaagctagtgaacacaccaaccattatgatcccagtggccactccaggaaaataactactaaactgcgcaatactgagcagaatcggaaagacaaatcgaagaattaatatttgcaagccaacttaaacttgatacattttcacgatgaaataaaatattgtactgtttgggaattaatttgaatacatgttggctttgtttaaaaacaaatccagatttcattctataataaacatgaaatttagattgattaactaccatttt

SEQ ID NO: 119 - DNA, 2040 bp, Aedes aegypti
ctctaattgatataggtagtttcaatagaacgtaggtaaatttgagtatcctggattttaattttttttttattatgttttatttctttttttgattgcaactatgagtagtattactatgaaaaactattcatgtaaaactaaagaatagaaggaccttggacttctacataatctactttgtgtatgtttttattaaagattcttctccggggattcgaaagttcgtaaaagaggctacgttttacataaattgaacgcttcatgacaaattccatgtaaatacatgtttttatttagcgtattgctttcaccgagcactttcataggtaaatgtatttctatagtgactcaaggtgaagatgaaacgaacaacaataacagaaaattgtgaaacccagcaatacactgttcacaagaaagttcctcattatcatattctcaaaattattcaatgccatcctcaccctcagtaatgtgcaatctttcaatcctaatcagtaagtctgcgagtaagtcaggaagtatataaatggcgaacatttcacaatcgctacatttaatcactgtacaccggtcgaactggaaacatcaataacgtctcatcatgagtggcttccagttattcctcgcgtttgcggtagtggcttcgattgctgttacccatgcagcaccgcaatcagccgtggaagctctgctgaaatataaggatgaatgcattgccatgagtggatcagatgtgggttatcgtcaaaccttggtagcgattcccgaagttagagcctgcttattgaaccgtatcgatgtcttcgagatgaaaggggacgcggtgttgttatctgagtcgagcgaaaggagaaaggatttcttcggcaaatattgtccgaagttcaacgaatcggtagactgttttgatgacattttcgaaggaatcgcaaaatgcacgggtgaggaaactgagaagatagtgccagttttcaaggatgtggcctatggcgttgttgatctagtatgtgaaaatgatggacagtttgtgttcgaaacccagaaacccgagttcatggcttgtttaggaacgctcagggaaagcgttacggaatgtaagatttcgaacgtgaccaaatcaatttctttgatacattacggcgaagagcagtgtcgagatgtggaaaattcaagagaatgtgtcaaacaaaaggttgatacttgcagttctcctgcggtttataatattttcgaggttctgtacaatagaataatgaaggcgtcgaattgccatcagtacacaaaaatagttgagctatacgataacaacattgatggtgcttcatcgaatgacgatcctggattcaatggataaatctaaactatactgatgaatggataaaacaataaacttactgaagtttccatccgcttttttttgcattgttgtgtatttgtataaaactcataacagctcaacacagcaccgtctgtcctaaatctactctgttaatataacattttcccacacaaaacgttaaatgaattctaccccattaacccgagtattattacttcgattttcatttccccggaggtaccgttaccccaaatactgaacctgcaatgtttaattgccttgtatcattacctcgggctaatgtgattcgaggaaatggatttcgggattatgtcgttcgagggaataggatagaatcttctacagataccaacggagccaatcttatgagtcatctcaattctgagtcatgagcgactattgtagagggttataaaaatcatgaagcaaagcgtgcttgtacaggtttaagctatcataataattcaagttaacattaatctacggatcggcttactcctcattaccgttaattagtttcacgtaaaaataaattatccacccgatgtcatacaaaatattaacttcttcccagtggttatgttttcggtggaaatggaactatacttacaattatttacaattacaattatttatataatatatgttttagggccttccttagccgagtggtt

SEQ ID NO: 120 - DNA, 306 bp, Aedes aegypti
atgttcaaaatcatcgctttggttgcctgcttggccgtcgttgtctccgcccagtattacggagaagatcacggtcaccacaaggaggaacatcatgcccatcccaagtacaagttcgaatacggtgtcaaggatgcccacaccggagatcacaaatctcattgggaaattcgtgacggagatgttgtgaagggtcagtacacccttacggaggccgatggtagtgaacgcatcgtggactacaaggctgacgaccacaacggtttcgaggctgtggtgaagaacgtaggacatggccaccattag

SEQ ID NO: 121 - DNA, 1666 bp, Aedes aegypti
taaaactaattttatgaaatgttaaatgttatttcataaaaaatcgttattgcataaactgataaagatcaattaagtaattttatatgacaatatttgaatttcaaaggataacataacactaagttgtaaaacagtgatcaattggccccctgattacggtacctaccctagcaacgcgagcggctcatgtttgggagcagtagcagcattagagcatggggcgatgttttttttttttcgttggcgtcttcatcgttgttgttgatgttggttggaagacccacgatgatggtatggcagtccgttggcttagggggagaagatgttgtccagcggtactctgtatggcatagcagcagcgagtacattctccggtcgtctacaagtctacaacggggatgaaccccaaaaccgtacaccccgaagcacccagccagcgtcgccttcttcgatggcttcggcgacgacgtcgccgccagctaggatcatttgaacggtgtataaatatcatttgcaatccaaaaatgagcaacagtcttaattgtgcattgttccaatcgagtacagcagtagtagccagccagtagccaacagcattcttaagaacttaagggtagctgttcttgtccgtggacttaaccctatagccaaccatgaaagtgtttgtagtgttaagtgtcctgttggtggccgcttcggcgcgtccagaacctccggcacccggtggctatccgtcctactcggcgccttccttcagctcgggcggtgatctcggaccctacgcttcgagccaaggtggtggcggcggtggttacaactaccaaccagccacccaggtcgtccagaagcacatctacgtgcacgtgcccccgccagagaaggaagaacccagctatccccgggtagtccagtcggccactccccagaagcactacaagatcatcttcatcaaggcgccgacccctccccagccaaaggccccgatcatcccgccaccggtccagaacgaggaaaagaccctggtctacgtgctgcacaagaagcccgaagagccggaggagatcgtcctgccaacgccaccaccaaccaagcccagcaaaccggaagtctacttcatcaagtacaagacccagaaggagaagaagcccgaatacggcccacccaagcaggaatacggagcaccaaatggcggagccggtggcccatactaagtggacagctggacccggacacggacccagacccggactgcgaccccgacctggacaccaaccgcaacggaagcggccgccctcgacgacgtatgctgatatcgatcctgatgatactgatgttgctgaacaactacaaacgcaaaacatgctgaccaattggtgcgaatgtgcgagcgagagagcgaaccttaattccattttaattcttctgttcctagcctgtaagattatgattaatcctgaactgcgaacgcgttttggtttcagcaaaaccgtgtcgcagttttgcgctttttacgtgtatataggaccgtagaaattcctatgcaaacatctgttcttagcgagccatagtcgaatcaatcattattatgttatttattacgttattgcaaaagcatatctagttgaagtaaaaaaatctaacggtgacaaatttaagaaaaaaa

SEQ ID NO: 122 - DNA, 942 bp, Aedes aegypti
gaaagaacttagaggcgggtgtcgtctgtcatttatggtagtatcagcatagaagacgtatcaaagagcaaaatgcgtaggataataggagtagcgctgttttcggtgatagctttaagcatagttcccacgtcagaagccaaccgctgtgctggaaggcctgacggtttctttattaacgactatactgcatgtgaaggctttttcacgtgtatccgcgagaccccagtgccaggacgttgtccagaaggattctatttcaacgagaatagtcaactgtgtgaccatccatggaatgtcatatgcctgctttgtgttcgcgaggaaacggaaacggaaactgaaccagatacaaataacgtagttacggagtttttcccgattgaaaatgaatgccgcatgtacacgctctgtgtcgacggcgttggtttcctgagagagtgttcgccgggtttgatgttcgatcgggaagctcaacggtgtgatctggaggcgaatgtacagtgcgttgaaagtctttgcccgaacagtgtcaacccagcggtagcatctatggtaccggatccaacggattgctctcagtacttcatttgcttcaacagggttccgaatggaccacattcgtgcaacactggtctcctgttcgacccgatcaccaggcggtgcgacttagaggaaaatgtcgagtgtgaggttgtcacggaaccaccaacgcttaccgattgtccggcctcgggtctgcactacattccagtggaaggcgaatgttcgaacttcttcatttgtctggacggtgacaaaatcggcgaagaagtctgtgccgatggacttatcttcgatgtcaacctgagaaactgccgaccacgaaccgatgaaggctcgcagtgtattaccgatccgccagccgaagtagctgcgaggctctttttggggtacaattga

SEQ ID NO: 123 - DNA, 963 bp, Aedes aegypti
atggtcttcgaagatatcacaaaacgaaactatgaaatgaaatacactcagctggacctagatgaggccaagatagtgtatgccaaactagctcgatggcacgctacctccatgtacctatccgataaggtaccaatcatttcgaagctggacaatagcctcggaaaattgatggacagcgattttagcgagatctggattggacacatcgctaccttggccaagctgtgccgtggatggcctggctacgaatcgtatggcgaacgtttggatcacatgaaaggattcattctatccaaacttaaggacatctatgaagtgaagccatccaacttgttcaatgtgttgaaccacggtgacatgcattccaagaacatgatgttcaaaatcgaagaaggtgtcacgaaggacattctactgctggactaccaaatcagctcctggggaacccctgcaagcgatatcatctactcgttgtataatacgtgctcgatagagacaagagataatcaccgtgacgagctgatcaagttttaccacgatgagctcacagccacattgaacaaaattggttatctgaagaagattcctacgctgctagatgtgcacgttgaaatcgtaaaatgcggacacttggaaacattcctgtgttgcacgttcctccccttcatgatactatcattcgatgagatgatgccagcagcagaaaacccggaagaaggcgtcgaacttgactttgccgacaaggaaaagatgggcgaaatgatgctgaaggtattccagcacccgaagtatgtctctctcatccagcggtatttgccagtattgctcccacaaaggatacctagatcaatgaacaactttatgtagaaaagggagatattatggttgcataatatcagagacatttgttgttgagtatcgtttttgacaaaaataaatcggatcagtattcttaatttt

SEQ ID NO: 124 - DNA, 1209 bp, Aedes aegypti
ttcttatatgcatcattgtggtgccatactcaccgcaccactgagcaaacagctgtaatttctcgcgctcaactaaccagcgtgtgattcgtgcgatgaagttcgtcacttattgagcatttaacaagatttagaagaagcgcctctgtgtttgggtgtgctcacgctctcactataggaacctaccaaccggtggacgttggttggggtttgttggtagctaatgatggggcaaatccgcgtgtgcgagttgccgtgagatgcgcttgttttctctcgcagcgacggcggcggcgtgaaggagaagcaacaacagcaaaaaaaggtggcagaagtttgatttcggcttattctttcggctcttctcagaggcggtttgtttattgtttgcggcgtggtgcgcttgatggcggtatataaacgtttttccgactccgatgggacatcattcgaatagtaggacttgtccttaacggtgtcgaaaagtttgcaacaggattcgctggggttgttctattgagaagatctacgagaagtcaggatgaacaaatttgtggtctttgctagcgtgttcggagtgctggtggcagttagtgcggttttgggggcaccagctccccaggttgatgccggcccaagatcttcggcgcaagatgtgcaaaccgtgcgatactacagtgaaaacaatgggctcgatggttacaagttcacatatgaactgagtgacggtcaaatccgctccgaagtgggcacgtacaaggactcgaaggatgccgatggtaacgacgtcaaggtgctgttcgtccagggatcctactcgttcgttggtcccgatggtcagacctactgggtgaactacaccgccgacgagaacggataccacccgaaggtgggaactggcccaaccggaggtatccaagcgggacaagatgcccccatcaacggtgcgtaatccggaggggagcgagcctaattgtcgacgccacagtctagccttagttgattctaagtcaatgcctacatactccgctgagccacaacaaatgagatatagaatgcgagattttcctattcggataggttagtttcagacaccgtaggatctagtgtaaatataatatgttctagtgtatacgcgcaacgagtgtgttttctctcgtagcaataaataaactgatgatcgagatgaagatggagaaagaagtcgaa

SEQ ID NO: 125 - DNA, 591 bp, Aedes aegypti
gtctctcaaccgttaatcaagccaacgaacgcaggaagcaaccatgaaggttttcatcgttctatcggtggcaattgccctcgtcatcggggcaccagctgacgattccaacaacgcggaaaatggcaaaaaagacaaacgtggactcgtggaaatcgggcacaactttggctacgaagaaccgcttctggttgatcctcttcatacgacacatgtagccaagcacgtgacggttaccaagaatgtgcccgttccgtacccagtagaggtggagaaacacgtcccagttgcagtgaaggttccctatcctgtccactatgagaagcacgttccggtggttgtggagaagaaggtcccagtctacgtcgagaagaaggtccatgtcccagttgatcggccagttccataccccgtcaaggttaaggtccctgtggtccacaaggagtacgtcgaagtggccaagccctatccagtgcatgtcgagaagccctatccggtgtacgtgaaggaaccggtatactacgaacaggctccggtttacgtgaaggaccactactaccagcacaagaagccgtactacggttgaatgag

SEQ ID NO: 126 - DNA, 584 bp, Aedes aegypti
ctttagaaagaacttcccccggaattcataacgcgcatcttcaaactaagtgaaagagttctaggataaatcagatcaaacgttgcaacatccagtcgacatgcagctgttcaagaggaaagcattctacttcgcattgcttctagtcgtactaagcatgtgcttagaagaaaccgaagccagacgtaaaatccttcgaggacggcgtaccatcacccgcactcacaagcgtggaaccgcaatcccggcatgggccatcgttaccttggttggaattgccaacattttactcggaggacttgcctatcttgcgttccggaaacttgtcctgcaaacaccgatcgagaacgtcaattcctacacgccagcgatgatgcaggacgactcgtaactttgttctgagatgcaatccactgcaaaacaataggttaagattcgttttaagaaatacagagcatctcagttgcgtccgtgaaaggttcgatatcttttgagaaacaacatgtaggcatattgtctgtaacttttcagaatccagtcaataaaccctgataacacaatttcatgaaagtagaacgtcgatc

SEQ ID NO: 127 - DNA, 1849 bp, Aedes aegypti
acagcaaggaaaactcttcattttagatttgcaaatttgttgctgaaagtgtgttcgactatgttcatcgtttgttagttctacgaatgttaattcaattaaattcaagagaggtgtgattcatttggtgacacaaatcaagtgtctaacaagtattaaaaatggagaacacatcgtatgggataaatgtggccaatcggtacgaccttttttcaatcgacgatgaaggtgacgatccttttgaaactataactcaaaagaagcaaaaaaatcaaaagaaaaatcaggccaccccgtcaacgaccactgaaaataccgtcgctaaatcggctgcaaaaaaggtaaaaaacgcggaaaaggagaacaaaaccacgcaaaacaaaactattaataatgaaaatcgacatcctgacaaatatgaagatttaaagagttctgccgcaatcaatacttctaatttacataatcagcgtggggaaaagcatggtattaaagaaacccaaaaagataacattcgcacaacacgtgaagatggaaacaaaaatggctacccaggaaaaaatgccgaaagacgccagattaataagagcaactatgcaggtactgaaaaccgcgaagacaaaaataatcgaaagaatcgcgaagctggcaacgatgaaaatggaccccgcaaatcacagagtggaaacaaacgttttgatgttcgcggcaaacgagaatttgatcgtcaatctggttctaataaaactggcgtaaaagcggtcgaaaaacgtgacggaactggctcacataattggggtagtgctaaattagacgcaaaggagttcaacaatttccaagaagagtatatgccacacgaagcggaagaagaaaagggacaagcttcagatcagactaaggaagaacaaactgagcaaagtgatgctaagcctgttgaggaagagcttaaggaaatgacattagatgaatggaaagctcagattgctgctgcaaggtcaaaaccccaatacaatataaggaaagctggagaaggtgaaaatgcagctcaatgggataaaatggtagcattagataagaaaaaagcagaaacagctgaagcagaagaaaatgagactcagaaaactggaaaacagaaacaggtccttgatattgaattccatttcaacgatggtcggcgtggtggattgatgggccgaccgagaggacgaggtggaaaaggtacaccgagaaatccaggaagacgtgagggagagaaaaaagatacgaatgagacacgtgaaaatgaaccagataaacgagaccggcgcactcgtccaccaccaacgaatgatggtaacttcaaagctaaacaaagtacacgtttcaataagaacactgctccaaaagttgacgacgagcatgattttccttcgttaggctaaacattggcttctaagttgcagcatattgatggtgaagaattgtacgatacatttcgtaaacacttgcttactttcagaccagttggtttctttacagaaatattcacaaaataatgaaaatggtgagaataattcatatatcgatctatagtgctgtaacatgtaacaacaaaaatcttcaaagaaagaataaaatactaagtacattgaacatgtgtattactgtatctgaaaaaaaaaaaaaaaaatcaaatagattgtcgttgtttctcccataggcatgcatgaggaaatttgcaattccaaatagaagagagaaccgaagcattttgtattattttttcattgaatagtattgcgcaaaatgtgtaatggcatccgtgtaaaattccacattttttcaatttcataaatttagtcgagtgttg

SEQ ID NO: 128 - DNA, 2947 bp, Aedes aegypti
ttggggatgagatctgacaagcgacacatctggtcacattactttagcaataataatgggttcatattacctgcataaaattccgttgtttattcaaataattaaaaaaagatgacatattatcgttttgaaaacgtgaatcaatctgctatacaaacactatacaataattgtttcatcatttcattcttatttcttgctagagtagaatgctgcaaaatccaaactgggccgtgaatctcttggccaacagattttttctacgaattgagaccgattttgttgttaatgtcaaatatttgcatgtatcgcttaaacgcctgaatataggcaacatcagtatctcaaaaagtaatccttacaatttaaaaacaatatattatatccgacaacgattgatcaaggtttatatcaatgtccgaatttatgttttgtatgatcatttgccaaaatattgaagaaaactttcacgtctgcgggttgcggagtgttctcgctatttttgttccttcacatgcttccaggtataggtattaggatggctgcgtggtgtagtgtattcaccattcaacctttccacattccgtctctgtgatgtgttgtcccatcttctgttcattgtactgaacggtgttattcaaaacatagcacattggtgttggctggtgaaaaatccaagatatattaccggaagctaagcagtgtagttcgaaaactggtgcaaaatatttccaattatggattacgaagaattgacagtggttgaggagcagaaccaaccggagagaaaggaaagcggcaaacgaggacgtaaaccaggccgcaaggcgtctactgagaagatcgatatgaaggcaaagttagaacgcagcagacagagtgcacgggaatgcagagcacgtaagaagctgcgctatcagtatctggaggaactggtcagcgatcgcgagaaggccgtcttcgagttgcgccgagagctggagaaactccactactgggcgttggaagtggacgctggtcgtttccccgagggactgcaggagctgctcgaggagctgggtgccctgaagcaggagtaattgggaggcaactcgaccccgcgatggttcttgatgaagttgggaggctttaatttcttcgtatcagttatccgagattgagtttcctccgttattgagctttagtagtagttatttatttggtttaaacgcgaatcgttaaatttaaattggtttgataccttatgcataggcgtttcgttaaaagaaattaaccttcgttagtcacgtgttaattttaggttagaaattattaggtttatgatttcgtttttatgagttttactataaaaatccgtgaaaagaaaatataaaaaaaaacataaaatttaaaaaaatactacaaaaataagaatgagtaaacgaatatggcttaaatctaaagaagttacctcaaataccgataagttaagtacaatttagtggtacaataactgatgatatattatgaaccgaataaacatttgatgtacataatctatttcgatcaccacaaacacagtgattcatgcaattagtactgcagattctgcgggagcactgatacgaacgtgagtagatccacacttaatagagtttgttattcgattatcctggtagaactccactgattaaagttcaatattaataacctgacgtgtccattgtaaaattgcaaaacatacatatttaaatttgctgaattgttaaattgctgcaaacttccgggcggcacacaagttatataactatttttgtaaaacagattttggatgatatcaataaacaacagcatggaaatgctaccgctaatctatttagtctacagtttttccaaatgacaaatccctgaagcaatacatacaatatttaaataagatcttcgatgtgtttcgatattttaaacatattcctgttctttgcaagtgccttacatgcttcaacgaaattaaatcccttcttaaaagtttttttgtgtgtcgaaagtttgtttttaaatgaagataaatcaaagccaaatttcaaatttccaagaagacaactctggagaaaccaaccagccgttccgctgaaaatttcttcgattggtccccagttgcgagcgaacaatcgatcaagtttttatctagaacggcttcctggttccccaggaaagtgcgcttgaaaatttgaggtgtttcttcgatttatcttcaccttaagtgatactttcgtgcatttgtgcaggatttaccctagagattcagccagatttttgaggaaatttccacagtaattcgtagaataatcttctagatcaatatctatgatccttaaacatatttgtaaaagtctcttgtgaaatgtttgacggattctttgttaaatttatgtgtatcgctgttgatattctttggggaactctgcgtaaggttcacttttctgaagtatctatccagattttctgaagggatcgcttgagcaagcttgtgttcctagtggaaatcctgtgagataaatatcagaaagcagcttgagatatatgataatagctaaggtttccagataaaatcgaggatgtagctagcataggattttgatttacggtgagtgattacaaacaagagctgcagatcccgagaagaaactacactgaaactgcagattttgtacaactgcgattcaaattacttggtaatcaatcattaagtgatttctgaaaccttaatctaaagggaattttatttcattttccttcgggtagatgattaaaaagacccaatgggacgagtcgccattagcgatggaacaaatcttccaaatggcaggaaacgtatcttagcacagtgattttttgccgatttcgtgatcgaagagcgtctaaaccgttgattttagtgaaaaagtttgttcagagaagtttcttgatt

SEQ ID NO: 129 - DNA, 844 bp, Aedes aegypti
atcggactgaatggaaagaatccatctcaacaactcaaaaattggcatcccgcacataacgcctaagttggtaaaatgaactcacttcagggtactttccctgtgcgtgtatcgcttctgacagttgtccataatgtcgacttttagtttgtcattttattttattgaaaacaatgccggtttattcaacgtaatatgatgttgtgcaatgtattttttctattatcgtaaatcattaaatcacgttattcattactaattttaataatttttatcatggggaaagttttatcaatcgctgctcggcaagtgaatcgattcaatgtcgagagccgtgctgaaaaagtgatatcgcagtcgaagccaaaaccagctcctaaatttcaatcaaacctaaaagatcttcagcgagttttggatgaaaatccggatttgctgcaggagctgaacaaaaagcatgcaccgctggatgataacttgaagcgagtgttcgttacgtcaactgatgtgattccagagccgacccacaaagatccgagcaaaccgttgccgttgaatcgaaacgccattgacgaatttgagtacggacatttggaaccacaatcggtgcctaaaggacactgcacattgcggcaagcaattgaatttatttccaagcatcacactgaaccgcaaatatggacgtcaagcaaaatagcgactgaatatgctatgaaggaagcgttggttagcaatattttgcaacattttaaaacgttcgaattacatataccagataaaaccgccgagaagcggaaattattattgaagtcggatacaaataaaactcttgaatagaaatgaa

SEQ ID NO: 130 - DNA, 548 bp, Aedes aegypti
cacaaaagtgcaagtgcagtttggtatcgtttgcttccgatttctcacggacacaccgagttttgtcttggtttccactacattgttggttgtgtaatttcgataaaatgccggccgatatctggggatttgcctacgcagcaacggtcgctgccggtggcattctaggctacgtgaaagcaggttcggtcccttctctggcggccggcgtaacgttcggtgccattctgggttacggtgcattcctgacgtcgcaagatccgccacgtcctctgctgcaggtcggcacttcgctggtgctggccggaatgatgggagccagatgggcccggtccggcaaattcatgcctccgggtattgtttgtgtgctgtcctgtgccgtcttggctcggggcctgctgtttcataatcgttatctgccgatgattggcaagagcgattagaaggggggcgggattatttgttctgcaacgacattattgatgcattatgggtggaggtatttgatagtaagaaataagatgacacaaattctagacttattaaaa

SEQ ID NO: 131 - DNA, 471 bp, Aedes aegypti
atgtatcgctctctagctctggtagcccttctgttagccgtggccttcgcccaagaaggaactcttcatacgcatccttgcaccggtggactcccacatcccaactgggttcggatcgagggatgcacccagatgccctgcaagctgatccgcggccaggacgtcaacatgtggctggagttcactgccctgtccgggttcgacggtctcaccaccaaggtcatgtccacggtcggaaacgagatcaacattccgtatccgcttccgtcggacaagtcgaacgcctgcaactggctggtgaacacccgctgtcccgtcgactacaacgaagacgtcgagtaccatctgaacttcttcgtgagctacatctacccggaggttccagatctgaagctggagatcagcctgatcgataactacaaccacgtgcagtcgtgcttcgtcgtggacacttctgtggtgtcgtcgtag

SEQ ID NO: 132 - DNA, 2050 bp, Aedes aegypti
ccccagtgcttgatcggttaacatctttttccctcagcgcagaggcaaaggtgctgtccggtctacatcagcgtgtttcattctagtgtcgcgcttatactgtgctctgtgctagccgaaaattgcccccagcagaaataggacccatttcaagcgaagaaggtctgacctagcaaccgctcgaaaatcatgggcttcctacgaaatacattcgtattaattacgatttgcgtaatgtcggcacaagtattcgcacagcaaaaagtggatgtcacaaaccaggaaatccgagatgccattctatcgctggtgcactcctacaatcttttggacaacaaattggaacgacacgagcaacgggagcggtcattgggcgaacaagttaaaaagggtctgattacgctgcagaagaaccaacggatattcgatccactcaagggtactatcacaagactggaggaaagagtcagtagtatcgagacggcactccttagccaagatgaaaagaacacgatgcagcagatgaagttgagcgaaactctggagggcgtgctccgctggttgagcgacaatgcgcacgcgctcgagacgagggcccatgtggaatcgcgaccggatgaggaaacggagggcatcggaggaaagattgaggagcttaccgaaagtattagagaattgcgacgggaaatggccgagcttaagtcagatagagattctattgagcaatccaatcgcaacctgttggagcaggcagaaaaattggccaactccaaactgggttcgacggacgacatccttggtaagatcgaggaacgcctttcttcatactacaacaatcccgtagtaatctcccattcgaacgatgccttcgaggagaaggtcatcaagaagttggaagcgatcgatgccaacgtgaaggaaagtcattcatcgctgtcagctccggttagtgcacctgctgcatccattgataaggagttcgttcacgggttgatcaatgaaacgctagaggccatcgaagatatgcgcctggaagtgctgacagcttccgataagagcttctcaaagacggcgactcgtatcaaggagaacaacgaggtactgcagtcctcggtgaatgaaatcctgaagaccctgtcggaagaaatcgtcgacacggaagcattcttctccggtacaaagaaggacattggaacgttgaaggacgaaatcgctgccttaagccgactagagaaacttctactgcaaacgggtgaaaatacgttggatgctaagcgaggcatagaatacggaatccaccagattttgcgagaggtaacggaagttgtgaagactaattcaaaggaactgaactccactgtcaccaagcgtttcgatgaaatcggtgccaccattttggacaatcacaacggagccctgagtaaccttagttcgaagatcgaaaccgaaattagccaggtttggagacagattggtatcatgtatcaagaaatctcgtctagcaaacaagctttggatcggctgcagcagcaaaccgaagcatacgtgaacggtactctggagacaatggatagcatggaaggaaaggtctcgcaaataaccggtcgtatgtccgaggtagactcgaacctaaactacctgttgggacgtctttccctggtaactcaagagttcaacttcattaagaaaggtctcagcaaagcactggatgaaataaagagcagcttcgtagagatacaagaccgcgtgaaagggcccggaccgcacaagatttcctcggatgaggtggatgacttcaaccaagctcctccggcgaaatgaacttacttagactagggaatacatattagagtagaacgaagatttctgtgcttttgtagctgatagaaatgaatggattcatatgattgtaagcagatacagtgtgcttggaaatcaacagattgaactaacttcaaattgattgattttatcgcaatagaattgaattggattttctgtgtattgaaaatgatcaataaagtattttgatttcatttatttcctaagg

SEQ ID NO: 133 - DNA, 2094 bp, Aedes aegypti
caagctttcacagaggtttcatcagatttttcggctggccgcatagaaaaaagaatctgtccgcaggccaaaacctacggtgcgatgaaccaacatttccagaaagcgattcccagtggaaggatcaacaacaaaaagtatcgtccgcggaagtagttttagcggagttttatccgacgaaagaagatgatgaaagtttaatcagtgaagaaacaaagcaattttggagtgaaaggaaatttctggaataaagcaaacggaattctcaaccgagagtcaaaatgagtgcccccatcgtcatcaccgtacccacaaagtacatcccgatcaatctggccccgttggccatcaagaccgagtcgtcgtcgtcccattcgtgttccctttcggatgcggacgagtcgtcgatggatgagttcctggtgcgcggcaagaaacgccgcctggaccatctgacatgggaggagaagctccagaggaagaaattgaagaaccgcgtcgcagcacaaacctctcgcgaccggaagaaagccaaaatggaagaaatggaacaaaccatccaacagcagacagaccaaatcagcgaactgcaactgaaatgcgcctcgctccaagcggaaaaggacacctactacagtaagtgtctcgatctggagaaccgccaagccgagctagagcgacgactcaacgatcttcagcagcacctacagttgaacgccatcaagtcggaaacgacgaccccagcagcctcacacagtgttggctctgcttccacccttctaggatcagcagcatccgcccaaacccctcagcagcagggatctttaatggaagcacagacgacactgagtcaggacaagatgggtctgaagaccgacgaagaaaaggtagcgaccctgtggaagatagttgctctctgcctgctctacaggacatgctcgaagacttcgacgtgtccaagctcgaagagctcgccgaaagccttctggccaatgtcacaagcgaactggaaggaactgatcagggaagcatcccgtctgatgccgaaagcgcaagcaccggctgcggaatgcctggatcaatggtggggacctcaccagaacagctggaatccggcgaaaaagctgatcaaggaagcagcctaattctgaccacccacaactactccaagtcaccctttcatgtggagaaaccgcacagcagcacaagtcagcagtccaaccttgatcaatcgcaatcgacggtcttcggaacctacgacaacgacagtaattgcatcacaatcgtcctcaacgacgacgaccaagaacttccactggaggaggaaatcatttgcgaagaaacgggagaagaattcttcccccacgagcgggacttcaacgtcaagttggtaccggttcgggaactactctcacccatccccagcacctgctccaactattcttcctcggatgaagtgaaacaggcaccggaagatgaggagcagcacttgttcaagtgtcccttgacgcccgtttcgttcgtgtcggatggaggttacgagtcgttgggttcacccaacgggttcacggatttcaacagcagtcccgccagttcgttggacagtttttggaatctcgatctctttcccattttaacagatatgaactaaaatgcaaatgctacccagttgtaaatatttcccgttccttcagtgatgtacaaatttgatactagtgttaagtcgttaggttcctaagcttatctcttttaaggcttcgtgagttgagtagattaaggttagattgctgtacatagtagacacctttaagaaaagattgctatttatcgttatcatttattgttctctctggttagagatggctatttgttctgcaaatgctgtgtagttttttcctagttgatagatttattgttttattttgtgcacaaaataaatgtagaatactatcattgaaacatgatctttagtagtataaggaaaatcgtaaaataggtaatgatgaaaaagtataattgttacatattttgtgagtttcatattactctttgaaaggatgacttgaaaaaaaaataaacaattttaacacacta

SEQ ID NO: 134 - DNA, 781 bp, Aedes aegypti
gtttgacagaggctcgaccaaaacaaaaaaaaatcctgtcaaacttttgttgtgattttgcgaaaattttcggtgttcgctatttcacacaaaaatggacgccttggaggtggaggacttcgattacggcgagttgaagaacgacacggccttcatcaacaagaacgaaaccctgtcccagtgcatcgagcggatccgtcaaaatctggccattgcacgggaggattacaagaactacgaaggtttctcgctggaggaaaaggtcaagtatgatctgcacctgtcgtacagcatcaattcgctgtactggatgtactataaaatcatcggattagatccgaataagcacggaatcaaagacgaactgacgcgcattaaagcggccatgatgcgggagaaggaaatctacgaccaccggttcaatcgccccacgctggaccagggagccgccaagcggttcgtccgggctggattgttcgaccacaagaaccggaataaaccgctggataaggcggacactccgccgaacaagaagatccgcttcgaagactagagggacgcaccgtatagaatgttaaaaacacgcttcctggggggtacaaatattctactttttttgtaaatgtaatttcctgtaatgtctatttataaataggctgttagctgtaatttgtcatgttttgcgccaaaaacggtatcctttccgcgttttacgcgacatttgctaagaattgacttatgaagagatctttatggtaaatatatataatcttaaaacatg

SEQ ID NO: 135 - DNA, 737 bp, Aedes aegypti
cctcgatcaagagtagaacatcgttttcagtgttcagcgtcgttttcagaagaaccatcatgaagtgcctaattgtgctctcgatcatgaccgtgggctgtgcccttgcccagaacgtcaacgatggtcgctactacccagaggtgtatgcctccaagttcgatgacggaaagtggcgcccagataacaacggccaatatcgtggaactccagacaagtttggtgctggttcgggttctggtagccgttttggtggtgcttcaagtgttcctgttgtcaataccttcgttgctccagtagcccctgctcctgctccagttgttgttgctaatcctggtgctggtctcggattcggctctggagcaggattcggatctggtttcggatcggctggcgccaagaagagcagcttcggcagcggttcaagcaatggtcaaaacgttggagtcaaggaagatacccgtgaactgaatgaagatggttcctacttctacaaggtcctgagcgacaacgacatcgaattctctgaaactggacgcgttgagaaccttggagccgatgcctcggccatgcgtgttaagggatactacgaattcgttggcgatgatggtgtccgttatcgcgttgactacatcgccgacgagaatggcttccagcccactggtgatcatctgccaaccccaccaccaatcccagaggaaatctacgaatctctgaaagcccaaggactcatctaa

SEQ ID NO: 136 - DNA, 282 bp, Aedes aegypti
atgttcgctaaactgtttgtccttgccctcgccatcgccgccgtggcttcccgcccaggatattcggccattaccagctatagctctcctgcagtggttagtgctgtcgccccagctgttgttgctccctacgccaccagaacctaccatggagtttcggccccacttacctactccagctacgttgccccaactgcctacgctgctccggtgtccgcttactcctacggtgctgctccagtggcctacagctacggagtgtccccatacaccgtctactag

SEQ ID NO: 137 - DNA, 632 bp, Aedes aegypti
cgataacggtagcacccaacagtcaaaatgttcaagttcctcctgatcgccgctctggtcccagccatcctggctcagaccccagtccgccagtgccccaacggagctggtctgccccagtcggtggacatcaacggatgcacgacctctccctgcccgatccagaatggagcccccatccaggccgtagcccgcggaatcaccagcccagtggccaccaacggaatgtcctcgtacatcgtgatccgtctggccggtctgcagatccccttcccgatgcccgatggactggaggatgcttgcgccgtcggaaccgccccaggaacttgcccagtttcggccggacagaccttcgactacaccctggaccatgagggccaggcgctggctctgaccggagtcaccgtccaggttgaggtcggtctgcgcgccgatgacaacagcgtgatcggatgtctgctgttcgatgctaccattattggttaaataaatgtgattaagttttttatttaattgattgtttgtttatacctttttcttcttcggtcttttgtcacagacttgagaatacttggttttaacttcttcagggagattgaaaacttcgcctatacatttaaaattaaataatt

SEQ ID NO: 138 - DNA, 1511 bp, Aedes aegypti
cgtcactcaaaacgtcaaaatcaccgctgagtagttctgttcgatcggttttctttgctttcaccaggcgatggataatcgcttttagctgttttcgaaaaaataaaatttccaccagcaaataatctatcaagtggtgcaaaatgcgagttctagttaaaattgcaatcctgattgcaatttccctttgcttgttccatcatgtccaaagccaggccaaggggaaaggctcgcagaccctgtcggaaaaggtgcagcaattgctggacatgaacgcgaaacgaccggttatgcgcttcaacgggaatcgtttccgggactttgtcaaatcggccccacggaattactcgatggtcgtaatgttcactgccatggccccggctcggcaatgtgttatctgtcggcatgcccatgatgagtacacgatagtggccaattcctaccggtactcgcagacctactcgaacaagctgttctttgcgatggtcgactttgacgagggttccgacgtgttccaaatgttgcgcctgaacacagccccggttttcattcacttcccggctaaaggcaagccaaaaccggccgataccatggacattcaacgggtgggcgtgtcggccgaggttatcggcaagtggatccaggagcgtaccgacatccaaataagaatcttccggccaccgaattactcggccaccgttgccattttgatgctgacggccttcgttggagggttcctctatctgcgccggaacaacctggactttttgtacaacaaacagatgtggggctttctggcagtcatcttctgcttcgccatggtctccggccaaatgtggaatcacatcagaagcccgccgttcgtccacaagggacagaatggaggaatcgcttacatccacgggtcatcgcagggacagttggtgatcgagacgtacattgtgatgttcttgaatgcaatgattgttgctggcatgattctgctgactgagtccggctggcaaagtgatccccgaaaagggaaaattgccgccatagtcggcttagtactggttgcagttttcttctcgttgatcctgtcgatcttccggtcgaaggctcaaggatatccgtacagcttcttgttcaaataacttggagtcgtttgagtgcaatgaatatcctacgaaaagtgttgacagcgaaacacattgcagtaaaagagtgcgagtgtagaatttgtgagcaccagtttggcacgaatgtgtaggaaaaccctacgtaatcgaatgcgttaagtactaattgtaacaaaccgaaatcaccaaggaaatcacattgatttacacattacctattatgctagtgagaactaatgaattagtgcaaaaaatctgttccgtcaataccatctggaaataattaactttattgtttgtttagtgtttcaaatttactgcggaatttatacttcggtattttacggaataaaacttgacggggtctcacgtataaggccttttaggggttac

SEQ ID NO: 139 - DNA, 612 bp, Aedes aegypti
atgaagtattttcttttgaccaccattatgctgggcatacttagttatgccacggctctctcctgctacaaatgcaccagcgtcgaggacggcacttgcgatggcaaacagctggtagaatgtgatgccgttagtgctgcatccggaatggccttactgctggcgttgaagccttcgattcaggttatctccagcaccaactaccagtgctacaaattggttgccgaacaaaaacagtccgacaatggagtgaccatcaaatcctgcatttatgattcgatagcggtttgcgaaggagctcctaccaatgctgaacaaaaggaatgctacacttgcgcagaagatgagtgcaatggatccgggcgatttggaatcagttttatgatctattacacctacacgtcgtttgtacatgacgttcgtagtggagttgccaacaattacggggcatacggtagttcattgttctacatgagttgtatggccaaccaattctttctgcgaggtttgttctgcgagcagctgacacggagggctcaacggactggtgttctactaaacgagttcatcgaatccgaaattgacgacgatgttaatcaatgcgtgagttaa

SEQ ID NO: 140 - DNA, 1344 bp, Aedes aegypti
aatcagttaaaagtataaattcgttactgctcggaaacaaactcaacagaagtatttcaatatagcaggaatcaagtaaacgtagtgattccgaaattaaattaatcagaatgaaaagttttgcactagctgtttttctccttctgggactcagtgctgtccttggaggacgtccgaaggcggaacaagtgcttgaagaagtagaaaagcttcgaccacgctatcaggagattcaagactacgtaattcataccatcagtgatgcccgattaagcagctcggcaaccctcgccaaattccactccgacattttgaaagtgaaatccacctttgtgatcgatgccatcaagaaggagaacaatatgctataccagatcaataatcaaccagcttcaatagacaaaaattgccttgcttttgttcaaacgttgggcgacagtattatgaacctggctggcaccagtttctctagctgcattgccgattccagtgacagtttggagaagaggattaacgagttttacgccaagctacaacaagatgaaaaggactacattggactcggtttgttgaacgttttcaagggtgagaacattttctacaccccagatgtgctcatcgccaaactgaaatccagatacgaagctttggagagctatccaacctacctgagcgaagatttggctcgtattatcaattcgttgaacgctgatttggagtccttggaagtgagctacgttgtctgtatgaccgaaagtgagcagcgacttcgcgatggtttcatcctggcacacagccacatggaattaacctgcaaagctgtttcggtaccagcaccatcatctccggaaacggtagaacccagcgtgcctgaatcgatgtcatggccaaacaccgaagccgtcagactgcttcgtgaacgttttggactgtaaactgaacgataattgatcgcgtgattatttcaataaagaaactaagttttcatataatactagaatcaaacgttgcttcgccataggatatttggtattgcaaataagaattgctctcatattaacagatattcatactttttagtcgtttccccatttatggtttatgacagaaacgttaaacgaattgccaatacacattgatatatcaaccatgcttttcggctacgcagtttttatttgaacaatggattattatttgcctgacgttttgacacctcatgggtaaatatagttgtcgtttgtagtcctatgttttgtttaactttaactatcaggtctgaatattttaggtacatgacttgatttacatagatagataaactaataaattcgatgctacaattga

SEQ ID NO: 141 - DNA, 438 bp, Aedes aegypti
actgaacgttttataatcaaagtcaactgttcacgcctgacacatcttgtatttgcagcagaaaccattgcgggtgcttttcggaacattttcgtgcaagaaaaccacatttaaaaaatgtcggaagtcacttctaagatcccgaagccagtgctgcgcggattgcacaatgcctccatcaagcgcaatctggtcgtgtctggtgtcctgtgcgttattagtgtagctgctttcaacttcctttacgtcgaaccgaagaagcaagcgtacgctgatttctacaagacctatgacgctaacaagcacttcgaacgtatgaaggatgctggtctgctgcaatccgtgaaggactaaagtagcgccagattggtctataaagatagtttattgccgcttcatgtttacaagtaataaataaaaagatcacttaacataaga

SEQ ID NO: 142 - DNA, 1624 bp, Aedes aegypti
caactgtagggtactgaatggatggaccaagcctccagcccagcacccgattcctatactaactagagagaattagcaccgcgtgcagaagctactacacatagctctggtcgtttccatcccagccagcttcggattctcctaccattgctataaatacgggtggtaacttcatccccgaacacacttctgaacggactttcactgtgtcaacgtcgtcgtgctagaaagattttgccgtagtggcgggttcgatccccaaaaaatttcggagattatcgcgaattgtgcccgtccttgaagggttgtgcaacgtttttagtttcgtttgaatcttatttttttcggtgtagccttctttcctctgtacgtaatatttgaatcaccatgaagccgttcgcattcggagtgctcatcgccgccaccctttgcgtggccaacgttttcgcggccgatgaagcgccaaaggataccgacgaagacacggtcaagatctacaagcggctcatcccggccgatgtgctcagagatttccccggaatgtgcttcgcctctactcgttgtgccaccatcgaacctggaaagtcctgggatctggctccattctgtggacgttcgacctgcgtagtttcggaaactaacccatctcaactgctggaactggttgaagattgcggaccactgccactggccaacgacaagtgcaagctggatacggacaagaccaacaagaccgccccgttcccgtactgctgcccgaagttcacctgcgagccaggcgtgaaactggaatacccagacgtcaagggcccggaagctgctccggaagacgacaagaagaactaagctgggacacccgaaattaaatcctgaaacgaccaacatgagaacaacaaaatagagtattgaacacccaacctcaagagcgtcacacttggttcggtattcttccgttttttttttattatttgtaccgataccggacgtagactattaaggctaatctcaacaaatggcgcaaaaaagtgtattatcgaacaaggaacacaccatatacctattagtcaagtatgtgatattagaaatatgtatttatcagaaaagtactattttaaaacacaatatttcgttaccaaactgttggcgcgaagattgcgcagtttgccgattttcgccgaatatggacaaattgattatactcaaacagtctttttctcgatgttgctaatacttaattttgttttgtcacatgaaaaagtacagattttataaataaagttctcatttttcactaaatctgtttttgaacctatttgatccgaaatacttgtccctgtacatcgtaatttctcttaaattgatataaagatccgattaaccatttagggtcatcccagccaactatgacaaacttctctcaccctttttatatgattattccaaatttttgcatgaagcgcaacacaatgaaaaacatccatcctatcttttattcacaatgggtaaatagagtccagaatgcaacttagatggaacagattttttttttgtattattttaataataatttcaatagaaaacaatgacagttttcctcactatctagccttatttgataaaatag

SEQ ID NO: 143 - DNA, 1011 bp, Aedes aegypti
tgtttaatcaacacgcactgaattaatttcgaatccgagtcctccggccagaggtgcgatcgaaggcgacaacgaagaagaagaactaggtgggggagtaaaagaaaagtgaagagtgaaaataaaaatgaaatcgatcacgtgtctagcggtgttgagtgccgccgccctgttcggagtggtgtcctgtgcgtcgattgcctcgaatctggtggttgatgccacgccaaggatcgccaccagcgagcagcttctgtcctcgattgtgaacgagtgcttcgaggatgattcggtgatgaactgcctcaagggcaaggtgttggtctacctggatggagtgctgggactacgcgaggaacaggctcgtgctttcgaggagcaaaatgtggacaaggtgatcttcgatcgtgtggcacgcatcctggccacccacgagttcaaggttcaactgccggaggataccgtcgtgagctaccgtgccgataagggtgtcaacctggatgttgtgcctgctggacttgccaccgtgctgctgttgctgaagctgaagatgaaggccctcatgccgatcttcgtcgccctgatcggcctcaaggccatgaaggctctgatcctgtccaagctggccatcactctggtgctcggatttatcgtcgcccagctggttaagaagtccggcctgggaatgcccatgatgtcgatgatgccaatgatgcccccagcagccgaatatggtgcccctgctccggccaccaccgagccaccatccagctatggtgccccatcctgggaatcgcaatccggaggaccttactcccgcgtctgggaaccatccacctcctcctcctcccataacctggcctacagctcgtactacccaagcggatccagcagctcctacagctccactgcctacaactctggatcgagcaccagctccagctcctcgccatcctcctcctcttcctcgtcttcctcctcctcaaactcggctcacgcttattaagcgta

SEQ ID NO: 144 - DNA, 1035 bp, Aedes aegypti
atgaagctctcagcatttctgataacaaccctagtcttagcctccgcggccatggccttccctcaacgcccaactggcgatgagtcgcgtctcgagcgtttggatcgcttcctgaacctactgccggaagacctccgcgcagagattgaggactcggttcgcgacgccgtggccaacggaaagcgtccgcaaatttcggacgaagtacgcgatcagatccgggagcacatgtccggcttgaagcaacagcatcagcacaagctgaaccgtttcctgtcgatgctgccggaggaacttcgccgggaggtggaagccgttttggagcagtccgctgccaatggagagttccctaaggcttccgaggagctgcggaacaaaatccgggatcacttcgctgcgatgaaggaagagcgaaagcatcgcttggataagttcatgagtcttttgtcggaagagttgcgagcggaggttgaggggttgctgcgagagcctttggttgatggagagcgtcctcgggcgtcggacgaacttcgcgagaagatccgtgaacatttccagaatctgaagggagctcatcgcgagcgtttggatcgattcctgtccatgcttccggaagatctccgccaggaagttgaagtggtgctgaagcaggctctggtcaacggtgagcgtccgcgggctcctgaagagctgcaggagaaaattcgggagcatttcggagagctgaaggaaactcaccgggaccagctggagctggtgctgaactacctgccgaaggagctgcgcgatcggattgagctggaaatcaagcaaaacagggtgggccacggaatgctgccaaggttttccggagagctgctccaggagattcgcgaatatttcgagcgattgctaccggcgggtctgaaggagcaaattttggccgaagttcagcgggctatcgaggcggatgtgtatccggttttgagtgaagatttacgcgaaaagattcgtcggttcatggagatgcttatgactccccaactgttccattaa

SEQ ID NO: 145 - DNA, 930 bp, Aedes aegypti
ctggagacgatcaagtgatcatcttctttagcgttattctgtgctttgtgatttcaactatcagtgagaccgtgaacttgaaagtaatcatgctaaaatttgtgttaatatctgccctagtggctggagcttcagcaggttatgccagcagtcagtatgcgggagccggttacaacgggggttttgcgtcgcagtacgccggtcccaatggcgtaggagcctctattggatctggagccttcgttcccggatttgcccccttccagccggtgccagcgttccccagcgcgtttgacttcaacagtttctaccagggactgcaatccaactttgccaatctgtattcgcaacagctagcccatcagaatgcactgttcaaccagattcgtcagcaacaggcctttgccgctaatgccggtgcaggagccggttcaggagtcggaggtggatttagttctggtggtacctacggtggtcccggatacgcaggagcttcggcttcctatggaccaggaggaactcaccagacggcccacatctatccgcaaaatcctcaatctccgaacgttgatgtcagcaatagattcggaggtggttcacaacagggaggaggaccaggattcgtcggtgtatcgagcttctcgtcatcttccaacatcaacgggcagtcacatcgtgaagcgtcaacgacggtgaatgacaacggaaaggtcactacttatcacgtgcgcaattaatgttcgccattctggcagaataaacgagaccaggaattgggatgactaacaatggaagagtattaagaatgctgcattttcttcaataaaagacaaaaacgtccaacgtacttacattttaagaatatacttgcccaacgagcaatatgtttcgaacgagactttttgacaataaacaaaattacaacaaaat

SEQ ID NO: 146 - DNA, 822 bp, Aedes aegypti
atcaccgatcgtatgaggagtacatgcaccaccagcagcagcaacaacaacaacagcagaatcaatccagccatcagaatcagtctcaaaacagtgcggccggttctccactaccgggtctacccggacagcactccagcaccggaggatcaatgctggcaccgcagagtcccagcatgctcggctccggcagtaacggcatgatgtcctccccgctcatgcagtcacactctccgctgctgtcgtccaatccctcgttgctgaactcacaatctccgctgctgtccaactcgccgttgatgagccaatacgctccctaccaggatgtgattcccaccatcttgccgcaggacgatcccggaggatggggaggctacgccctcgctccgggaccctatcagagtgagttctgtgcctccaactacggggtgctacaccagcggcagcagtacggaggtccgggcaaaatgggaccccacggggcgttgaaaagcgccaaagaggcacgcatcaggcggcccatgaacgcgttcatggtgtgggccaaggtggagcggaaaaagctcgccgacgaaaatccagatctccacaatgccgatctcagtaaaatgctaggtaagtcgcagtagcattacaaagatgtagtcaacacatataagtgtacagtgttagtacggtaactcaaaactttgttttaattatggttgacctatataaaaaagtgtaggagcaatgtagcattctccatagttttatattcttctatccatatgtgctttcataaaaaatccagaaaaaaaccaacctccaccaaccgaagct

SEQ ID NO: 147 - DNA, 701 bp, Aedes aegypti
atgcttaggctaagtgctgcgtgtgtggtgttggtgctcgtaggagtgtccctggctgaacctccggcatccggtggatatccagatcgtcggaatggtggtggcggtggcggcggcggtggtggctatcagcaggtcaacagtggccagcagacttccgagggtcaaaccgtggatcctcagttgctcgatatggtgaagatgctgttgctgcagcacgaaagtgaatccggaaacggtggaggtggtggtggtggtgctggaggtccatacccctcgtccaatggtggcggaagtggcggtccatatggttcttatggaccaccagctggaagcagctcgcagggtcgtgtgaccggaattgagttggaaaaccccagacagagcatgcaggttgccgaattctggcaaggtggtgatgaacaaagtgctccccggggccaatacggtgccccaggccaaggtgcccccagtggatcttatggcgccccaagtgattcgtatggtgctcccctaggtagaaagtaaattaattaatttatttgtgtgtagtgtgtaggtattgttaggtcagaaaaaaataaatttgtcaccgtgaagccttttgagagtttcgattacagtgcgttttcgccattgcagcggcaaatgggcctaaattgcgatcgggcgcgtgacggtgaatggacgttagacgggca

SEQ ID NO: 148 - DNA, 612 bp, Aedes aegypti
atgggtcttagtactaatcaagttgttatgctgatttgcctgatcgggggcgtcattggcgagatcactgtggattccagagccacgcttgcgttgaagaagagatcagaaatggtgggctactctctgcggtggtgtgacatattctaccaagaagatttcccgaggaacgtagactgtactggaaagaacgatttggtgtgggattacttcccatcctgttgtaacggagcctacaactgcaggaacggtggaatttggaatatctacctatgtgctccaggatacgtttatgatgcgtcaatggaaagctgcgaggagttttcggaagattcgtgtccttacgtcggtggaggaacaggaggagatgacatgactactgaggaggatattcctacgacaactgagtcccaagtagtcatcaactgcagaaccgtagtgaatggccgcattccacaccctactgattgtacgaaattcgtcgaatgcatcgacagagttcccaacgttcgtgattgtctggaaggatacgtttattacgcaccatttgctgtttgtctgcctggcaaaaaagaagcctgtacactgtatacacttgaagatctacagtaa

SEQ ID NO: 149 - DNA, 567 bp, Aedes aegypti
atgttcagattggtggtgttgtctgctgttcttgccgttgccgctgccgccccaggagccgctatcgtagcttcagccccattggcctatcagacgtatgccgcagtcccagctttagtggcccagaaggagatcgcttacgagaagagcatcatcgaggagccaaccgttgcccacgtgggaaacattgaaaagaagatcccaaccggatactcgcaccagagcttcacccagtaccacaacaagcaggtcgccgaacatgtgtatgccccagccgtgaagaagactgtcgtcgaaactcctgttgagaagaccacctaccacgctgcctcggtggccactccagccatcacctatgctgctgccccagttgtggccaagacccactacgttgaagctgccccagctctggcctatgctgctccaattgccaagacccactacgtccaggccgctccagctctggcctacggaaccgcttacgatctcccatacgccaaggctgcctactacagcgaatacccaaccgtgtacagtgctccggctgccgtctacgccaagtactaa

SEQ ID NO: 150 - DNA, 582 bp, Aedes aegypti
atgcagtctttcacatcgctaacctttttagtgatgctcttgattgggctggcttattgcgatgtgtctcacgtgttggcgccagttatagtggaggatgaagtcactactcttcctcccccgccaagaccttatgcatttggatatgtagctggacgtcgtcctggtcatgttgatcgtgctcacagtgaaatttctgatggaagtggcgttgttcaaggatcgttctcctatgtcgaccccaaaaatgaacttcgtacagtggagtacatagctgatgctcacggattttacccacgattgagtcacgaactgaaatctcccgaacaaaccgaagcagtacaacgtgcggcgaataaacattttgcgttgtatgcaaagatcgcggaagctcatgccaatccccacctgcaacctgtcgaaccatcgctccctagagatacagtggccgtatccaaggccaaagatcgacatttcacgctgtacgaaaagatcgcccatgagcatgcccaaattgcagcgcaacgcgaagcagaacgactggctttcgaggcaacttccgaagtcaatggattacactga

SEQ ID NO: 151 - DNA, 1831 bp, Aedes aegypti
cggttatcgcccgctagtccggttggatcatctctccgggataagtgtgcaaaattgcgaaatgaagattctactgaccctactggcagttgcagcctgcacagaggcaacctttagcctaggttcactgctgggcttattacaacctaggccagcgccagctccagtacatcctggatatgcttcatattatcgatatgccgcagctccagttgctgtacaaccgggatatgcttcttactatcgacaagctccagcaccagctcccgctcctgtgcattctggatatgcctcttactaccggcaagctccagcccccaggccggttcaaccggcttatgcctcctactaccgacacgctcctgcaccggctccagtagtccgtccagctcagccagcaccaatcatacgagtagttcagccaatcgtgtacatccctcgtccgtcgcctccggttaccacgtactacgaagagactccagtcataacgagcactttgaccgtgcgagaacccaaaaccgagttcagcatagtgccgtcgaactctttctcgtacacaatcaacgaacctgctaagccagctcgacaaaatgacttcagcattgttccgtctcaaagctattcaatcagctcgccaaaagcccatagcgttcaaagtggctacggcgtagatgtggtgaagtccgaaggtcactcatactcattgcctgcggagcacgtcaccatcgagcagaccttttccccggtttcggatgtttcggtagcccctggaggtaacagtttcaacatcgatgttcgcaaccgaaacggaggaccagctgctattcaatccttggcagatgagaccatccaacaacttcctgtagcagatgaagcgcccgcctttgcatatgaatcagatacactcgctcaaccgatcgttgtcgaacccgcggtagagacacattcggtagctgtggcagactccgaagctgctgcacacgccgaagcagctgcacgcgctgaagctgctgctaacgcacaggctgaagctgctgctaacgcacaggctgcagcaaatgcacaagccgctgcaaaagcacaggctgctgcgaatgcacaggccgctgcaaatgcgcaggctgctgcatatgcgcaggctgctgcaaatgcgcaggctgctgcaaatgcgcaggcctccgcaaaagcggaagcttctacaaaagcacaggctgctcctcagacgatagcagctgtcacgcttgaccacgagcacatcacccagcaaatcctgcaggaggccattccgaacataatccgccaagtggcgccccacgtcattcaacaggctcttcctctggtcgttgatcgagccgttccgcacattgttcaccaagtcggctcaactgtgtcccaccaacagcaagccgaacccgtgcagatagtgacgcccttcaagcagcaccagcaccaacagaatcaggacgagaaggtcgtcgtcatgtacgccacctctgtcccacaaggccagttcgacgaatccgagaacttggtcgtgcccattggcaatcagagacagcaatacactgcaggtcaaagttcagcatcagaacaagcgccaggaaacgcccaagccgaaccgaaggtagtctttgaaaagggccttgagctgggacaccagatccagcaagagcaccgtgatgtcggcaacgtgaaccagcagatcatcaacaacttccagcaggagaatgctgcttatcggaatgaagtcggcggtgctgcaggagcatttccaaacgaccatttccaacgacacaatttccatccgcagcggctgcatcaccatcagtag

SEQ ID NO: 152 - DNA, 1410 bp, Aedes aegypti
ttcctcacgattacaattacagtagttgtgattgtaaacacagctcaaactccgatcacatcgcagtcggcttggataacaacatacctatcagatgtgattataaaaaagtgccaacgtacaaggcctacttggatggcaatttttctcgactgattgttggtggcaaattagagataatttcgttgtaaaccttttgtcctattgaatatcaaacagttgctagtgatatgccactttttgatgatctctcgtttaaagatattttggcatcttctgccactatatcaacagtattgcagtttttgactggatctgtgatatgccacagatatataaggaaaaagtcaaccggagagacgtctgcttttccgtttgtttcgggcttcctgtcatgttctctgtggttgaagtacggattgttgtcggaagaacatacaataatttttgttaacaccatagggtcagccttgttcttcgcatacgtgataatttactttactttttctgtgaacaaacgcaccgtagttcggcaattcttggcagtctgttgctttatactggcgtgtagcgtatacacaaaatacgaaccaaactcggaaacagctctcgaagttattggtcttatttgctgcggcgttggagtgctattctttgcatcgcctctaacagtattagctcaagtgataagaactaagaacacggagagtttaccttttccgattattatttcttcctttttcgtatcccttcaatggtttatatatggaatggtgattgaagatagtttcattcagattccaaatcttttggggtgcattttatcgtcaatccaacttctgctttacgcaatatatccaaatcggaagctatattcggatggtggaccgtcgtaccaacctttacgctcagatgccaatattctttgaaaaggagagacaaagtttactttgtactggtgatatgcagtcaaaatggttgcttgaaaacataataattaagtattcgtttgacatttgtgatcagtatattttgtaaataaaacattatttaattgtattaataaaacgacgattcagcagaacaacttttattaggtaaatcaagagcttccatttggtgagtccgtcaacggaagaattttaaaatacttacataaagctttaaaaaatcctgaaatatctccacaagacgcaattttggtggatatttgtggaggaatcactggaaagtaattctgttgaatacataaaagggttaatattttgagaagaatactccaaaaaattctatgatagaattttcttagaaaattttcagagcaattgtcattgattcagaaacgatctcaacagtcataaactacaacagatttcaaagcttaagcgaagtatgcacttcaacagaaaa

SEQ ID NO: 153 - DNA, 369 bp, Aedes aegypti
atgcacaagatcatcgcagttcttgcctgtctggctgttatggccatggctatgccgtacaaccacccagaatcaaaggaggaacatcatcccgcacagtacaagttcgaatacggcgtgaaggatgagctgaccggcgatcacaagacccagtgggaacagcgggaaggcaagcacgtcaagggacaatacaccctggaagattctgatggtggtcatcgcctggtggagtacgaatccgatgcccatggaggaatcaacttccatgtctccaaggttggaggtggtggtggacacggtggacatgtcgctgctccagctccggctcctgttaagaaacctgccaacttcaagaaatctcactactga

SEQ ID NO: 154 - DNA, 1074 bp, Aedes aegypti
gattaaaaaaaatcacctatgaaccgtttaatcgtaattggggcattgctcctattgtgtggaggaatcagcgcagacgagtttcatcgtccgacaacgcagaggccaggaaattcgactacgcctgcgcctacgccatctcgtaatcgttgcaagggattgccaaacgacactttgtttccttctctaacagattgtgcatattttgtgacgtgccaaaatgggttggaagtagaactcgaatgcagaccggaaggaacgttgttcgattacgtgcgccaagtttgcgatcacccggaattggtcgaatgctacgaaagtaatcggtgctctgcagaggaagacggaaagattatcccatcggagacgtgctccaactttttcatttgtcgaaatgggaagaaaagtgaagaaataacatgcgttccagctggaacattgttcgattacaaacggggtgtttgtgatcatccttccaatgttgtatgctggggctcatccagccccaacttgtgtgtaggcaaaccggacggagctttggtgccttcaatcgaatgttcaaatttcttcgtatgcaagaatgaggaactcgaccaagaaattacttgcgttccggagggaacagttttcgactaccaacgagaagtgtgtgactttcctgagaacgccgtttgctggactccgggtagcggaacaactcccggaccagacgtcaccacagtggcacctacgagaccaccacacccagaagatattccgcaacatttttgccgtggtgttgcgattgaagcttttcctcatcccagagattgcaccaagttcgtcgtttgtatccttgggcagccaacggtaaagcaatgtcctccaaggcacattttctatccacagtttagagtttgtggtttaggaaatacggaaacttgtagaccagaccctcagtgggtcgaagaacacctccgacaacagggtcgtgtggagaagttgaatgatgaatgaagtgacaaatcgtgttttctgttgagatcaggtatcaaatgatatataagcaataaaagtataacagcattctaaaca

SEQ ID NO: 155 - DNA, 507 bp, Aedes aegypti
atggaagaggctgtacaactgtggaaagtcatgcttcctgaacgattgtctttggtttgcttccgagaggggtcggatgcaatcgtgggagtcaacatactaggagtggcttccaaatacgataaggatgaactcaagctcaaaagcgatatcttccgaacaatcatcgctacgattgagtacatctcccaccaggccaacgtgttcgaacgttacggagtggatcagtacctgaacgcgatgggcctgtcggtggacccagtctatcgggggcgtggcattgcaaccgaactgcttcgagcaagagttcccctttgtaagggaatgggtctgaagttgacctcgacatgtttcacggggcccggatcacaggctgctgcccggaaggctgggttcgaagaaaatttcaacatcacctacgcagaactggcaaaagttgatcctcgctttgtgtaccctggacttgatgagaagagctgtaaatatatgagtttgaagattgattaa

SEQ ID NO: 156 - DNA, 2148 bp, Aedes aegypti
ctacattagaagcgcctcatggtgtgttgagaatgaaaatcagcaagagagtgggtgtttaggaaagacatttttgcggatagattggattttcattagcaatgttcggggaggcactttgtttacagtataaatagtatcgagagagccagaacggatcagttctattgtagaatttgggtagttagtaatatatgcaaagcatacgtctaggttctactcgtctgtggggaatagcatgtggtagcagtggcagctaggatcagcaacataggagtacaatcagtctgaatccttccgggaacgtgatcgtgtgcattgaaagaagaactaaagtagtgaggacttatctggagcagctatggcgcggttagccattcttttggcattatgtgcaatgtgcagattaaattgggcacaaaatggctataattatgacagaccagattcaggattgggaatcgccagtaccagtcgtcctggtttccctgggactagtccagcgggatatccaacgccgtcaggattcggtggtgtggcagggtcaactactccatcttatcaatttggaagcaccggatacccttctggtagaccttccggtccaggttttggacaacctggaacagtaggtcccactgggagtgctggatatcctgctgcggggcaacctgattttatcggaactgggtcattccagggaacatcggttggaggtactggtttcggaaatgtaggcactggatctggtttcactggtgacaacgttggattcccttcaattggatcccgacctactagtggaggtgctggtcaacaaaggcctacaggcggtattggttcagtgcaacctagcccatctggaccagctggggattctgttggacggcctggtggttccagtaatgatggtcaatatgagggcggtgactattctgctattcctggcgagcctggtgtagactatcccatcttttctgaaatacccgaaacttcgtttgattgtaagcaacaaccttatccaggatattatgctgatgtcgaagctcaatgtcaagtgttccacatatgcgccttgaaccgtacatttgatttcctttgtccaaatggtacgatattcagtcaggaacacttcgtatgcgtttggtggaatcagttcgactgtgccagtgcaccaggattgtttgagaaaaacgcaaatctgtacgacactccacaaggtagccgtttgccatcagatggttatccaggaggtcaaccaggaaccgccccaggtgttggaagcccaactggtcccactgcaggtggagcaccatatcctggaagaacccagggaggtcgtccttcaggtggtcaaatcggtggactgccaggggcttctcccattggaattcctggtggatctcctgtgggaccaccaactggtgcgtctcttggaccacaaggaactgcgccaggatatccgactggtccggctggtggatatcctagcgctcgcccaacaggtgggttccaacaaggcggtcaaattccatccaatgtgccaacaggctatccggcggccggtgtcccaacaggccctgctttccctagcggaccaagtcaacagggctatccagcgcctggacaaccagaaggtcaattttcgccttcaccgcaactcccaacacgagaataccttcctccaaggcagggctgaagctgaacaatatattgtagaatgaacaggtacgggcaatttatttatattagtataatcattcatacctatgtacggagtagcttgcagaagctgttaacaattgtttatctcaagcattttagcaaatactcatgtgctattcaaaactatcaacttaaactgttaccattcctaagcgatccgatggttctcaatcaagtttctgcattgtttataacgggatgagacctattagtacatattgtgagtagtatgatacgacaggtgcattaggtagcttattgttaatttttaattacatttttacttgaaagccattgtgaatactcacccgcaatcgatattgcaataaaaacaaagcatgacaaaatcgaaacgtgttgcagtgttttattttcaaatattcaacttacacgccgcataggggtttaataaatgcattaaga

SEQ ID NO: 157 - DNA, 873 bp, Aedes aegypti
gtagcactgaaaacaaaaacagaaagttgcttgctttgcttgcgtccatcgttcgcagttaaattttaagtttgtacagaaaattgcagaagtttctaatggagtaattgtctgtatctaccagcccaatctatggaagcgaagctgaacagttatcgttcgcaaaaacgacgccaggcgatcctgaattccttcaaagaccgcctctacaacatggtatccttccagcaggtccgagtggacgaaaagtcgacccacgtcattgtcgaagcggatactgatccgcaaccaaagccaaaaacagcaatcactccggtccaccaaaccaaagtgcccaagagaccgcgaccggtatcggaatcggattcggttgtctcggtaggaagcaccgagtcctctctcgattcggaccaaacggcagctaatcattcccagcaaaccccaaaaccacccagatcgtatctgacctacgtgacctatctggtgtacttcctgttctgggtcacgctctacgcaatcgccatcgagctgcgattcggagtggttttcctgatgatctccgctctggtaggaatctatttcaacacccggacggagaaagaacccggggaaatcagcgcgtacagtgtcttcaacgagaactgcgaatccatcgatggcactttgaaggccgagcagttcgagcgggagattggaataaggcactgatcccggaggacctatttttttaaaccactggtagaataaatgaggtgagtgatttttctacgataaaaattttcacagcacataacgttttaagcagttagtttccttttgagatgttaaacgatctatttatgagaatttcttatagtaaattttttacagtat

SEQ ID NO: 158 - DNA, 2739 bp, Aedes aegypti
atgatatacccaacgctactcgcagtggtagcaatagccttcacaattccggccacttctgcgcagctggagaacttctgccacggagtcattgctggtatttttccacatccggatccgcggctgtgcttcatgtatgtgtcatgtgccttcgaggaagcgttcctgtatcaatgtaatgaaggattcgtcttcgacgaaagcatttcggagtgcgtttccggagaatgggaagattgtggacgggaaataaacccagagttggaactgatctgtgccaacgtttcatatggagtgtttgaatatgaagaggattgcggaaagtttatcttctgtcaacgtggaagggcatcgttgatcgagtgcttggagaatgaaatatggcttcaagagaagggttcttgtgtgttcggagatagagacacttgtcaaccgggagatgtgttttgtatgggaatgccagacggagtgattccccatccagaggggtgtggcaaatttgttgaatgtgttgatgagcgtagcactgtcatgaactgcgacagaggaatgatctttgaagagggtggcgtagactgtgtgatcggaagtttacagacatgtcagtcctcggaaggcatttgcagcgaccaacctaatacactacatccacatccggagttatgtgatctttttatgagatgtgatggtagtgatgcgatactcatgacctgcgggccaaatgaaatattccggccagacattcagttctgtgtgcccggtgatcaagacacttgtgtcccaagtagaccagaagaagcttgtgttggcagacctgatggaatcgtaccgcatccagatcggtgcaatcaatatattgcctgcaacggtggtagctcgtccgtgcacgattgtcctacagggcagattcttcgaccagaagtaccaatttgcgtggcaggtaattcagatacgtgcgagttaatggacggagtttgtactggacgtccagatagatacgtaatagagcacccaaactattgcggatggttcatttggtgtcaaaatggacaagcaagcgtctttcagtgtccggcaaacgaaatacttcgaccagatatgcagttttgcgtgcctggcactgaagaaacgtgtgaagctgctgagatagacgaaatgtgtgatggacgccatggggttatctatccccatcctgatcgatgtgatcagtacatacgttgtgaagaaggtaatctgaacataaactcctgccctccatacatggtcatagaacgaggaaccattcaatgcgttgccggtaatacggaaacctgtgagctttacgttgatctctgtctaggacgaccagatggtattattccgcacccatccagatgtcatttgtatattgaatgtcgatcggggcaggtagatttgaattcgtgccctgaaggactcatcttcgattcatcacattcacaatgcgtccccggtaatacagagacgtgcgatcacttggtagaatattgtatagatcgaccgaatggagtgattccgcatcccaatcgatgtgatttgttcatgatctgtaccaatggaatcacgtcggtacaccagtgtccatggggagaaattcttcgtcccgatatgcaattctgcgttcctggtaacagcgatacgtgccagtttacaccaattgacggaatgtgtaacaaccgcgaaggaactgtaatctacccacatccctacgattgttcacagtttgtgcgatgccaggaaggccaactcagtgttgaaaattgtcgtgaaggaacagtattgcagcccggaacaattcaatgtgtcgctggtaatagggatacttgcgaactgtatctggataggtgtataggagtcgagcaacaagttattccgcatccttccgaatgtcacctcttcatgagatgtgattctggtcaggcttcggtcgactcttgcactcgtggtatggtattcatcgatggagtatgcgtcattggtgatcgcgactcgtgcgaatcttggcaattggtctgtggagctattgcaaaccagataatatcacatccgaatttctgcgatttgtacatcgagtgtcgtgatggactaacgagcatgcgaccttgctcttcaggactaattctgcacccaaatatgcaagtctgcactccaggttttctagacacctgtgagtttattccagaggaggaaatgtgtgatggccgaacccaaggacgtttcccgattcccgatcaaacgcagtgcaatgagtttgtcacttgttcgaatggtgtgggaagcttggattcctgtcaggatggaacggttatgcgaccacgatttattgattgcgttcctggaaacgagctcacctgtgcagcatatccccacatttgcctcttccgaccgaacgagcacattcctcatccagttagatgtgatatgtttgtatcgtgtatctcggaaatgccacatgtcgtgccctgccaacgaggcgaaatatacaacgccgacagagacatgtgcgtccctggaagtgctgcgtcttgcgtatcattcgaacaagtctgtagtgaccaagaagatggattcataccgcatttgaactattgtgatttgttcatcgcctgtacgggaggagttgccaccgtggaagcgtgcccttgtggtgagattttcgtaccggaaatacagcagtgtctaccgggggatgctgaaacttgtgtgctgcagccggtttag

SEQ ID NO: 159 - DNA, 597 bp, Aedes aegypti
cgacttgccctgcccgacccaagaagttgcgctaaccgcgtgcggcacgccacgtaccgagatgcccgtggtgtagcccattcgtacttcttcagttgggagcacaacccaacccgcaacctggaagtggactggcttgatgcccgtaacatctgccgtcgccattgtatggacgccgtctcgatggaaacgccccaggagaacgaattcatcaagcaacgcattgcccgcggaaacgtccgctacatctggacctccggacgcaagtgcaactttgctggatgcgaccgccccgatctgcagccaccaaatgagaacggatggttctggtctggatcgggagtgaagatcggaccaaccacccagcgcaacaccggagactggagctacaccggaggatacggacagcaacaacccgataaccgtgaggcagctcagggtaacgacgaatcttgcctgtcgattctgaacaacttctacaacgacggtctgaagtggcacgatgttgcctgccaccatctgaagccatttgtctgcgaagattccgatgagctgctgaactttgtccgctcccgtaacccaggaatccgtctataa

SEQ ID NO: 160 - DNA, 1463 bp, Aedes aegypti
acagccatgtttggattccgacatgttttaccttaaataaaaatataaactgaacataattgagttgaaatgacaaaacatataacgtaaaagatgtaaaattatcaacatcaaaagtggaaacagacgtggtacaatttttgaggtttgtcagacttttttatacaagtcctgcaacaggatctaaagagcgtgggccgtaatcgagagtggagagtaccgaccatggaccgagttgaacgacgacatatcgtagcgagttgttgctatgccactgcactgtcgtaacaatctctacgtacggcaagatgtcttacccgtttgctgtcttcccggacgaggtcgactatttcgtggaaagtctgaggaaattccaggttaccgatatagggagtgagagctggtttgaacagaatgaaatcgttctgaagttaactcaacaagcgttcatagaggccagtaccaagcaggaagaggttattaaggaaaaacttctagtcgagggaaagcttccgctgctggtccacgaagcctactgtatcctagtttggaggatgaaagttctgccccaactgttggaatcgtctaatttgcaagcttcgtttgtgctctatagcgtcctttactatgaggtcaatgcgattgctctactggaaactctattatttcatcaaacctgttgcgaagctcttggcgacactgccttagatctcattgactattgcgcccaagctctgggacttttagtaggatatgctaacaacaagcacaatgacgtggaagacccgaaagaacttttacaagaacaaaccgtagatgaattcaaacgaatgaagaccgaaatggacttcaagatcggattgaagtgtgttagcattacgagtcatttgatgaataatctaagcgtacttccattgagtgccacgaatcgcaccattaaaacacacgatgtgccttgtttgatcgcggaaatcttgcattccaagccatggcttcgtagaacagccaagggcttcgaaaagttcctagaaggtcactggacgccagtttatggcgatgatatcctaaaagttaccaaggatgaagtccaagcgtggttttgtttatacgcactactgttcaatgaaaatgcaatgcgaaactatgaagcaacggatttcagaagaaaggaaataggaaggtgtgttggcttgttgaatgatcatatattggaccaagttccggttttggcccaactgaagcaatttttgtgcacttttcaaatgggcagtggacaaactggaaagcaaccggataaactattgttggatgaattgccggagataaaggaagccttactaacggcagctaaaaaagttggatggaatgcaataattcacaagcaccggcaaatttttatcgaactatcgccggacgaaataggcgttatggcaaaaaggtaaaataggggaaagtggggcagt

SEQ ID NO: 161 - DNA, 830 bp, Aedes aegypti
aaaagaacagtatattgaacgaaattacctacggacgacgtgtcagtatcgaaccgtttttcacggtgtacgcacaatcaattgaactatttcaaaatggcaaccaaatgggtttggacgaatgcccacgggccctacccgcccaacatggtctccggtggacaggatagtgacggtgcactgctctatgtcggtcgggcaaatcacgccggggatgttcttccggccaaggtgattccccagaaaaatgccgcctacatcgcctacggtggggaggaagtgctagtcgagaacttcgaggtgctctgccagaaggaactgatctgggacagcgcaacgggcggaaacattccaccggatgcggtcgtcggtggtaacaccgccgatggggaaccactgtacatcggtagagcttatcacgagggatctcaaaccattggcaaggtgcaacggtcacacggatgttgctacattccttacgggggagcggaagtatcggtaccgacctacgatgtgctgtgtgagcggtaaaatgaagtgcgtgttcgaatttgagaatgaataaattttaagggacttgttggaggtagattggttgatttataatttcttgtctaacggctggtagcgactgagtgttgcaaaagcgaacgaagtagtgaacgaatgcctgaagcttttcgtcgaggatttcaataaacaatttctctggattctctggaacctctagaattttggaaaaggattcactgtaagcagaaaagggaaaacatggcattagattatagaggccattttggtcaaaacagaaaatatagagaatatccatg

SEQ ID NO: 162 - DNA, 1739 bp, Aedes aegypti
ttccgtgtaggtagtcatcagtgatatcatcagagcttgatgatgacatgtttcaatcagtaataatcattgaatcgacgcgtcatcataacaaaacactgttttcatacttcctagctaaaaatatgtaattttagtagatttcttcaaatttaattttcttttgaatgcaccggtaaataatgatagaaattactgcccggttgatacgtgatcaaagtgcagttttcctgtgcggagaaaccgtggaatgtttgataacgttcaccaatccttcgctacccgagcatagaattagccagagtaacagtgatatcctggaaaatttggcatgggccaccgtacagatccattgttattgcaattctacagtccaggatcgtggaggctccggaacggaagcgtcgagtgccatgagcaagaatgtcatcggttccacatcgctgaatgctagcaaccagctaaaaggggaagtgctcaagtccacggatcccaagattctgttttgcgatctgcggttgtctccgggggaatccagacaatttatgttccgcgaaacattatccatgaatacccccccaacgtatcgtggagttatggtaaagtattactataaaataacggtggccacacaacgtgttgggaccactgtacaagctttgcacatcccgattcgagtgcttcccctgccaccgatcaattgtagcgacgagacgataaccttaaacgatgaatccaatgaggacctggcgccaaataatccttttatcgaaaagaaaaaagctccctcgaagatagaatacgcattgcactatcttcagaacatcaccgcgcggaggagacccaacttctatttgatttcgaataaaagaggtaaggtgggtcggttctgtttgtttaaaccaatctacaaactcggggaagacattgtcggaacgttggactttagctgtggaaccgtgaaatgtgcgcaattatcggttactttgcaatgcgaggaaatcatcaaaacgaaaactacaaaggcaccagagcagtccgccgctccgggtcaagagaaggacaatgcttccctctcggttgggcgcattacgaactatacgaagcaccacgaggtatgcctgggactgctgcaaacgcaaatgatattgcccattccgctgcacgttaccccgactttcgagacggacctggtggatgtgaggtggcgtctgcattttcagttcgttaccagcaccaacgacgagctgaacatggaagtcgacaaggaaactctggagtggcaagcgccaacggatatttccatcgaaactatgatatggaacctgccggttacgctgtatcccacggctccagtgcagattccgcaagccagcggaacatttacgttgaacattaaatagtttctgaagtaaaataatcgaattgtatgttacgttgatcttaataaattaaaaatattaacaatatacggagaaagatgttttgtatgtaatatgtattcttcgagaattttattcagttatgtagaagtctcgcctcggagagaggattagaagcagaatgtcaaaatgccatagccttacagtaaaagttacattggagtttaatttttttttattgtgaggtccaacagtgttaaggttcctagggtatttcaacatggaaattataggagaaacgcaagaaacctcactaaaaataaaaaaaggatgtagcattgatctttctgacggaat

SEQ ID NO: 163 - DNA, 788 bp, Aedes aegypti
cagtgacttcagcagcaacgcaccaaccaccaactccaaaccagcataatggcattcaagtttgtcgtcttccttgcttctctggccgttgccagcgctggatacctggaagccccagcagtgtcgtacgccgctccagtggcccactactcgccagcctcctcggtgagctacagcagcttgtcgcacgccactcctctggcctatgccgctccagttgccaagactgttgcctactcgagcccagccgttggagccacccatgagagcaccatccgtggacatgatgccaccatctcccatcaatccaaggccatcgataccgctttctccagtgtccgcaagtctgacacccgcatcaccaacgaagcccccaagctggcctatgcttcctacgccgcaccagctgtccacacctcctatgctgccccagctgttgccacctatgcccatgccgctccagctgtggccacttatgctgccccagttgccgtcgctaagcaagtgagctatgctgccccagcttaccagacctacgctcatgctgccccagctgtggccacctatgcccatgctgccccagttgttgccgcccacgccaccaagaccctgacctactcgccagctgtggaggtcgcccatgtcagctacgacggaactcatgcccattatggctggtaaattgcactgcctacggaaaccacaaatgatacaatgatcaatcgtcgttgtgtctatatttattaaaaccaaccgttgttgttatgttttgacagcacgctccggac

SEQ ID NO: 164 - DNA, 555 bp, Aedes aegypti
agtcaagcagttaagtcggtcgggttcagtttagttttgcggcattcgctgtgttgttttgttttcccacgaaggcgcgagattcctataatcaacaatggctaacgttctgtggtccatcatctggttgatcctgttgatcatcgtcggtttctgggtggccttcttctgcgccggttggtatgttctgatctacccactgactgtttgcataccggacgttgcggtggtatcggacttcctactgatgggggcccagtttgcgcattactgtgcgaaaaacatgatggagggcaaatcgttattctaagcgtaaatcatcatcgttctagcgtactatcaccgtcgtatagaatcgcgtttatattctattacatcttatatatttagagaagatttttcatatttgtatatcaatcgacaaaaccgcgtaacatcaagtgcaaatggaagtaccatcgattttattaaacaaaaccactacaaccgttcatcgaatatgtaaagctttaacaccatattttttttagaatacaaccactagttgtataaatg

SEQ ID NO: 165 - DNA, 786 bp, Aedes aegypti
gtgtagcacatcgaagagtgatgccttctggatcgccaccgccttgctgtgaatggttgactcctgtgggtcaacaccacatgtgtacataacaccgcaggagtatagaccgaacgaatcaccagttgtaccattcaacgaaatataatagccagatcaagtgcgacgacattagacattcgtacgcgataactcctccagtaagcatctctccaagtgttgtgtgaccgtgcaaagtattagctcagcgagaacttctccagtgtagcactctacagtacaaaaccgagttcagaatggccaaattgggactgttgttcatcgttatcttctgcatcatccagctgactcttgctgcccgcatccgccgtgatgcttttgatgaggctgtagattctgtcaagaagggaatctctgatactttcaccaaggaaaatgttgacaacttcctcggcaaactatcggaactgggagacgtgatcaagtcgaaggctaccgaaatcggatcgactctgcaggagaaggcccaggaagcgatgaagaaggaataattgagtagtgtagttaagtttaacaaccaccagtgtgctgtgcctcccgaataccaaccagggatttaaagaagaaaaaaaacgaaataaagttgacatcgattgatgaaaatgataccaatcaaataaacctattattacaagaaagaaaaaacatatgaattttgatacgtctttcccgaacgggaaatcttaaacataagcgaacaattagatttattagaaattattacta

SEQ ID NO: 166 - DNA, 1431 bp, Aedes aegypti
atggtcaagttcaagtggcaatacccgattggccagctcaaggtgctcgccaaactgaccaccgaaaggtatataaaacagttgcagtctattgttcaatctttcattcgagccacgtttttctgtgttgccggtcgatcaacagcaacagcgcgagattgttctatcgaagcacaaaattttaccgaacgattcccttcgaaagaagcagttattgtagtgagtgtcgaaaactatctaacaaacatggtgcaatcagtgtgtagtgatgtccacgatgggacgacccagtccgaagccggaagcctggagaaaattgccccgatcctgaagagcatcattgtgaccagaagcaaggacggggccaccgtcgatgaaatcattgatgactactatgatttcaccggagaaagcttgctaaccacgtggcgctcccgagataacatagggaaccttctgcggcaaatcgatggcatatggtccacgtatagtgagccaaacggtccgttcctttggtactgctcatcggacaacacgaggcacatcgccgaaatgatcaagaagcagaaatctccacgcttccataaccggcgataccatcagccagcgcagccttccttcaggactccccacacgtcgagaacgacaacaaccaagaacaacgttaccaacgcccctggtcctcgggacaagttctatccggacaacatgaattttatccccaaacgaaacgcatggaatcgcacgccgcatcgctcggtggccagccatccgtatttgccaccccagcgacgccagatgcagcatcatatgcagaaaccgatgatgcagcaacagtactactctaactcgttttacagtggaccaacgttttgtggcatgcagatgatcggtgacgacttcttcctttcgcttgccagatgggaattgggattccagtatgacccaggacacaatattcaacagagtggcctctgcatttccggccagacaatcgcggaagcagcagaccgcgtcatgaaggccccctacattaacgatcgggtcataatcaacctaggcgtagtggacatcctacatggaaatgactttgtcgacatgcaggaggatttgtaccagctgaagaaaaacctggagaaccgtggtgcacgtgccattctaaccaccctttcaccgctggcgaacagttcgcacataccggacatctccgacaagttgcacaggttcaacaacctgatccgccgatatcagtgggaacacatcgatctctggcggtgcttcgtcaacgaacgggaccaaactttgtacgagtgcttccaaccggcgcccagacaagtcaccggaagcaacaagccacatgttttgtggaataagttaggtcgccaacgtattatcaaattcatgaaaacacaactcgcgagtttgatttag

SEQ ID NO: 167 - DNA, 1490 bp, Aedes aegypti
atgtatgctaaaggaaaagggactgcagtgccgtcggatgcacaagctagggaaaaaattgcactttatgtatatgaatatttattacacgtaggagcatcgaaagcagcacaaacattcttatcggagattcggtgggagaagaatatcacactaggcgaacctccgggcttcctgcactcgtggtggtgcgtgttttgggatctctactgtgcggcaccggaacgacgggacacctgcgagcattcatccgaggccaaagcatttcatgattatggtttcgtgagttcgggctacggagtgaatggaatagcacacaatgccggtccagcgccaagtccgctgggacagttaccaccaaatgagggcatgccaggcggcccgatggcaccagccggtttcttcccgaactcctcaattaggccatcacaaccttcacatcctagtagtgggcagtccccacacccacaaccaccaaactcgcatggacagatgatgagcggtcagccattcatgggaggtccccggtatcctccaggtccccgacccggcgtccgaatgccccaaggaattggaaacgatttcaatggtccccccggacaacccatgatgccaaatagtatggatcccacgcggcaaggtgaagctggagactttgtagcatggcaaggcccccctggaatgggtccgatgaatcctagaatgaatccacctcgcgggcccggaatgggtcccatgggcgccggcacgtacggaccgggaatgcgcggtccaccaccgaacagcagccttggccccggcggtatgcccccgatgggaatggccggcggacggccccagtggcaacccaacacgtcatcgcccatgaactattcatcctcgtcacccggaaactacggtggtccaccgggaccaagtggaccgcccggtcccggaacgcccatcatgccatcacctcaagattcatccaactccggcggcgagaacatgtacacaccaatgaagcccgaattccccatggtcggcggctcggacggtagtggcccgatgggtggacccatggggcccaactcgatgggcggcccggtacttaacaacgacggcctggacggtatgaagaacagcccggcgaacgggcccggaacgccccgggaggactccggcagcggtatgggcgactacaacctcggtggcttcggtggacccggagaaaatttaatcatcaaggaactcttgaagaagataagaccttagcaaacaaaacgaattgacttgaccttcgacttggcgtttccctaacgtactttgtacctacgaatttctgacggaaatcatagactaaggagcagatgcacgcatatgtattttaaaatgttttattgcgcttttaatagaaataaactaaacagtcaatccttacaagctagcatttgtgtttcaggaatgatatatcaacgtttttttggattcaagctaatttaattgttaag

SEQ ID NO: 168 - DNA, 1468 bp, Aedes aegypti
aaaaaagtgcaaaaaactaatttgaggccgcttttcgtcggagcaggaagttttttcttattttgtgctgaaagtttactaaatttaaaaccatattgtgttacaatcaggacccgataagtgcttcttcgagtggtccgtgcagttacggacattggagcgccgaaagcccgacaaaatcatccgccgaatagtgatagtgattgcaactccctgagtgaaaagtgcggaaggaaatcaaagatggctacccagtccgtaaacaaaaccggctccggatggccgcggcgaaccagccaaggaaccttgaatgacatcagcaaaccgcaagggaaccaatccatgacactgaatcggacgatcaatttgtacccactcacgaactacacattcggcacgaaagaaccgttatttgagaaagatccatcggtgccggcccggttccagcgaatgcgggatgaatttgacaaaattggaatgcgccgctcggtggaaggagtgcttctggtccacgaacatggtcttccacacgttctgttacttcagctaggaaccacattcttcaaattgcccggcggcgagctgagcgccggtgaggacgaagtcgaggggctcaaacgactattgacggagactctaggccggcaggatggcgtcaagcaggactggatcgtcgaggacacaatcggcaactggtggcgaccgaacttcgagcccccgcagtacccgtacattccgccccacataacgaagccgaaggagcacaagcggctgtttctggtacaactccacgagaaggctctatttgccgtgccgaagaactacaagctagtagcggctccactgtttgaactgtacgacaactcacagggatatggtccgataatatcttccctaccgcaggcactctgtcggttcaacttcatctacatgtaagcttctgacggcagagaggaggaagcacaggattggaaccataacttaatggcgagcatattaccagtggttcccaggttcgattctcattcgacggtcattgatcttcctctcgaaaaaaaccccgcttccccccgttctaaatcggagggatagtgttgctcgcctaaaactgagaaccagctgctggaaatagaaggtaagatccatcctgtgtatttgtgtgcctgtgtgatgtagcagaggtagtgcccgcggtatcgattgcgatccatcaattttaagaaatgaaacaatctaccacctgatcggtgttgacgctgctggttgtatttgaaacggcgtccggctcacaacggctacggaataaagtcaatggaaattgtattttttactttttttcttgttgcgaagtatatagagaattcataattaattattccagaatatcagagataatcctctctcagtctcccatttcattcattcaatttactctcattaatcgttacatcccggatctagaatgtgt

SEQ ID NO: 169 - DNA, 705 bp, Aedes aegypti
atggacattaaaccgatcccggacagtccgcacaaaacgatgctatccaacccgttgccacgacctgcatctactgccggtttcagttccatgatgcattcgaagttaccgccacaaagcagtatggtaatgcaaacaccgatgcctaccggtcctcaagaagcaatcaactccatactagttagaaactgtgtagcaacggtaagtttgggctgcgaactcaaccttcaggctatcaacttccgcctacggaattccgaatacaatccggctcggtttcacggcgtcgtgatgcgaatacgagagccccgctgcacggcgctggtgttccgatcgggaaaaatcgtctgcaccggggcgcgtaacgaagcggacgcctatctggccgcgcggaaatttgcacgaatcatacagaagctgggctacagcgtacgcttcatagagttcaaagtgcagaacctggtcgccaccgtggatctccggtttcccattcggttggagaatcttaaccaagttcacggacaattcagctcgtacgagccggaactgttcccgggattgatctaccggatggtgaaacctcgggtggtcctgctgatcttcgtcaacggaaagatcgtctttactggagccaaatcagaacgggaggtcaccgatagtttggagaatatttatccgattttgcagagttttagaaagaattag

SEQ ID NO: 170 - DNA, 1680 bp, Aedes aegypti
cggcacgctgtcagatgacagttatactgttgtttataaacagtgaagcgattttgttcgtgaaatcagcaatcaaaatttccaaattcgatttaattactcaaatattacgaatttcataatggtttacattcatttcccgtcaaatttaacggaagaggagttgatgctccaagccaaatatgccaagctgaagaaaaagaaaaaggcactgcaagctctgaaggcacctaagcaagagccggagaaaaatctgattcccaaacgacccgcggatgcccgggatgctcgcgaagttgccaggaagctcataaaaagtggggccatacaggccatccaaaaaccgcaggcgaagcaggagagttccttcaaacggccgaaaggtcaagaacggaaacgctcccagcaggaatccagcccaggtgcgcagtaccaatcgttttcatccgtggaaactccaccgcctaatccagcgtcaagtcctgatacgcctacggagaaagatccagctcggacgccaaacctgtatcaacagtttgccaatgagcgcgataaggaagaacaagccggaaaagctaatgattctcctcgggacaaaccacgctccggcaatacggtttatgtttctggcaacaaggtgacggaagaattcttgaagaaacacttcatcgagtttggggaaatattaaacatttcaatggaaattgaaaaggggcgagggtttataaccttctccaaaacggaatcagcggataaggcgataagtgagctccacagcaagactgtcggtggtatccagcttcaggtgcaactggcaagacggcaaccgcaaataaatccaataaacgatgctggatcgtcttctacatggtctgctttagctacgtaccgctcgcagaaaggcaaacacaaagataaccgagagctggtgtgttacgatcatgatgatatattctagattttaaggtggatgaaatggataaatggtgagtattagtattacattacgtaaattacgtattaaaatttctaatcaaaaaccaagctgagagcaatgcatccgatttttttcgcttgctccaacatgtgtaaaaaacattcaatacactttctaggcagcgtcgaatcgttggcggtgttaaaagaagtataacatttttgaatgaaaactatataaaataatttaaagattagttaataacgtcgatttttgtaaaatttcataaatatagctgatgtttgatctgtttttattatacataacaaattggactctccaatcttctcgttatggtgaagataaatcgaagccaaacctgaaattttcaagatcacaaatcactggtggcgaccaatcgattaggttttcagctcaaacaagtgtgaggttctctaattttgtgttctaaaaagtttgaagtttggcttcgattcatcttcaccttaaataggatttttttccttaattttacgctctgtttccaccatgaagttgagcaaagaacagtcgaaaataataacagactaaaaaatcaggttggaagtgctctaattgattataggattccctgctcgtcaaagctaaatttggcgctagaccctcaaaaaagcgacgttctttttattcgatagtatatgaataacttttaattatgtaataaataaaagaaaatcacgcaa

SEQ ID NO: 171 - DNA, 1107 bp, Aedes aegypti
cagctctactttatcgacccgaaactgtcaagcggggaaaaaagtgcaaaaaactaatttgaggccgcttttcgtcggagcagggagttttttcttattttgtgctgaaagtttactgaatttataaccatattgtgttacaatccggacccgataagtgcttcttcgagtggtccgtgcagttacggacattggagcgccgaaagcctgacaaaatcattcgccgaatagtgatagtgattgcaactccctgagtgaaaagtgcggaaggaaatcaaagatggctacccagtccgtaaacaaaaccggctccggatggccgcggcgaaccagccaaggaaccttgaatgacatcagcaaaccgcaagggaaccaatccatgacactgaatcggacgatcaatttgtacccactcacgaactacacattcggcacaaaagaaccgttatttgagaaagatccatcggtgccggcccggttccagcgaatgcgggatgaatttgacaaaattggaatgcgccgctcggtggaaggagtgcttctggtccacgaacatggtcttccacacgttctgttacttcagctaggaaccacattcttcaaattgcccggcggcgagctgagcgccggtgaggacgaagtcgaggggctcaaacgactattgacggaggtaagtcggcttgttcgattggatttgttccattttttccattattttccagaagatagttgtaagagaagattgtatcaactatcgtttaagaaatgaattttgtgaatctacggtagcttcgtaaatgtaaaaaaagaaatattgtaagatcagttttttcaagctagattatacagaagattatagagatggtctatgcattgtgaaactgtataatcaaaattgtaacaattgtctaggaagaaacatagtttcaaattgaaattgtcaaatgatttagtcaaatctcaatactcagtactcggtggattgatttaccaaaaaacttcggaattcatagtttgaatttcattgaaacttaaaaaaaaaacagtattttgtaccactttgacttgaaattataatgttgtggagcattttttgaaacggcaacg

SEQ ID NO: 172 - DNA, 787 bp, Aedes aegypti
cagaaaacaaagcaacaagcaggacggaatctttgtgcgagtatcctggaagttcgtgatttatcggtggtgttttaattaaagcattaaaagctgtaatattgttaggattcttggttatcgtagtgctaattataatttcttacaatgagtgttaaagacatctattattcggacaaatattacgacgacgagtacgagtacaggcatgtcgtcctccccaaagatattgcaaaactggtacccaaaactcacctaatgacggaaaacgaatggcgatcgattggagtgcagcaatcccgcggctggatacactacatgatccatcaaccggaaccccatattctgctgttccgacggccaaagacgacggcataattaagaaccaacaacattccgaagtatcgcttctcgtgcgccgctatcatgatctatagttttagtgttccatcaaatctcgcccctagaacattctggaaatattctacgattatgatcttgtacaaatggaatctgctagggtaaaaatcgcttttgtctccgtaggaccaaacggcgatcaaaagtaattaggaataactgtacagatagattttcccactggctcgttccacagtcaaaagcaaccacctaagaagagagtgtgagtgtgtgccttttttgtccggaaactcagaggaaacaaaaacccaaactatatactaagttacttttaataaacgtatatttgtaaactgatgtatgacgatgttctgaaactacaataaaacggaaagaaatcattatc

SEQ ID NO: 173 - DNA, 456 bp, Aedes aegypti
atgaatcctcaactgttgcttatttttgtgtctgccttgtttagctcagctctcgccatacgttgctaccagtgttcctcgcagacagatcccaagggggtggacaattgtggtgcatacaaagcattcaacaggacgcagaatatcgccatcgagtgcaacagcgatgaatctcacatgccgggatcgttttgcatgaaggtggtccagcagagcccccgaggattcatctgggacggccgatggcgccaggtgatccgacgatgcgcctcggtatcggagaccggcgttaccggagtgtgcaactggggcgtctacgagaatggagtctactgggaggagtgctactgcgcagaagatggctgtaaccatgcagcgaaatccgtgaccgtttcgggtgtaagcctgttgtgccttctagggttaagtttcctatacagacgagtgttcaactga

SEQ ID NO: 174 - DNA, 2553 bp, Aedes aegypti
atggatttttatgaagcagctcaagctctcacccgcatgcgttccagcgaaggaggtggcagtccgcgagacaagaacttgctctcgcgctcgctgctcgccgcctgcaccgacaacgacgtcaacaccgtccggcggctactgggcgagggcaactcgctgaacgaggccaccgacgacggggactcgctgctgtcgttggcctgttccgccgggtactacgagctggcgcaggttttgctagccatgtcggcccaggtggaggatcgcggtcacaagaacgatctgacgccgctgatggagacggcctcggctggccacgtggacatcatcaagctgttgctgaagcacggcgccgacgtcaatgcccagtcgtcgaccggaagcaccccgctgatgtttgcctgcgcaggtggacacgaggaggtcgttcgggtactgctggacaacggagccaacgtcgaggatcacaatgagaatgggcacacgccgctcatggaagctgcctcggctgggcacgtgggagtggcgaagatcctgctggagcgcggtgccggcatcaatacgcactcgaacgagttcaaggaaagtgcactgacgctggcctgctacaagggtcacctggacatggtccggtaccttctggaggctggtgctgatcaggagcataaaactgatgaaatgcacacagcgctgatggaagcgtcgatggacggccacgtggaggtagcgcggctcctgctagactcgggcgcccaggtcaacatgcccaaggattcgtttgagtcgccgctgacgctggcggcttgcggcggccatgtggatctggcgatgctcctgatcgagcgcggcgccaacatcgaggaggtgaacgacgaagggtacactccgctgatggaagcggcgagggaaggccatgaggagatggtagcattactattacaacaaggtgcgaatattaatgctcaaaccgaggaaactcaggaaactgccctaacgcttgcctgttgtggaggcttcgtggaggtggccgactacctaatcaagcacggagcggacatcgagctgggagcgtcaacgccgctaatggaagcggcccaggaaggtcacatagacctggtgcgtttcttgctggaaaaccgagcggacgtgcatgcccagacccaaaccggagatacggcgctgacctatgcttgcgagaacggtcacaccgaagtggcggacatcttgctctactacggagcggagttggagcacgagtcggaaggaggccggacgcccctgatgaaggcatgccgtgctggtcattggtgtattgtcaagttccttatcgagaagggtgcggacgtgaatcggcatacgaccaacaacgatcacactccgctgtccctggcatgtgccggtggccatcaaaccatcgtggaactgctgctcaagaatggagctgatccgttccataagctgaaggacaacagcacgatgctgattgaggctgccaagggtggccacatcggtgtcgttcagcttctgttggatttccctcattcgctgatcagtgccaacactgccgctcagcaaaatctcctaaacaacggacaaatccaactgcaagcgcaacaacagcttcaacagcaacagcaagcagcccagcagcagcagttgatcatcacccagaatcaacagcagcagcaactgcttgcggcaccacctggcttgcacgaggttcccgaatcgatccgtgtttccaacaagcaaatgttccagcagcatccatccaaagatggcctcgaccagcaacagcagcaacaacaacagcaactgttggccaacaaccagatgctggccaactcgaacgtgttcctcgacggtaacatcgcttcaaccgatccctcaattctccaccagatgcgaatgatacagatgcagggcttcaaagacggcctggcgcacggtctttcgcgagcacctggccaacaacaacagcaacagcagcagcaacagactatcctctcgcagcaaatcccatcccacttagcggctgcccagcagcaacaacagcaacagcagcagcagcaaatcatcctccaaggtaccaacaacaatgctaccgttgtcactcagcaacaacaaaccactgctgtccctggtgtccccgtaggtaacaagcagcagcgaagcctgctgaggaagaagcaacaaccggcgtcgatggcggcggtggccgcagccgcagcagcttcccaacctcagcaaccgctaccgttcgaggcaaaccttaccagctcggaggcgcagcaggtacgcagcgaacccatcggcgaggacaatggcggaggcggtcagcagcagcagcgagcaggtgtggtaatgcgatcggattacgaggcgcagtaccagaagcagatgcgggagatgtaccagaagtcacaaaaagccaacatccagttcatctgcgattcgaatgggccaccaccgacgctgttaccttccactggaacctacatcgatatcaccaccccggctcaagattgtctccgtatagtgcttcgttga

SEQ ID NO: 175 - DNA, 1295 bp, Aedes aegypti
gctagtgttgacgacagttgtcatatttagaaatgtggtctctcgtcattgccatctccttgcttgctattctagtaaaattggaagcatttgttctgcttgacgagaaaagcctacaggttgaagacgcagacgcaaagttgagtaccgtggagcttgccacgaagtacggctatcgaatcgagacccatcacatccagaccgacgatggattccttctagagttgcatcgcatcaccggaagtggatcaacgatgtacgacaaacggattccgccggtgctgctgatgcatggattgttcgcttcctcggctgactgggttctacttggaccggggaatgcactggcttatctccttagtgatatgggatacgatgtgtggctcccgaatgtcaggggaaatcggtactcacggaaacacatcaactacactccgaatatgaataagttttgggatttttcgtggcacgaaatcgcaacgtatgaccttcccgctatcatagactataccttaaacgtcacatccaaggagaagctccactatataggtcattcccaaggcacgacggtgttcttcgtaatgtgttccgagcgaccggagtataatgagaaaattttgttggctcagggactggcaccgatagccttcatggaacatatgaacagtcctttgttgaaagttatggttaaacatcttgatgcaatttcaactattgcagacctcttcagtttaaaggaattcaaacccattccatcagtggtcctcgaagtagcaaagtatctctgcccgcaatcaaaacctgacaacctgtgcgtgaacattctcttccaaattacgggtgccaatcccaatcaagttgatcctaaaatggttcaacttcttttggggcatatcccagcaggatcatccaccaagcagatacttcactttgcacaggaggtgcgatcgggtctttttcagcagtatgaccacggaaagttgaagaacatgtttgtgtacgatcaaccggaaccacccgtgtacaatttgtctagggttgtggcaccggtaagcctgcactatggccccaatgattatttgtctgtcgaggaggatgttctgcggttagcgaagcagttgcccaatttgattgaactcaatcggatagatatggaattattcaatcacttggattttctgatagctaaagatgtgaaagaaatattgtatgataaattgatttcaaatattgaacaatacaattattgaatagtaagttcttgatttacattcaatatatcgggtcgcaagggt

SEQ ID NO: 176 - DNA, 291 bp, Aedes aegypti
atgccgtccgatcagatccaatactcggagaaatactacgacgatgtgtacgagtatcgacatgttatccttccgccggatttggctcgcaacgtgcccaaatcgcatctgatgaccgaaaccgagtggcgaaacctcggggtgcagcaatcccccggctgggtgatgtacatgatgcatgcaccggaacctcacattctgcttttccggcgaccgcgaacggatctccccaagaaagcaccaggcggaaactcgtccagcggacaaggaccgtcccgtttggcggcttaa

SEQ ID NO: 177 - DNA, 1222 bp, Aedes aegypti
tgctcgttcagtgcagtcgtcgggtgtgtgattagaaaaagttctgtttgtgcgaggcaccagttccggacagattagcagcagccatttttccctcccaaagaagagaggtgtgcgtgtgtttaccagcagaaagaagcggatttctgcccccaaagcgataaacgattgtgaagtcgacttagccggaaagaggaatactatctagatagcgaaaaatggctggaggaaaagctggcaaggattccggaaaggcgaaagccaaagcagtttcccgctcggcgcgcgctggactacagttcccggtgggcagaattcaccgacacctgaagaaccgcacgaccagccatgggcgcgtcggtgccacagcggccgtatattccgctgccatcctagaatacctgacagctgagatgctcgagttggccggcaacgcctccaaggatctgaaggtgaagcgtatcacgccccgtcacttgcagcttgccatccgcggagacgaagagttggacagtctgatcaaggcaacgatcgccggcggtggtgtcattccgcacatccacaaatcgctgattggcaaaaagggcggccccgaataaccacctccccaccaccatcatcaagattactaaacactaaatatacacaaagcgaaaacgcgcgccccccctggaagccagacgtcttatatacaaacacaaacacacacattttctgtaacagtttttgcacaagtaagaaatcgcgtcgacacagcaacagagagaatctatatcatagtagaaataataacgtttaaatgatacacatttaacaattgaacaggacattctcgtttgttgtctaatgtttagtatcgttagtgcaaaccgcagttgtttcttcttaaattcaattctcgaacggcggtatcctacttccaaagggtagtatacgatctccttgcttcaccatccttgctattgtattttcctccttcgccttttttttctcttctgtgttgtgacacccggggacgcggatatgtgtgcgcgcgcggaacagcaagccgtttaagcaaaatatcgtcgtcgtgtttaactaatttttaacgcaaattgagagagaaaactaaaatgagagaaaaatctaaaagaaaccctagagagtacataagttaagtgcgtttttcttattatattttcgatgaaaaataataaaattttactattaagaaaagaaa

SEQ ID NO: 178 - DNA, 863 bp, Aedes aegypti
cgaattgatcacaaatcagagaaatcgataccttatagtgctcgtcgtgcagtgtaaaaaacttaacaaaatgtctcaatctcgtgccaacacctctgtaacaacatgtgctcgttcgccccaaataaacatctccttgctagaagcggccgaagacatttccttcgaagcgtacaaacagcccaaaagttccaacaatcggaagcgcagcttctcgcccattgtgaacttcaggtcgccggacatttcgccgatcgcgatgattgaagtgggcactaccttccgagttccgaacagcgtgaacactccggaagtgaaacaatcacgcggtggcaaagggcaaaagaacgaaccgaatcgacgtcccgccaagggcatctacaacacgagcatccccgctccggagaagcgcaaaatgccctacatgattggaacgccgctggccaaacgtgaactggaacatcgcatttcggtggccaacattttgcgggatatgaacctggccaagtacattggcatcttcaacgatgaggaaatcaacttcgaggtgttcctcaccctgtcggagaaggacctgcacgacattggcatcgactgccagcgggacatcgagctgattctgggcaaggtggccgagtacaatgccggagcgtgaagagccgtttcggtggtcacgcctgtattactgtaagtgggtaatgttttaaagatttgaccttaagtgtgctttctaacctggtgttagcttttaaagtattgtaaaccatcaatgttttcagataacaattttataatcgaaacatttgtaatgtactgtagctactaagaataacaatgagaaataaagcaagacaaaaactgca

SEQ ID NO: 179 - DNA, 667 bp, Aedes aegypti
caccttcgagttcagagagttccagtaaagcgcggtcagcaattcacctcgccggagaaatgacccgtccgatatctttcgttaccggtaatgccaagaagttggaggaagtgcgggccatcttgggaccgaagtttccgcgtgagctgctgcccgtgaagctggacctgccggaactgcagggagagattgatgacatctgcaggaaaaagtgtttggaagcggctcggcgcgtaaaaggaccggtactggttgaggacacgtgcttgtgcttcaacgcattaaaagggttaccaggtccatacataaaatggtttcttgaaaagctagagccggaagggttgcataagctgctggacggttgggaagataaatcggcggaagcagtgtgcacttttgcgtacgcgccgggtgaagatgcggaagtaattctcttccaagggcgcacccaaggcgacatcgtctatccgcgaggctgtcgtgacttcggatgggatcccatctttcagcctaaagggtacgacaagtcctacgccgagttgcccaaagaaaagaagaatgaaatttcacaccggtttcgtgcgttgaataagttgagagattattttgtcgcagagaatcaataacgaaactttgtagttaaaatttgatgcagtaaaaacgccac

SEQ ID NO: 180 - DNA, 2329 bp, Aedes aegypti
gttgccccctctttcgccacccatgcctgtccaactgtcatcctcctgcaagtttgttttgttttgaaatcgtttcgtcgtcttatggtcgatgctcgtttttgcgattttacgcgtatttcaattttgagcaggaaaaaaagccacatttcaatccgattccgccatggaaaagccccagaaaatgcccaaggtggccaaggtcaaaaacaaagccccggcggaggtgcaaatcaccgccgaacagctgctgcgcgaagccaaggaacgagacctggaaatccttccgccgccgccgaagcagaaaatctccgatgccgccgagttggccgattaccagcaacggaagcgcaaaacgtttgaagataacctgcgcaagaacagaatggtggtgagcaactggatcaaatacgcccaatgggaggaatcgcagaaggagatccagagggcgaggtcgatttgggagcgggcgatcgacaatgagcaccggaacattacgatatggctgaagtacgcggagatggagatgaaaaaccggcaggtgaaccacgcgaggaatttgtgggaccgagccgtgacggttatgccccggacgaatcagttctggtacaagtacacctacatggaggagatgctggagaatgtggccggggcgcggcaggttttcgaacggtggatggagtggcaaccggaggaacaagcctggcaaacgtacatcaatttcgagctgcggtataaggaaatcgacagggctaggcagatttacgagcgttttgtgatggtccatccggaaatcaagaactggatcaagtatgctcgattcgaggaggcccacggattcatcaacggagctcgatctgtttacgaacgggccatcgagttctttggggatgacaacgcagatgaacggctgttcatcgcatttgcaaagttcgaggaaggtcagaaagaacacgatcgagtccgggtgatctacaagtacgcattggaccatctgccgaaggaacggacggcagatctttacaaggcgtacacgattcacgagaagaagtacggcgatagatcggggatagaagacgtcatcgtttccaaacgaaagtttcaatacgaacaggaagtagccgagaatcccacaaactacgacgcctggttcgattatctcagacttgttgaaaacgagacgaaccaggaagtgatccgggaaacttacgaacgggccattgctaacgtccccccagcgaaggataaaaacctctggcggcgatacatctacctgtggatcaattacgccttgtacgaagaactggaaacggaagatctcgaaaggactcgccagatctacaaaacctgcctggaactcatccctcataaagtgttcacattcagcaaaatttggttactctacgctcagttcgagatccgctgtaagaatctacaagtagccaggaaaacgctcggaatggcaatcggtatgtgtcctcgggataaactgttccgcggatacatcgatctagaaatccaactccgagagttcgatcgctgtcgaattctgtacgaaaaattcctggaattcggtccggaaaattgcatcacctggatgaagttcgccgagctggaatccctactgggcgacatggaccgtgctcgggcgatttacgagctagccattcagcaaccgcgtttggacatgccggaactgctttggaagagttacatcgactttgaggtgcagcagggagagttcgacctggccagacaactgtacgagcgtcttctggagcgaacgacccacgtgaaagtttggatctcgtttgccaagtttgaaatggcggcggagaacgaagacaacgtcaatgtgcaactttcgcggcgggtttacgagcgagccaacgacagtttgaagaacgcagtcgaaaaggaaacccgtgtgttgatcctggaagcgtggcgtgactttgaaaaagaacacggcgacgaggaaagtttgaggaaggtgatggccaagatgccacgaaaggtcaagaagcgacagaagatcatctccgagagcggtgtggaagagggctgggaagaggtgttcgatttcatcttcccagaggatgaaatggcgagaccgaacttgaaactgctcgctgctgccaagagctggaagaaacagaaagacgtacccgttgcgcctgctgctggggcgaatgagagtgagagcgccgatgctgcggaagaagaaccctcagaagattagtcgttgcatgtagatattagaataataaaatcataagtatttgataattccatgttttgggtgtcctacgttaggcagatgggcttt

SEQ ID NO: 181 - DNA, 1375 bp, Aedes aegypti
cacacagcacaatagtagcttctaagttgttgggggtggtttaactcacggtgcttactttatttccgcccttcctttttcccgtcggacggtttcgccttaatcggggtaacctgttgattcatagacgcgtacttccggaagcagttagtgcgacgcaatcaagtgtgacttttggcactcttacagagaaaagccattcattgcttcgattaatcatcgtaacatttgaacggagaccgaaatgcaagccccgcagttcaaagactttgccaaggagatggtggactacatcgccaactacctggagaacatccgcgatcgtcgtgtccttccggaggttcaaccgggatacctcaagccccttatcccgtcggaggccccggagaaaccggaaagctgggaagctgtgatggccgacatcgagcgtgtcatcatgcctggtgtcacccactggcacagccccaagttccacgcgtacttcccaacggccaactcctatccagcgatcgtggccgatatgcttagtggtgcgattgcctgcatcggattcacatggattgctagccccgcgtgtaccgagctggaagtcgagatgctcaattggttgggtaaaatgcttggactgccagaggagttcctagcaagctcgggaggtcaggcaggaggtgtcattcagggaaccgctagtgaggctactcttgtggcgttgctcggtgctaaagctaaggctatcaagcgtacccaggaagaacaccccgagtgggatgaaacctacatcatttcgcgatggttggatacacatctaggtatcgaaactgctgattcgtttaactttaacccacacaagtggatgctggttaacttcgactgcagtgctatgtggctgaaggaaccgtactggatcgtcaacgctttcaacgtagatccactgtacctgaagcacgacatgcaaggatcggctccagactaccgtcactggcaaatcccattgggcagacgcttccgtgctctgaagttgtggttcgtgctgcgtttgtacggtgttgagaacatccaagctcacattcgccgtcattgcgcttttgctaagcaatttgaggctctttgtgtcgcagacagccgttttgaaatcttctcaaccgttcagatgggtttggtgtgcttcagattgaagggaaacaacgaaataagcgaagccctgctcaagaagatcaacggacgaggaaagatccatatggtgccgtcaaaggttaacgatgtctacttcttgcgtatggcagtatgttctcgattcaccgaagcctcggatatcgagtactcctggaacgaagtctctgccgccgctgatgaactgttggccgaaaagaagtaa

SEQ ID NO: 182 - DNA, 494 bp, Aedes aegypti
ctactgtacagtagctgcagtatctaagatccaagctttgttttttcctttgaaaatctcaccaaccatatttcagcaattaacgacagcagccgatggcattcgcgccaatccagaaatacaaacctggcctgttttcagtcgcttatgtgactaccccgaccgaaggctctgcaatgcaattagctcgcgaattgatcggtcgaaggatggctgcttgcataaacattatcccaggcgttgtttcgttctttgagtgggaaggcacaatagtcgagcaccaggagagcctaatgctgatcaaaactcgcagttctcgggtggaggaactgtgcgaatttgtgagagaaaatcatccatacagtgtggctgaagttgtggtggttccgatcgagaacggaaatccggcctatctgacgtggatgtgtagaatggttacagagtagtggattgcaaacatagatcaataaatggaaacgttacttcattttaga

SEQ ID NO: 183 - DNA, 837 bp, Aedes aegypti
atgggtggaacaaaggagggagaccgagaccgagtgacgaatcaaacacacgtgcaggtgcagaacaatgcagtccagagcaaaattaccaacagcaggcccgtcaaggacaataaaccgagggggcgcatgacagcgtatgcctttttcgtacaaacctgccgcgaggagcacaagaagaagcacccggaggagcaagtcatattcgccgagttctcgcggaagtgcgcagaacggtggaagacgatgttggacaaggaaaaacagcgcttccacgagatggccgagaaggacaagcagcgatacgagctggaaatgcagaactatgttccccccaagggcacggtcgtcggccgcggcaagaagcgaaaggcattcaaggacccgaacgcacctaagcgatcactgtcggcgttcttctggttctgccacgacgaacggaacaaggttaaggcactgaatccggagtacggcgtgggggacattgccaaggagctgggccgaaagtggtccgacatggacgcggaagtcaagtccaagtacgagcagatggcggagaaggacaaggcgcggtacgagcaggaaatgaccgagtacaagctaaaatgcaaaaacgaacagggcggcggtggcggcaccccgctcaacctcggtggactgcagcaaaccggcctccagaacctgccacagcacgtccaacaggcggcagcggcccaactgcaggcgcaagtccaacagcagctggcggcccaggccgcggtagcagcggcagcccaagcggcggcacaccacgccgacgatgacgatgatgacgtcgacgaggatgataacgagtaa

SEQ ID NO: 184 - DNA, 897 bp, Aedes aegypti
tagtttacgatttgttaaaagcgagcgtcgtgtgtttgaactcgaaacgttttctccatattttgtattgaaaaacgccaaaaaatgtccatcggagttccaatcaaggttctgcacgaagcggaaggacatatcgtgacctgcgaaacgattaccggcgaagtgtatcgaggaaaactgatcgaagccgaggacaacatgaactgccagatgacgcagctgaccgtaacctatcgcgatgggagaacctccaatttggaaaacgtctacatacggggatcgaagattcgattcatgattttgccggacatgctcaagaatgcgccaatgttcaaaaagcaaggggccaaagccggcacggctggcagaggaaaatctgcaattctacgagcgcaagctgcgagaggtcgtggtcgaggaggcggtggtggtggaggtggtggtggtggccctggaaatcgccagcaaggtaaaggtaactggcaaggtcaaggaccatctggcggaagaggtcgaggaggattgtaatcttaagaaatcataatatttaagtcatttgaagtatgtagatccagcagtgaaaataagaaatacattgagaatcctttcaaagttgtatgttttatttgtaattgctgagcatggcgtcgatctgtaaagaatgcaaatgttaaggtgaagggggcacatctcctgttcttgggattacattttccagggagacttatgatatttagtcgttgcatttcgtggtgttgattcgcatttaaatactgaaactgaagttttatggtagcactaaccgtacggccacgaagctcacaatgacaacaggtgattttattttctgatttttctgttctcattccaatccaactcataccgtaaagtgccgta

SEQ ID NO: 185 - DNA, 1399 bp, Aedes aegypti
ggaacccagaaacttttatattatttcgtttgtgatagcagtgaagtgaactatccggcgccgataagcgtgcaatcgattcgactcccgttgcggaattgtaaacccgtaaacaacaagcggaaacaaccatggatcagatgcagcttagtccggggttttcgatcccgagtatcggcaccccgctacatcaaccggaagaggatcaacagattttgccacatgcctatcaacagcagcagcaatccatgccccacatgactccgatgggaggcctcagcgcttacggattaccctccggaatgaacacacccggcaaaagtatgcacacgtatgcgcccagtttcgcggccccacagagcatgatccaaccacagacaccgcaaagcctcatgtccccgatggtgccgatgacggagagcaaggcttcagccacccccgtacacaacagcggaagcagcgtgcgggatccggacaacatcggaagcgtgaacatccaccagacgatgggtcctgccacgccaatgactccgatgaccccgagcgaaccggccatcctgccccagttgcagaatattgtgtccacggtgaacctcagctgtaggctggatctgaagaaaatcgctctgcacgcgcgtaatgccgagtacaatccgaaacgtttcgccgccgttatcatgcgaatccgagaaccacgaaccacggcgttgattttctccagcgggaagatggtgtgcaccggggcgaagagcgaggaggattcccgactggcggcccgaaagtacgcgcgaatcatccagaaacttggatttacggcaaaattcctcgacttcaaagtacaaaacatggtcggcagttgcgacgtgcggtttccgattcggttggaaggtttggtgctaacccacggtaagttcagctcctacgagccagagttgttccccggattgatctaccgtatggtgaagccgagaatcgtgctgctgatattcgtgtccggaaaggtggtactgacaggggccaaggtgcggcaggagatctacgatgcgttcgataacatttatcccattttgaagagtttcaaaaagcagtaaccctggggaagattcattccttttattatatgttaagtactatgcccttgattttcctgagttacttgcatttcttcattgcgttctgaaagtgatttattgagataatgtaaggcaaataattgctgattcgccgcgaaggacaattttgtttgaataaataatttctttaatgaggttcaatgcaacgttttcaggatattgcgaggtaatgatatcctttttaccaaacttgggacggtttcccctgagcaggaatgtaattctaatccataaaaaatcgataataaaatgaattctgaataaat

SEQ ID NO: 186 - DNA, 1257 bp, Aedes aegypti
atggagaagttactcacctctatcttactagcgacgcttatcgcgttgattcacgcagctccatcgtacggcgacgcgactcgagcatttcaagtggaagacgcagatgctcggctcaccgttccgcagctaatccaaaagtataactaccccgtggaagttcatcacgccacaaccgaagatggctatgagttggaacttcatcgcattcctagtctacctggatctccggtggttttcctaatgcatggcttgctgtgtagttcggccgactggatcatcataggtccgaataacgccttggcttacctactcgcggaccaaggctacgacgtatggatgggaaacgctagagggaatcgatattcccgacggcatacatctctaactccaaacatgcacgcattctggcagttctcctggcacgagataggctactatgatctccccgccatggttgactacactctcaatcaaactaatcaaagcaagctgcactacatcggccattcgcaaggaaccaccacgtttttcgtaatggcgtctacccgaccggaatacaacgagaagatccgcttgatgcaagctttcgcaccagttgcgttcaccgaacacgtgcgaagtccccttctgaaggtcatgtcgcgcttccaaaactcgctgaccgccctgttcgccacgttcggcgttggagagttccttccgaacaacgccatcttgcacgaggttgcccaactgttctgctcgaaggacgtcgactggaatttgtgcttgaacgtcatcttccagatagccgggtccgatccggaccaggtggaaacgcaaatcgttccgattttgattggccacaccccggccggagcggccaccaaacaggtcgtccatttcgctcaggggatgcgctcgcatctcttccggcggtatgactttgggaaaattaagaacctggccgtttacgggacgccacagccggcggagtacaacgtgactgacatcagcgccccgataatgatgtactacggactgaacgactatctggccgagccgaaagatgtgctgcggctgtccggtatgttccggaatctggagggatgcaagcaaatggcgatagacagcttcaaccatttggactttctgatggccagagatgtgaggcgtttgttgtacgatgaggtgattgggaggattcgcgagtggagcgattgatgggaatgggaatctcgtaagaataaagtgatgtttaaatgttgaattttg

SEQ ID NO: 187 - DNA, 1993 bp, Aedes aegypti
caaaggcacgggcctgcttggacttactttttttctttcgccttgaatctttctcctcgcggttccattcgcagtggtgtattgcgtctgacgtgcgttcgttttttgcttccatcactttacctttggaactttgcttttgaaaacaaaacctcgaacaagcagtgcggcataaaaaaaaagcgtgaatccatcaataaagtgcgcgcaaacccatacccgcgggaaccggttgtcgctccatcacccatcatcaagttagccatgaccttggccaacgccagcggcccttcgatggccgcttggcttacacttcttctctgctgcggcacaattcagacaccgcctactttggcggcagcagcagcagcggcaggtgaaagcatcttcgataacatcatcaaccagctgatgtcgacggcggccacggctcaaaactatctggacgccaccgctggaccacagcaaaatgtcagggaaccatcgctcgcttcggtggacgtttcgtcgtcgtttctgggcaacggattgtcgacgattggctcctacgaggagaatacgccgttctggaatccgttcacctggctgaaaccgagggccgtttccattccgtacaatcccgacacggatttgactacgccggaaatcgcagtacgccatggttactgggccgagtcgcacacgattaaaacaagcgacggctacctgctcacattgcatcggattccatgcggtcgggtaggatgcgcagggtctagcgggggcaagggttcgggacagccggtctttctccagcatggcctactgtccagttcggccgattggcttctgagcgggccggataaggcgttggcgttcatcttggccgacgccgggtacgatgtgtggcttggtaatgctaggggcaatacctactcgaggaagcacgtctcgatgagtagcgacgagacggcattttgggactttagctggcacgagatggccctgtatgacatcccggcggagattgatttcgtttatggaatgagagaactggaacaaaacgacacccggcgaaacctgctgtacattggccactcgatgggtacgaccatggccttcgtgatgctggccaacatgccggagtacaacgacaagatacaggcggtgttcgccatggcgccggtggcgttcatgggtcacgtgaagagtcccatccggctgttggcgcccttttcgcacgatatcgagatgatcctgaagttcttcgggggtaacgagttcatgccgcagaacaagatcatccgctacctggctaagtacggctgtgagttgaccgaagcggagaagtatatctgcgagaataccgtattcgtcctgtgcgggttcgacaaggagcaatacaacgccacgctgatgccggtaatcttcggccatactccggcgggtacttcaaccaagacggtagtccactacgcccaggagatccacgacagcggcaacttccagcagttcgactacggcgaggcggagaatcaacggcggtacggacagccgcaacctcccagttacagcctagatcggatcagcactccagtggcgttgttctatgctaacaacgattggctggcgggaccggtggacgtggccaatctgttcaaccggctgacgaagacctcgatcggtatgttcaaggtgccgaacgataacttcaaccacgtggacttcctttggggcaatgacgccccggaggtggtctacaagcagctgatgatgttgatgaagaggtacaaatagggtaggacaggtggtatgttaatacataagtagatctaaggatggaaaacgtggcatttaacccccgacatgacaaattcgatgctttaatattttgttatacttttaggcgatagagtagttgaactccagatggcgatgagttgtacacctgcttatatacaaacgattatttgtagactttggagcttgattatttcatccgaaaatcctagaa

SEQ ID NO: 188 - DNA, 1314 bp, Aedes aegypti
cgcacttctggaggtgtgataaggaaattactatataaaattcctggggcgaaaatttggggacagtttatcaaatatttccaagtgatcaacatagaatgaaacagttgcttctagtctttgccgcactagtgtttgccgtggatgcgcagattcatccggatattatagaggacgcccatttggacgcggtatgttcgtgaatgagacgcgctcggactcttacgaaagtacggttatccagccgaagagcacatcgtagaaaccgatgatggctacctcctcggagttcaccgctgcccaggaagcccaatgtcgccaccggcgcccggaaagcccgtagttctgctgcagcacggcatgctgagttcttcagccgactacatcttgatgggaccgcagactagcttggtctacatgctggccgatgccggatacgacgtttggctgggcaatggccgcggcaaccgctactccaatcgtcaccgaacgcggaacaactcgacccagcagttctgggacttttcgtggcacgaagtaggcagcatcgacatcccgaacatgatcgattacatcctcgcgagaacgggacagcaaggtctgcagtacgtgggccattcgcagggaacgaccgcattctgggtcatgatgtcgcagcatccgtactacaaccgtcgagtcaagagcgctcacttgctggctccggcggcttacatgcaccacacccgtagtccctatgtcatcttcctggccactttcctgcacaccaccgagctgatgatgcagatgatgggaacctggtactttgcaccaaccaacgagatggacattcaaggcggactggacaactgccacgatggagcacctttccagcagatgtgtaccatcaatactttcctgattgccggtttcaacactcaggaggtcaactacactatgcttccggtgatccacgcgcactcccctgccggagcgtcggccatgcagatgatccaccacgcgcagacgatccggtcccgaatcttccgccagtacgaccacggacctacgttgaacatggtccggtacggttcgatggttcccccgcgctacaacttcgacaacgtccaggctccgaccctgctctaccacagcaccaacgactggctggcggctccggaagacgtcgaactgctccgtcgggaactccccaatatccacaagcagtacctcgtacgacaaccgcagttcaaccacatggacttcatctgggccatcaacgtgcggccgctactgtacgacgaattgctgtcggatctgagggcatacgcctag

SEQ ID NO: 189 - DNA, 1621 bp, Aedes aegypti
gagacgaacagacgtgttttaatgacgttcgttcaagtaattttaattgtgctattttgtgttggagtttgatggacgaaatttcccagtgatcggattgtggatttacgacagatacttctatttcgcgcgattgtgccaatttctttgcttattctacattaaaaatctaaagccaataccgttgatacaaataccagttcaatccaatttacgtccacgagcaatgcgaatgttttatggacccccaagtgataccccttagcttctgtaatcttatcagtgaggccagtttgctatatttgttaaaccggtcatttctttttttcgcaaccgataagctacccctgtttttgagcgataccctctgttgatctgaggccaatgggtcaagctcagttcatagttaacctcggagacgatgagagaccttatttcggtagcgttactgttggtaatggttggacttggctacgcccaagtccatccagatatcgctgaagatgcctatctggattccctaggattgcttcgcaaatacggttaccccgccgaggagcacatcattgaaacggacgacggctacctgttgggagttcatcgctgtccaggcagtccagtgtctcctccggctgccggaaaacccgttgtcttgctgcagcatggaatgctgagttcttcggcggattacatcctgatgggaccgcagaccagcttggtgtacatgttggccgatgccgggtacgacgtttggatgggtaactcccgcgggaatcgttactccaatcggcaccgttcgaggaacaaccagacgcaggtgttctgggacttttcgtggcacgaagtcggcagtgttgacgttccgaacgtgattgactacattctggcccggacgggacagcaacggctgcagtacgtgggtcactcgcaaggaacgaccgtattctgggtcatgatgtcccaacatccgtactacaaccagcgggtcaagagcgcccacttgttggccccggccgcttacatgcatcggacgcgtagtccgtacgtcatcttcttggctgcgtatctgcacactacggagttgatgctgcagatgatgggcacgtactactttgctccgacgaacgagatggacattcagggagggatcgacaaatgccgtgacggggctccgttccagcagatgtgcacgatcaccactttcctgatggctggattcaactcgcaggaagtcaactacacaatgctcccggtcatgcacggtcattcaccggccggagcgtcagccatgcagatgatccaccatgcgcagacggtccgatcgcagatcttccgccagtacgattttggtcctacgcagaacatgatccgatacggatcgttgaccccgcccaactataatttgaacaatgtccaggcgccaacgctgctctaccacagcaccaacgactggctggccacgccggaggacgtcctgctgttggccagtcagctgccgaatgtccgcaagcgttacctcgttccgatgcacgagttcaaccacatggactttgtctgggccatcaacgttcggtcgctactgtacaacgagctgctggccgatttacgagcgtacgcctga

SEQ ID NO: 190 - DNA, 1215 bp, Aedes aegypti
atgagtttgtcgaagcgggcgttgattgtagtggttatttttgcagcgttgaattttgtgcattcctcagaagatagttggtttcaaattgacgatgaggatggaactttgacaactcctgaactgatcagcaaatacggatacgaggtggagagccactcggtgaccacggaagatggctacgagttgacaatgttccggattctaccgcagcagccctctgaaactcccaaacttcccgttctgatggttcatggcctcgagagcagtgcagtggatttcatcatcatcggccctaacaacagcttcgcctacttgctcactgacaacggttatgacgtatggttggcaaacgcacgtgggactcggtattccaagaaacattccacgctaccggttgactccaaagaatactggagcttttcctggcacgaaatcggttactacgatctgccggccatgatcgattacatcctgaacgcgacaagtgtcagtaaactgcaatacgttggtttctcacaaggttgcacggcctacttcgttatggcaactactcgtccagaatacaacgaaaagattgcactgatgactgcgctttcgcctcctgtgattgtaaagcgagtgcgcagtcctctcgtattgctactttcggaagtgttgaaggagtttagaaaggtcaaagcttctttcaaagacttcgagcttctcccctattcaaacgaataccgcacaatagcgcaggcaatatgtactgacgatgctcgcggaaatatttgtcagaaatggatatcgctcatcgttgggccagatccggacgggtatgatcaaaaggtgatgacggtatacgtgggacatacaccggccggtgcatcgatcaaccaggtcattcactacgcgcaaatcgctcagagtaaaacgttccaacagttcgactacggacggaaagagaacatcctgaggtacggttcgaagaaaccacccgtctatgacctccggcttgcaacggcaccggttatgatctactacgctctgaatgactggctggtgcatccacgagatgttcaggaactggcgaaagtgcttccaagggtggttgaagccgtgccggtggccgacaaacagttcaaccatctggatttcgcgttggcaaagaacgtccgaacgctgctgtacgatcaggcgatccaggtgatggagaagttcaatgagatttga

SEQ ID NO: 191 - DNA, 1212 bp, Aedes aegypti
catccacaggaaatcattccacctatgctgacggcatcactaacaactctcctgatcacagccggggccatccaacgtgccctggccggcacggaacaacttgtaaaacgaatgggtcttccagtcgaaaaacaccgagcagtaacgtccgatgggtacgtcctgaccatgttccgcattcccgcgaacaataccaactctccggtagcgttcctgcagcatggcctcatagcctcgtcagccgattgggtcatcctgggtcccggtaaatcgctagctcactcgctggtcacagcaggctacgacgtgtggatgggaaacttccgaggcaacaccatctcccggaagcacgtctcgttggacccggcccaaccgcagttctgggacttcagctggcacgaaataggcctgtacgaccttccggcaatgatcgattacgttctgaagaagaccggccaaaagacgctacactacgtgggacattcgcaggggactacggcattcttcgtgatggcgtcaatgaagccggaatacaactccaaaattctttcgatgcaggcgttggccccgattgcgttcatgggtcaaatgaagtctcctttcatacgggcgatagcaccattctccactcagattgagtggaccatgcgtatgttgggcgtcaacgagcttcttcccagccacaagatgatgattgccggaggccagaaggcttgtgaagacacctcgactctccaggaagtgtgcgtcaatgtgatcttcctgatctgtggatacgattcggcccaactgaaccgaaccctgctgccgaccattgtgcagcacactccggcaggggcttccgtcaagcagttggctcactacgcccaagggatcaacagtgggcgtttccgacagttcgaccacggcgtggtgggtaacgtgatgaactacggatccagtacgccacccagctatcctctgaagaggattacggcgccggtgtttcttcactacggagacaatgactggttggcggcggtttcggacgttcgtctgctctatcggcagctcggcaatgggacacggttgcttcgggttccggagaagcagtggaatcatctggattttatctacgctacgggagcgaagagtttgctgtacaatcgagtgatggatttgatgaatcggtataataatgcaatgccggagaaatataggatggaagaatga

SEQ ID NO: 192 - DNA, 351 bp, Aedes aegypti
atggcattcgcgccaatccaaaaatacaaaccaggcctgttttcggtcgcttatgtgactaccccgaccgaaggctccgcaatgcaattagctcgcgaattgatcggtcgaaggatggctgcttgcataaacattatcccaggcgttgtttcgttctttgagtgggaaggcacaatagtcgagcaccaggagagcctaatgctgatcaaaactcgcagttctcgggtggaggaactgtgcgaatttgtgagggaaaatcatccatacagtgtggctgaagttgtggtggttccgatcgagaacggaaatccggcctatctgacgtggatgtgtagaatggttacagagtag

SEQ ID NO: 193 - DNA, 1161 bp, Aedes aegypti
tccctaattctcaccaacgatcatcggaaacaaaaccgatggagacgcatggcaaggctcatcaaagagaacaaattagctcaaatttcgtgaagggattttacgacactaaaacgtaggaaaagtacgccttggagagatttccagatttagtgcatctgatacaacgttttgataaccagtcagagttgactatatgcacaaaaacggctactaaaacttgtctcaaataaaaaattgatgtttcccctatttttgaacggttgctttaaacatatagatgttctaaaatcatgcgttcacttcaaaagtctacatcaagcctgttttagtactggcgaatgaatccaaggaagatggtaaatcactaaaaacgcgcacgtgcatctacgttcattccatccctcatagccaactgctttctgtccattccttcacttctaccgttctcaacggcagacataaaccgtcattagacaagcagcagtgaactccaatgattttgccggcaataacaatctttacgctgttgttctcatttacctcgatagacgttaaaggcacctttgctactgctatcagcgaacacgacggtgattccagtgtcattggaggagaaagcttacacaatcacttcgatctagaaaaccagctgtcctgtcccaaaccgagctccggaatgtcttccgaaaagtacgaacccggaacgcactcgattgcctacgtgacgactccgaatgccaactcggccaaagagctggcccggaaattggtggaacgaaaattggccgcctgcgtgaacatcattccagggttgatgtcgatctatgagtgggaaggcaaaatcaacgaggaccaggaaattctgctgatgataaaaacgcgcactgcccgggtcgacgagttgagcaagtttgtgcgggagaaccatccgtacagtgtggccgaggtgatatcggttccgatcgagaacggcaatccaccgtatctggagtggctgagcaagactgtgtcggaagtggcgatgaaatgatggtgagatgagaacgaagtgaaacaattctcgagtttaagacttttctcaaacatatgactttggttttggtgtgagtggtttggttttgaatgtgtaaatatatactttaacgatgcatttaaaaa

SEQ ID NO: 194 - DNA, 502 bp, Aedes aegypti
atggcgttcaatccacagcaaaagtacaaacccgggctgcattcggtcgcttatgtgactacccccaacgaggagtccgcgttgaagttgtcacgaaagttgatcgagcggaaattggctgcctgtgtcaatatcgtcccgagggttgtttcgatctacgaatgggaaggtaaaatcaaggaacaccacgaaattctcctagtgatcaaaacgcgcactgcccgagtggatgagttgtgtcaatttgtgcgagagaatcatccctacagtgtggcagaagtggttgcgttgtcgatcgagaatggcaatccggcttatttgacgtggctgagcaaggcggttccggaggggaagcattgaagataattttatcgagagttagattagtaagattaatcaactgctgctttctcggtactagtttagtgacctgttggaatgtttttcgatcgacatttttctgtgttgaaaactcaataaaaaatagatatcttttaatagt

SEQ ID NO: 195 - DNA, 3399 bp, Aedes aegypti
tttgtgagtggtttcatttctgtgtgtggaaaattcgcaacgcgacgacttcgtgagcgatgcgatgagatgtgaagagagagaaaatccagtcagttcacacatctgtcagatttgggatcgagtgtttttactcttgcgttcccgtgcgaagttaaattttctttttttcgggaggaaaaccgcaccgtttcctgccgttttccagctttagtttcgcgttccggatgttctctagctagggtggtttgcaattcgcgcgagaatcgatcgttcggtggtgaaattttgctcggatgtgcgattagtagttagtgggggcagtcgctttcgtcggtgggggagtgagtgagagggggagatattggaacaacacctacaaaaaaaaaaaaaaaaaaaaaaaaatccgcaagaggatccgtttttgagggcgattcgacagaggaggaaaacgaatgccgcaaccggaccgggatagcgaaggcaacaacaaaatgacgatgaacgacgatggcaatgggacggggaacaacgccgtgacaaattccaccaataataactccctttcgacaactaacacaacaaatggaaccaatggaggaggaggagcaggaatgggaactcccggaaccggtgtcaacaacaacaacggaagcaagctgaacaatctggacaaaaggcctagcagcggtggtaataataatggaagcagcaacggtggaaccaacgccagctcccggtttatcattccgcagtcgcacgaaatcgaaacccttccccagctgaaggattctccgcccagcgaaagggaagaactgttcatccagaagctacgtcagtgctgtgtcctgtttgatttttccgagcccctcaatgacctcaagtacaaggagatcaaacggtgcgccctgcaggagatggtcgaatacctgagcagccagcagcaggtcattacggaggccatctatccggaggcggtgcagatgttcgcagtgaatctgttccgcacgttgccaccgtcgtccaatccgaatggggcggagtttgacccggaagaggacgaacccacgctcgaggccagctggccgcatctgcagtttgtgtacgagctgttcttgaggtttctagaatcgccggacttccagccgagcgtggccaagcggtacattgatcatggttttattttgaatttgttggaactgttcgactcggaggatccacgggaacgcgacttcctcaagactgtcctacatcgggtgtacgggaaattccttggcctgcgggccttcattaggaaacagatcaacaacatattctacaagtttatctacgaaacggaacaccacaatgggatagccgaacttttggaaattttgggcagtattattaacggtttcgctctgccgctcaaggaggagcataagcaatttttgctcaaagtgctgctgccgttgcacaaggtcaaaaccttgtcggtgtatcatccgcagctagcatactgtgttgtgcaatttctggaaaaggatcctagtttaacgcaaccggtcattaagtgtctgctgaagttctggcccaaaacgcatagccctaaggaagtgatgttcctgaacgaactggaggagatccttgatgtcatcgaaccggccgagttccagaaggtgatggagcctctgtttcgacagattgccaaatgtgtttcgagtccccatttccaagtggccgaaagggctctgtattactggaacaatgagtacatcatgtcgctgatttcggaaaactccaaagtaatactcccgatcatgtttccggccctgaacagcaactcgaaaacgcactggaacaaaaccatccacggtttaatctataacgcgatcaagctgttcatggaaatgaatcagaagctgttcgatgagtgtcaccggaaatttaaagccgaagagcagaacgaaatggagaagctgaaccgacgggaagagctctggcagcaggtggaaagtttggctcggcagcatccgatctatccgaagtttgccctctccgatgacgaaggatcagcagcgatgggttctggtggcgagctggttctcgccggtgctacaaactccacacaagagaaggacaaagattcgatcctgggacggacgtacaacagtagcaacaacagctcctccagatcgtcaccggtgatccagcagaaaacttaaagccgttccggggagtttttgctacgtctttacattttttctgttttagcaagtacctttttaaaacatgcgagagcgaatgggaaaagttagtaaacgaaggatattttcttttcgaaagagcgttgcgaatatatgttttaacaatggaaagaataaaagattactaatttaggtaaaaattgaagcaaagatatgagtatgatcaatttataatatatatattaaagaacacgctaagcgttagccctcacggttaaacatcaagccgaacgatgtgcgctaatacacgatataagaaagaaactagagagctaaaacgttttgatgcttaactgctgcacagagaaacagacacaaactcgtttagtacagtttaggggctagcagcgaccaacagaactcttattcttcgttttggcgattcagttcgctcagatagaatcactttgcaatttataaagtcgaacattttactcttttttctttacacatatagtttaatgacaagaaaagtatgttgtagtatataggttcttttgaatattgacgaaggaagcaaaaaaatctactattcgataattatcagtccctacttcaaactttactcttttaaggcctgaaacactctacctgtactattttactgttaaaaaccgattcatgcaaacagcaaatgctctagaaagtatagaaaatggcacacgaacacacgaaaaaattctcacacgcaatccaacaatatggaaacaaacccagaagtagtccaatcactgtatgtaaagttataattttactctgagacataaaaataaatatggattaatttatcttcattacccggaatcgatcgtgcggtcggtggttccattccgtctggatgctggattctcttctccatttccgagtgaaaccaccccgaacgatgataccgtacccactaacaaataaattatatatctcgttcgttacaattgtattatttctgtaactgtgacagaagacagagagagagaaaaccacacaaaaataaaggtgaaatgcaacataattccaaatgtttctgtgtaataccgattggaaaggaaaagcgcgcgagagagagagaaatgagatcaaagtcgaacgatggaaaatgaagataattgttagaaattttcactaataaaaacggcaaaattattacaaacacaaa

SEQ ID NO: 196 - DNA, 1159 bp, Aedes aegypti
attgccatctccttgcttgctcttctagtaaaattggaagcatttttgagtaccgtggaacttgccacgaagtacggttaccgaatcgcgacacatcacatccagaccgacgatggattccttctggagttgcatcgcataaccggaagtggatcaacgatgtacgacaaacggcttccgccggtgctgctgatgcatggattgttcgcttcctcggctgactgggttctacttggaccggggaatgcactggcttatctccttagtgatatgggatacgatgtgtggctcccgaatgtcaggggaaatcggtactcacggaaacacatcagctacactccgaatatgaataagttttgggatttttcgtggcacgaaatcgcaacgtatgaccttcccgctatcattgactataccttaaatgtcacatccaaggagaagctccactatataggtcattcccaaggcacgacggtgttcttcgtaatgtgttccgagcgaccggagtataatgagaaaattttgttggctcagggactggcaccgatagccttcatggaacatatgaatagtcctttgttgaaagttatggttcaaaaccttgatgcaatttcaactattgcagatttcttcagtttaaatgaattcaaacccattccatcagtggtcctcgaagtagcaaagtatctctgcccgcaatcaaaacctgacaacctgtgcgtgaacattcttttccaaattacgggtgccaatcccgatcaagttgatcctaaaatggttcaacttcttttggggcatatcccagcaggatcatccaccaagcagatacttcactttgcacaggaggtgcgatcgggccttttccagcagtatgactacggaaagttgaagaacatgtttgtgtacaatcaaccggaaccaccagtgtacaatttgtctgagttgtggcgactgttagcctccactatggacccaatgattatttgtctgtcgaggaggatgttctgcggttagcgaagcagttgcccaatttgattgaactcaatcggatagatatggaattgttcaatcacttggattttctgatagctaaagatgtgaaagaaatattgtatgataaattgatttcaaatattgaacaatacaattattgaatagt

SEQ ID NO: 197 - DNA, 3146 bp, Aedes aegypti
cagagtactagaggttttactgtcgacaacagcgatatgccccagtgcgtgctgtagggtgtcccataaagtatgaatataagtttaacatggtgccataccgaaaaaatgtcatgaactgattgaatgctgttgacgaatataggaaacttctaaacataaaggtgtgacaattaactaactgttttttttttcaataaaatgaaaatgcagttaaagcaaatcagttaaataaaaataagattgaatctgatagttaaaaaggtcattttcaaacaaaaacaaatacttatcattcaaatttagatccttaagactgaatctgaatttagatccttaagaaaggatctgaatttgaatgacaaatgtcagttttgtgatgttcatgctcattagtagaaattcattacaaaaccaatttaaaatggcaacataatccttaaagatcgataccgaaattttatatcgtcgaacgtggattcttttgatttttttgacattcttcaacagtgaaatattgtaactctaagagttgtaaataaatattgggttcattttcatatattaaaatagtatgtttgcttcaattgtcatccttcattgaaaagcaaagcttttgtgtttgatcttctaaccaagccaagccatcagctgcttagatatttttatctaagattttttacaatttatctatgaaccagtgacaaaaatgatgtatttcaataaattcaagtaaaagatatggaataataattacggaagtgtacacaagtatgtaaataaatacttgaaaatagtatttgtgctatagaattctagagtaagtcaccaaatatttaatggtctaatttgtcactaatatttgaacaccccataatcacgggtaattgaatatttgatgagaaattagactgttacatatttagcggcttacccttattgattcaaaataatgtttttcttagcaaattacgattctgattgatgaccacaaacttgggaaaatctcttgagttaaatataaactatggctcaagttgtaaaaaaaaagtatgagtaacagacttcaagaacactaacgaacaagtcttcgctaatttattgctgcactgtattgcaaacgtgaattgatttaccaacggatctcatacggaagtcaattaatattttaccgaaccgaatttgctcaagcgtagcatttacggccgctcgatcatgaccttgtttgtaattgtcttttattagcgaaggaaatgttatgtacttcttcaatcaattgttgattgcaatcataggtgctaacgcgtgacgtagttaagaagattccaagctcttaaaaactaaacaaattgcaatgttttcctagcaaatgcgcttcgtttcacttaaatatgccatatatgaatgaactgcgtttcactatttttcattgcaatgaaaactctactaatccaagtttaacggttttttttacagccgtgtccttccggaggttcaaccgggatacctcaagccccttatcccgtcggaggccccggagaaaccggaaagctgggaagccgtgatggccgacatcgagcgtgtcatcatgcctggtgtcacccactggcacagccccaagttccacgcgtacttcccaacggccaactcctatccagcgatcgtggccgatatgcttagtggtgcgattgcctgcatcggattcacatggattgctagccccgcgtgtaccgagctggaagtcgagatgctcaattggttgggtaaaatgcttggactgccagaggagttcctagcaagctcgggaggtcaggcaggaggtgtcattcagggaaccgctagtgaggctactcttgtggcgttgctcggtgctaaagctaaggctatcaagcgtacccaggaagaacaccccgagtgggatgaaacctacatcatttcgcgattggttggatacacatctaatcaatctcactcatctgtagaacgagcaggtttgcttggaggagttaaactgcgttctctcaaggccgacagtaacctgcaactccgtggggaaactctagaagaagccatcaaacaagatttggccgatggactgatcccgttctatgccgtgtgtaccctcggaacgactaacacgtgtgctttcgatcgattggatgaactgggtccagttggtaacaaatacaacgtatggatccacgtggatgctgcctatgccggatcggcctttgtctgtccagaatatcgtcatctgatgaagggaatcgaaactgctgattcgttcaactttaacccacacaagtggatgctggttaacttcgactgcagtgctatgtggctgaaggaaccgtactggatcgtcaacgctttcaacgtagatccattgtacctgaagcacgacatgcaaggatcggctccagactaccgtcactggcaaatcccattgggcagacgcttccgtgctctgaagttgtggttcgtgctgcgtttgtacggtgttgagaacatccaagctcacattcgtcgtcattgcgcttttgctaagcaatttgaggctctttgtgttgcagacagccgttttgaaatcttctcaaccgttcagatgggtttggtgtgcttcagattgaagggaaacaacgaaataagcgaagctctgctcaagaagatcaacggacgaggaaagatccatatggtgccgtcaaaggttaacgatgtctacttcttgcgtatggcagtatgttctcgattcaccgaagcctcggatatcgagtactcctggaacgaagtctctgccgtcgctgatgaactgttggccgaaaagaaataaactggcgtttcacaatgttcctgatggcacaacgtgtccaactgtattactcactcactcaatctctctaattattctgaatggtatagaactgctatgatagcttaatcttccatgtattgtccaaatgcaacacttggagtaaactaaaaggaccataaaaaaacaatcacgcaaaataataatatatttgtgaatattgaaaagttgttgtagtggatagtattgctgccgctagattttaaaatgtcccttgatgttaaattattgttggagtatgagaataaataaattgtaatttattgtgttttaataa

SEQ ID NO: 198 - DNA, 871 bp, Aedes aegypti
aacgaacacgtaaaaacgaaagttgattatgttattcaagaaactttttccatacagatttcctatcatagggatgatacatttggatgctcttccaggaacacctttatacaaaggtaacttcgatgcaataattgctaaggcagtccatgaagcagaactttacgcaaatagtttaatagatgctgttatgattgaaaatatgcacgatgtaccgtatgtacaaagacaacatttcggtcccgaaacagtggcatgttttagcctgtggtaatgaagaagctttagccgtggctaaagcgtgtaattttgatttcatcagagctgaaggattcgtattttctcatgtggcggacgaaggctttaccgatgcaaatgcgggtcaactgctaagatatcgtagaaatattgatgctgaacatatacaaatcttcactgacataaaaaagaaacatagtgcccatgctataacaaacgatatctcgctaaaagagacagccaaggcagcggaattcttccgatccgatggtattattataaccggtgccagcacaggatgtgaagcaaatgtagacgatgttgagtcgttagttggcgaaaccgaattaccattaatcataggttccgggattacagcagaaaacttgaataagtattggaacatagctgatgctgctatagttggatcgcacttcaaagagaacggaaactggagaggagctctaagcgaagttaaagttcaagcattcatgaataaagtgaatggatttcggaatcagttttagctaagtaaaaacgcacttctttgtgcttgaaacagtgatattttaaagcaataaactatcacagtacattattttgataacaatgc

SEQ ID NO: 199 - DNA, 1595 bp, Aedes aegypti
atggcatcgaaatcagacaaaaagttttccgatctcggattgaaaccgtggatcgctaaccaaatggacaagctcggtcttcgtcggccaacgccgatccaggaggcgtgcatcccccgcatcttggatggacaggactgcatcggtgctgccaagaccggttccgggaagacgtttgcctttgcgttgcccatcctgcagaggctaagtgaggaaccgaccagcaatttcgccctggtgttgactcctactcacgaacttgcctatcagattgcggaacagttctccgtggcgggacaaccgatgagcgtgaaagtgtgcgtgataaccggtgggacggatcagctgctggaggcacaacggcttcagagccggccgcacatcgtggtggctatgccaggccgattggcatcccatttgaccggatgcaacacgtactcgttccgggccatgcagttcctggttgtggacgaagccgatagggttctgagtggaagcttcgacgaagatctggcagcgattgatagctttctgccgaagaagcgccagaatttgttcttttcggccacgctgaaggagtttatgcgggagaacagtgtctttccgattggggccgatgctttcgagtggtcggaggaaagtgaggtagcgacggtggaaacgttggaccagcggtacatcctgtgtgccgattacgatcgggatatggtgctgatagagacccttagaaagttcaaggaggataacgaggaagccagcgtgatgatctttacaaactccaagaaagattgccaagtcttgtctatgacactgaacacgattggatttgataacgtgtgtctgcacggatttctgaggcaaaaagaacgtgtggcggcgctcaataggttcaaatcgaagcacgtgagagttctgattgccacggatgtcgccagtcgagggttggacattccgaatgtccagcttgttctgaaccatcgcttgccgaaaattccgaacgaatacattcaccgtgtcggacgaacggcgagagccggtcgcaaagggctggccatttcgatatttcggttcccgagggatttggaattcttgggagaaatcgagagcctgatcaatacgaaactgaccgagcacccgatcgatcaacggttggtggagcgaatcttcatgcaggtcagcgtggcgcgccgggaagccgaaatgaatctggacaataaggacttcgacgagaggcagcacaactaccggcggaaaaagtggatcgagcaaggtctggatccggacgagatggaagcaaaatggaagcaggagaaggaaacgcgagcggccgagcggaaggaacgactcaggaaagagaacgaagaccgcaagcgtgcagcggcgagtgaagatagatccacgtccgcaacgaaggatgaacgtttcgcgggggtggcacaaagtaagaaatttaagaagcgaaagtttgttacggctgaccaattggaagattttgcaaaggccgcaaaagttaagcaacgcagtgatgggaaaggtaaggtcaaaaagggaaaaatgaagatcaagaagaataaagcgtgattgatcatttgttg

SEQ ID NO: 200 - DNA, 1200 bp, Aedes aegypti
atgagagaccttatttcggtagcgttactgctggtaatggttggacttggctacgcccaagttcatccggatattgctgaagatgcctatctggattccctaggattgcttcgcaaatacggttaccccgccgaggagcacatcgttgaaacggacgacggctacctgttgggagtccatcgctgtccaggcagtccagtgtctcctccagctgccggaaaacccgttgtcttgctgcagcatggaatgctgagttcttcggcggattacatcctgatgggaccgcagaccagcttggtgtacatgttggccgatgccgggttcgacgtttggatgggtaactcccgcgggaatcgttactccaatcggcaccgctcgaggaacaaccagacgcaggtgttctgggacttttcgtggcacgaagtcggcattattgacgttccgaacgtgatcgactacattctggcccggacgggacagcaacggctgcagtacgtgggtcattcgcaaggaacgaccgtattctgggtcatgatgtcccaacatccgtactacaaccagcgggtcaagagcgcccacttgctggccccggccgcttacatgcatcggacgcgtagtccatacgttatcttcttggcagcgtacctgcacactacggagctgatgctgcagatgatgggcacgtactactttgctccgacgaacgagatggacattcagggagggatcgacaaatgccgtgacggggctccgttccagcagatgtgcacgatcaccactttcctgatggctggattcaactcgcaggaagtcaactacacaatgctcccggtcatgcacggtcattcaccggccggagcgtcagccatgcagatgatccaccatgcgcagacggtccgatcgcagatcttccgccagtacgattttggcccgacgcagaacatgatccggtatggatcattgaccccgcccaactacaatctgaataacgtccaggctccgacgctgctctaccatagcaccaacgactggctggccacgccggaggacgtcctgctcctggccagtcagcttccgaatgtccgcaagcgttacctcgttccgatgcacgagttcaaccacatggactttgtctgggccatcaacgttcggtcgctactgtacaacgagctgctggccgatttacgagcgtacgcctga

SEQ ID NO: 201 - DNA, 1194 bp, Aedes aegypti
atgaaacagttgcttctagtctttgccgcactagtgtttgccgtggatgcgcagatccatccggatattatagaggacgcccatttggacgcgcttggacttttacgaaagtacggttatccagccgaagagcacatcgtagaaaccgatgatggctacctcctcggagttcaccgctgcccgggaagccccatgtccccgccggcgcccggaaagcccgtagtcctgctgcagcacggtatgctgagttcttcagccgattacatcctgatgggaccgcagactagcttggtctacatgctggccgatgccggatacgacgtttggctgggcaatggccgcggcaatcgctactccaaccgtcaccgaacgcggaacaactcgacccagcagttctgggacttttcgtggcacgaggttggaagcattgacatcccgaacatgatcgattacatcctcgcgagaacgggacagcaaggtctgcagtacgtgggccattcgcagggaacgaccgccttctgggtcatgatgtcgcagcatccgtactacaaccgtcgagtcaagagcgctcacttgctggctccggcggcctacatgcaccacacccgtagcccttatgtcatcttcttggccaccttcctgcacaccaccgagctgatgatgcagatgatgggaacctggtactttgcaccaaccaacgagatggacattcaaggcggactggacaactgccacgatggagcacctttccagcagatgtgtaccatcaataccttcctgattgccggcttcaacactcaggaggtcaactacactatgcttccggtgatccacgcgcactcccctgccggagcgtcggccatgcagatgatccaccacgcacagaccatccggtcccgaatcttccgccagtacgaccacggacctacgttgaacatggtccggtacggttcgatggttcccccgcgctacaacttcgccaacgtccaggctccgaccctgctttaccacagcaccaacgactggctggcggctccggaagacgttgaactgctgcgccgggaacttcccaatatccacaagcagtacctcgtacgacaaccgcagttcaaccacatggacttcatctgggccatcaacgtgcggccgctactgtacgacgaattgctgtcggatctgagggcatacgcttaa

SEQ ID NO: 202 - DNA, 1206 bp, Aedes aegypti
atggagaagttactcacctctatcttactagcgacgcttatcgcgttgattcacgcagctccatcgtacgacgacgcgactcgagcatttcaagtggaagacgcagatgcccggctcaccgttccgcagctaatccaaaagtataactaccccgtggaagttcatcatgccacaaccgaagatggctatgagttggaacttcatcgcattcccagccaacctggatctccggtggttttcctaatgcatggcttgctgtgtagttcggccgactggattgtcataggtccgaataacgccttggcttacctactcgcggaccaaggctacgacgtatggatgggaaacgctcgagggaatcgatattcccgacggcacacatctctaactccaaacatgcacgcattctggcagttctcctggcacgaaataggctactacgatctccccgccatgatcgactacactctcaatcaaaccaatcaaagcaagctgcactacgtcggccactcgcaagggaccaccacgtttttcgtaatggcgtccacccgaccggaatacaacgagaagatccgcttgatgcaagctttcgcaccggttgcgttcaccgaacacgtgcgaagtccccttctgaaggtcatgtcgcgcttccaaaactcgctgaccgccctgttcgacacgttcggcgttggagagttccttccgaacaacgccatcttgcacgaggttgcccaactgttctgctcgaaggacgtcgactggaatttgtgtttgaacgtcatcttccaaatagctgggtccgatccggaccaggtggaaacgcaaatcgttccgattttgattggccacaccccggccggagcggccaccaaacaggtcgtccatttcgctcaggggatgcgctcgcatctcttccggcggtatgactttgggaaaattaagaacctggccgtttacgggacgccacagccggcggagtacaacgtgactgacatcagcgccccgataatgatgtactacggactgaacgactatctggccgagccgaaagatgtgctgcggctgtccggtatgttccggaatctggagggatgcaagcagatggcgatagacagcttcaaccatttggactttctgatggccagagatgtgaggcgtttgttgtacgatgaggtgattgggaggattcgcgagtggcgcgattga

SEQ ID NO: 203 - DNA, 195 bp, Aedes aegypti
atggctggaggaaaagctggcaaggattccggaaaggcgaaagccaaagcagtttcccgctcggcgcgcgctggactacagttcccggtgggcagaattcaccgacacctgaagaaccgcacgaccagccatgggcgcgtcggtgccacagcggccgtatattccgctgccatcctagaatacctgacagctgag

SEQ ID NO: 204 - DNA, 1834 bp, Anopheles gambiae
ataagcgtcggagagatctgctagatgttgtgagcgcgtatatcaagggtcttcccataagccgttgtgtcgaattgttgcctgtaccgtgaacgaccaatcttcgcgacaagcagtccagctcaagcagcaagcagcttgtcgaaatcttcattacacgtttcaacacgtgttcacgtgtccgatcgtttccgcccagcctcgcataacaccctcgctcccatcacgcatcacaaagggacgaacggtaggcaggcaggtatcaaaagacaactaaaatcggcaagagcagcagcaccccacagccgcttggccgtgcgcgcgtgtaaccgcgggttgtttgtcgggctagtagcagaggaagatgtcggagcaccatcgcggtgcttggggtacgcgtgaggacgccgtctggtggccaggtggcatctcgtcgacggaacagcagacactgcagcaccatcagcatctcattaaccagcaccatcaacagcagctcgcccagcagcaggcggcccaactgcagcaccaggtcgcggtacagcaacaacagcagcagcaggctgcgaatcagcagcaacagcagaacgacagcgcccggaacaacagcacaacgtccacgtccgctacgcagcagttgttctcgtacaaaatggctaacagctttcagaacccggtcaccacgatgtccggtgtgaccgtgtccacctcgaacgcgccctacgactaccggctcggcatgagcacggtggtcgcgcggcccggtgaccccccaaccatgtccagcacagcgcccaccacccaatggtggtactcgggcggccagaacgcgctcgacaactccctgcaacagcagcagcaacagcagcagcagcaacagcagcagcaacagcagcaacagcagcagcagcaacaaactcaacaacatcagagtcaagcgcacgttcagaataatgttattctgaacaaaatggtgactggcggtaccgtagcgggcggtaaggtaaaggacaataagccgagggggcgcatgacagcgtacgccttcttcgtacagacctgccgcgaggagcataagaagaagcacccggaggagcaggttatatttgcggaattttcgcgcaaatgtgcagaacggtggaagacaatgctggataaagaaaagcaacgcttccacgagatggccgaaaaggacaaggcacggtatgagctggagatgcagagttacgtgccaccgaagggggccgtcgttggacggggcaaaaagcggaagcaattcaaagacccgaacgcaccgaaacgatcgctctcggctttcttctggttctgtcatgacgagcggaacaaggtaaaggcactgaatccggaatacggcgttggcgacatcgcaaaggagctgggccgaaagtggtccgatatggatgcggagattaagcagaagtacgagcagatggccgagaaggacaagcagcggtacgaacaggagatgaccgagtacaagctaaagtgtaaaaatgaacaaggtggcgttacacccggtctgaacctgccacagcagctgcagcaggccgggctccagcatctcccgcagcacgtacaggccgccgctcagcttcaggcccaggtagtccaagcgcagcaagccgccgccgttgccgcagcagccgcggccgccgtgcaacaacagcacgacgacgacgacgaggacgaggacggcgatgaggatgataatgagtaaaattaaaaacaaacacaagtggagaaagtcttacagcagcaacagtagaagcagcagtcagcaaatacacacaaaatagcaacaaacaacaaccaa

SEQ ID NO: 205 - DNA, 1834 bp, Anopheles gambiae; identical to SEQ ID NO: 204

SEQ ID NO: 206 - DNA, 1834 bp, Anopheles gambiae; identical to SEQ ID NO: 204

SEQ ID NO: 207 - DNA, 704 bp, Anopheles gambiae
gtcgcggaacaaaacgcattcaagaaaaagcgctccaaccggcaggtcctgtgtcactctctctcttcacgcccgttaggctcaaacatcatccaacaaaagcaaaatggctggcggtaaagcaggcaaggattcgggcaaagcgaaagccaaagcagtgtcgcgctccgcaagggcgggtttgcagttcccggtcggacgtatccatcgtcatctgaaaaaccgaaccacaagccatggacgcgtcggtgcgaccgccgccgtttactcggcagccatcctggagtacctgacggctgaggtgctggagttggccggcaacgcctcgaaggatctcaaagtgaagcgaatcacgcccaggcatctgcagctggccattcgcggtgacgaggagctggacagcttgatcaaggccaccattgccggcggtggcgtcattccccacatccacaaatcgctcatcggcaagaagggcggccccgagtaataagcagtcccgcgtttttttttatggatagcggggacagggagagggaggcgccgaaacgatagcagtcccatgcgcgaaaggcatgggagaagaggcagagagagagagggaagagtaggagcattggggataatccatttgtatgaccacacgaaaagtttatttttaatcgtgagcgtgagcgagagagcgcatgcttttttctctatataga

SEQ ID NO: 208 - DNA, 704 bp, Anopheles gambiae; identical to SEQ ID NO: 207

SEQ ID NO: 209 - DNA, 704 bp, Anopheles gambiae; identical to SEQ ID NO: 207

SEQ ID NO: 210 - DNA, 650 bp, Anopheles gambiae
ccaccttcggttggtatcacagaccggcgcacagctgttttctgataagggttctatgctacgcccgctcgctctgctaccatcctgcatccttcgccgaacgacagtaagcgtttccacccggcgcaacacaatggccaccgatggaagcggcacggccccggcgacgaccccgacggcgaccgacaacgagtactcggtcgcgttcgtgaccacgccggacagtgcggtggcaacgaagctggcccgccagctcgtcgagcggaagctggtcgcgtgcgtcaacatcatcccggggctgacgtcgatctactcgtgggaggacaagattaacgaggacccggaggtgctgatgatgctcaagacgcgcaccgaccgggtcgaggaggtgatacggttcgtgcgggaaagccacccgtacagtgtggcggaggtgatcgcgatgccgatagcggctggcaacccaccgtacctcgactggatcggcaaaactgtccccaagcgggacgggtagcgcgggtgccatgggaagcgagcaggtgaagaagtttttcctttttttttcttttgcacatgggacggggaattgggcgacgagaattgatattatggtagaatatagaacggagggggaaatttctgtactgtaa

SEQ ID NO: 211 - DNA, 650 bp, Anopheles gambiae; identical to SEQ ID NO: 210

SEQ ID NO: 212 - DNA, 650 bp, Anopheles gambiae; identical to SEQ ID NO: 210

SEQ ID NO: 213 - DNA, 2297 bp, Anopheles gambiae
cagtgcccgctggacagcaatccgctcggtaatcgcgtgaaagagttgtgtgcgcgcgcttgctttggtgaaaagtttgaactaaaaaaataacaaaaagggaaataaaacaaaacgcgatccgcatcgtaccgtcgcgactcactgacacacttttgcgcgcctgtttgccaccacacacacacacaaaagctttggccatcgtatatccccactggcgcgagacaaccggaccgctgtggggcggtgagtcagtcacagtccacgccaactgccgccgaagaagattcgcttttgtgtgcgctttccgcacagttttctgtgtgcgtacgtgtgtgtgtgcctgtgtgttttgtgaagcaaagtcacagatcaaacgattcgctacgccgccttttcctcggataagctgccggggaaactagataagagaaaacggtccgtgggaaagaaagcggctcggcattctagcaatttgaacgcggtgaaaagcgcgcattttgcaccgacccgcgatgttgattcggtgtgggaaactgttccggccgcgcagtgctttggtggtgattaccgttctactcctcacgctacgcccggccagcgccgacggtggcctgtttgacaactttatctcgcagctgatgacgacggccgctacggcgcaaaacttcctggaagatgcgtacgatcagcgacagggccggggaacggaaccaccaccactggcggaggtgccttccgtctcggccgaacccctctcgcccgtactgattccggtcgggagcattgatttgagcgatcaccaaccggccataccgtcagcaccaccgaccacgtttgccaccggtacaaccacgagcacgagcacgacgacgacgacgactacgacgacgtccacaacgcatggtacgcgtgcaccgctgccgttttggaatccgttcgtttggttgcgccccaaggagccatccataccgtacaatccggataccgatcttagcacgcccgaaatagcggtccgtcacggctatcaggcagaatctcacactctcaaaacggcggacggctatctgctgacgctgcatcggcttccctgcggccggatcggatgcaccgcgcagggtggcaagggtacgggccagcccgtatttctgcagcacggactgctgtccagctcggccgactggttgctgagcgggccggaaaaggcgctggcgttcatactggccgacgccggctacgacgtgtggttgggcaatgcgcggggcaacacttactcccgcaagcacgtcagcttcagcagcgacgagaccgcgttctgggactttagctggcacgagatggccatgtacgacataccggccgagattgattatctgtacaacatgcgggagcggaacgatacgacgcgcaatctgctgtacgtgggacactcgatgggcacgacgatgatcttcgcactgctggcaagccgcccggagtacaacgagcggctggaggccgtctttgccctcgcaccggttgcgtttatgggtcacgtaaagagtcccatccgtctgctggctccattttcgcacgatatcgagtttatgccgcagaacaaaatcatacgctatctcgccaagtacggctgcgagctgaccgaggcagaaaagtacatctgcgagaatacggtgttcgtgctgtgcggcttcgacaaggagcagtacaacgccaccctgatgccggtcatctttggccacacgccggccggcacctcgaccaagacggtcgtacactatgcgcaggagattcacaacgagggcaactttcagctgttcgattatggcgagagcgaaaaccagcgccggtacggccgtgcgtcaccgccgggatacaatctggaaaacatatccaccccgatagcgctgttctacgcgaacaacgattggctggcgggtccgaaggatgtggccaatctgttcaatcagctgcaccgcacctcgatcggtatgttcaagataccgaacgataacttcaaccacgtggactttctgtggggcaacgatgcgccggaggtggtctacaagcagctgctgatgctgatgcagcgatacaagtaactgcgccaacgacaagccatatcttgctacctttttaaagctggaacacgcgaaagtgaattcaaacgagcgaacccctatgactgcattttcatgttgaaaattcttactgttaagacttctatgaattgtatgtatgtgtgtgtgtatgttgtatgtatgtaaaaaataaaaaagggtaaacagctatccgagcat

SEQ ID NO: 214 - DNA, 2228 bp, Anopheles gambiae
atggagaaaccacagaaaatgcccaaagtggcaaaggtgaaaaacaaagcaccagcggaggtgcaaatcaccgcagaacagctgctgcgtgaggcgaaggagcgtgatctggaaattctgccaccgccgccgaagcaaaagatttccgatgcggccgagctggccgactaccagcagcggaagcgcaaaacgttcgaggacaatctgcgcaaaaaccgcatggtcgtcagcaactggatcaagtacgcccagtgggaagagtcgcagaaggaaattcagcgcgcccggtcgatctgggagcgtgcgatcgataacgaccatcggaacattacgatatggctgaagtacgcggagatggagatgaagcaccggcaggtgaaccatgcgcgcaatctgtgggaccgggcggtcacgatactgccgcgtgtcaaccagttctggtacaagtacacgtacatggaagaaatgctggagaatgttgccggcgcccggcaggtgtttgagcgctggatggaatggcaaccggaggagcaggcgtggcaaacgtacatcaacttcgagctgcgctacaaagagatcgaccgggcccgcacgatctacgagcggttcgtgatggtacatccggaggtgaagaactggatcaagtacgcccggttcgaggaggcgcacgggttcatcaatgggtcgcgcactgtgtacgagcgggcgatcgagttcttcggcgacgatcacgccgacgagcggctgttcatcgcgttcgctcgcttcgaggagggccagaaggagcacgaccgcgtgcgcgtcatctacaagtacgcgctggaccacctgccgaaggatcgcacgacggaactgtacaaggcgtacacgatacacgagaaaaagtacggcgaccggtcgggcatcgaggatgtgatcgtgtcgaagcgcaagttccagtacgagcaggaggtgaacgaaaatccaaccaactacgacgcctggttcgactatctgcgcctggtggagaacgagaacgatccggagctgatacgcgaaacgtacgagcgggcgatcgcgaacgttccgccggcgaaggacaagaatctgtggcgccggtacatctacctgtggatcaactacgcactgtacgaggagctggaaacggaggatctcgagcgcacgagacagatctactgcacctgcctcgagctgataccgcacaagctgtttacgttcagcaaaatctggctgctgtacgcgcagttcgaaattcgctgcaaaaacttgcaaaccgcgcgcaaaacgctcggcatggcgatcggacgctgcccgcgggacaagctctttcgggggtacatcgatctcgagatacagctgcgcgagttcgaccggtgccgcattctgtatgaaaagttcctcgagtttggcccggagaactgcaccacgtggatgaagtttgccgagctggagtcgctgctcggcgatacggatcgggcgcgcgccatttacgagctggcgatccagcagccccgcctcgacatgcccgagctgctgtggaaaagctacatcgacttcgaggtgcaacagggcgagttccagctggcgcgccaactgtacgaacggctgctggagcgcaccgtccacgtgaaggtgtggatatcgtacgccaagtttgagataagcgccgagaacgaggaggaaggcctgaacgtcccactggcaagacgcatctacgagcgggccaacgagtgtctgaagggtttggcggagaaggagtcgcgcgtgctggtgctggaagcgtggcgggactttgagcgcgaccacggcgacgaagcaaccctcaagaaggtgctggaacggatgccgcgcaaggtgaagaagcgccagaagatcgtgtccgagtcgggcgtggaggagggctgggaggaggtgttcgatttcatcttccccgaggacgaaatggcacgcccgaatctgaagctgctggcggcggctaagaactggaagcggaagcaggacactgacccaccggtggcggcaccgatggaaacgaaccagactgagcaggtggaaggttcggaagagcaacaggaagaacaaccagccaacgatgaagctcctaacgatgacggagcagaacaagaaccatccgctgaagcgaatgaagcggcggacgaataagatgcttaccgatttcccatactaattgcggcggagctaatataataaatagctgcactttattt

SEQ ID NO: 215 - DNA, 2228 bp, Anopheles gambiae; identical to SEQ ID NO: 214

SEQ ID NO: 216 - DNA, 2228 bp, Anopheles gambiae; identical to SEQ ID NO: 214

SEQ ID NO: 217 - DNA, 1566 bp, Anopheles gambiae
aaccggttgcaatcgtgcagtagcttcccagcaagcgatcaagtaaggtatcgcatacaaccgcggatcatcgccaggatgaagcagcagcaaaccttttccaacgtgggcatttgcctgctgtcgttgctggtgctgctagtagtagcagccagtacggcccacgctcgctcgaccaaatcaggatttcaagtagacagtgaagacggccgactgtctgtgccggagctggtgtccaagtacggctaccacgtggaggaacactcgctatcgacggacgatggctaccggctgacgattcaccgtgtgcaagcggcaagctacacgaacggaacggtcgtgctgctgatgcacggtctgctgtgcagctcggccgactggctgatgattggcccaggcaatgcactggcctacctgctcgcgaacgagggctacgatgtgtggttgggaaatgcgcgcggcaatcggtactcgcgcgatcacgcctcgatcaacccggacgacgacaattcgttctggaagttttcctggcacgaaatcggacgctacgacattccggccacgatcgactacatactggagcaaacgggacaccgacgattgcagtacgtgggtcactcgcagggcacgaccggattcttcgtgatggcttccacccggccagaatacaacgataagataattcagatgaatgccctcgccccggttgccttcatggggcacatgaagagcccgctgctgcgattcatgaccaagttcctgaagacgctcgacattctgctggccgtattcggcgtcggagagttcatgcccaacaaaccgatactgcacgaaatcgcccagctcatctgtccgccgaactcgacggtgcacattaacatgtgtgcgcatctgctcttcctgctggccgggtacaacccttcgcagctggatccggtgatgctgccgatcctgttcggacatacgccagccggctcggccacgcggcagttggtgcactacgcccaggaggtgctgtcgaatcggttcgaaatgtatgactatggaaagctgaaaaatgtactgatctacggttcggctacaccgcccgagtacgatctttcgcgcgtaacggcaccggtagtgatgtactatgggttgaacgattttctcgccacaccggaggacgtgaaccggctggccaggaagctgcccaacctgaagcgaagcgtagcggtgaacgatgtgctgtttaaccatctggacttcttgatcgcgagcgacgtccgacacttgctctacgaaccggtgatggaaggaatggcatccgctgaagtggcggattagggggttgaagtgcagtcaacttgactgagcttcccacatacgttcaagtatgtgatagtaggttttattgtgatctagggaagtttgctgtggtatttatgtataaacccgaacggaaaaaaacagcgcattaagttgaagcatcgaatagttagcgcaaagcgtctaataaagataaatgtgaacaattgaagaagttgcctttttgtctcaatgcttttttatatttacgcagatatt

SEQ ID NO: 218 - DNA, 1197 bp, Anopheles gambiae
atggtgtatagtgtggcggtagccgtgctgttgctggtggtggccgtatcggaggcccagattcatccggacatcattgaagatgctcatctagactcgattggtctgctgcgcaagtatggctacccggcagaggaacatatcatcgaaacggacgacggctatctgctgggcgtgcaccgttgcccgggcagcccgctgtcgccaccggccccgggcaaaccggtcgtactgctgcagcacggtatgctgagctcgtccgccgactacatcctgatggggccggacaccagcctggcgtacatgctggccgacgccgggtacgacgtgtggatgggcaatgcgcgcggcaaccggtactcgcggcgccatcgcttccgcagcaacacgacgcaaacgttctgggacttttcgtggcacgaggtcggcagcatcgacatcccgaacatgatcgactacatactggtgcggacggggcagcagtcgctgcagtacgttggccactcgcagggtacgaccgcgtactgggtgatgatgtcgcagcatccgtactacaatcggcgcatcaagagcatgcacgcgctggcgccggccgcctacatgcacaacacgcgcagcccgtacgtgctgttcctcgcgaccttcctgtacacgaccgacctgatgctgcagatgatgggtacgtggtggttcgagccgaccaacgagatggacatccagggcgggctgcagaactgccacgacggtgcaccgttccaggacatgtgctcgatcaacacgttcctgattgcgggcttcaacacggaggaagtcaactcgaccatgctgcccgtcatccatgcccactcgcccgccggtgcctcgacaatgcagatgatccaccacgcacagacgatccggtcgcgcatcttcagacagtacgatcacgggccgatgaacatggtccgctacgggcagctaacgccgccggtctacaatctggccaacgtgcaggcaccgacactgttctatcacagcacgaacgattggctggccacaccggccgacgtggagctgctgtatcgcgagctgccgaacgtggtgaagcgctacctggtgccgctgccagccttcaaccatctcgattttgtgtgggccatcaacgtgcgatcgctgctgtacaacgaactgctggctgatctgagggcgtacgtgtaa

SEQ ID NO: 219 - DNA, 1197 bp, Anopheles gambiae; identical to SEQ ID NO: 218

SEQ ID NO: 220 - DNA, 1197 bp, Anopheles gambiae; identical to SEQ ID NO: 218

SEQ ID NO: 221 - DNA, 1230 bp, Anopheles gambiae
atggctaatcattaccatgccgtttttgttctggccattgccgtcattggcatggtcagtgcagcggtagtgccaagatcattactacccaccggacatacgaacgtgccgatgaatctaaccgccgacattgttctgcgtgacggatactatctcgagcagcaccaggtaacgacggccgatggctacatcctgacgatgttccgcataccgggcagtccggccaatccggtgcgccagggcaagaacgttgcctttctgatgcacgggctgctaagctcgtcggccgattacgttatatccggctcgggacgggcgctcgcctacctgctagtggacgccggatacgacgtgtggctgggcaatgcccgtgggaatacaaactcccgccgccacatcttccacgatccggatgcgcgcagtacaaacttctgggactttagctggcacgagatcggctacttcgatctgcccgccatgatcgattacacgctcgcgtacacgggccacacttcgctgcactatgcgggccactcgcagggcactacctcgttcttcgtgatggcatcaacacggccggactacaacaagaagatacgctcgatgcatgcactagcgccggttgcgttcatgagcaatctgcggtctccgttcgtgcgtgcctttgcaccgttcgtaaaccagctcgagtggatcatgagcatgctgggcgtgaacgagttcctgccgagcaacgagatgatgatacttggcggtcagcggctgtgtgaagatgagtccccgttccaggaggtgtgtgccaatgtgctgtttctgattggtggattcaattcgccccagctgaatcggaccatgataccggcgctgctggagaatgcaccggcgggcgcatccgtcaaccagctggtacactacgcgcagggctacaattcgggccgtttccggcagtacgactttggccttacgctgaacctcatccggtatgggtcggttcgtccgccggactatccgctgcaccgtgtaacggccccggtggcgctgcacttcagcgacaatgactggctggcggctgtgtcggatgtgcgcgagctgcactcgcacctgtcgaactcgatcggactgttccgtgtgtccgatccgcgatggaaccatctggactttgtctggggcatcgacgcgaacacgttcctgtacgagcgagtgattagctttatggatcgattcaactga

SEQ ID NO: 222 - DNA, 1248 bp, Anopheles gambiae
atggtagtaagcaacaggtgctgggccttgctggccctcgtagctagtatcgccaccgtagcgcaagcctctaccatccgggacgttttggcgtaccgtgccggggatggaccgcaaccgaccgacatctccaagctgacggccgaaatcatcgtcaacgatgggtatccggtcgaggagcaccaggtaacgacggccgatggctacgtgctgacgatgttccgcatccccggcggtcccggcaatccggcacgcgaaggcaagaacgtcgcgttcattcagcacggtctgctctgctcgtccgccgactgggtcattcttggaccgggcaaagcactcgcctacatgctggtcgacgccggatacgacgtgtggctgggcaatgcccggggcaatacaaactcccgccgccacatcttccacgatccggatgcgcgcaatacggacttctgggactttagctggcacgagatcggctacttcgatctgcccgccatgatcgattacgcgctccagtacacgggacagacgtcgctccagtacgccggccactcgcagggcactacctcgttcttcatcatgacttcgctgcggccggagtacaacgagcgcatccgctcgatgcatgcgctggctccggttgcgttcatgagcaatctgcggtccccgttcgtccgggcgttcgctcccttcgtcgaccagattgattggctgatgcgtatgttgggtgtgaacgagttcctgcccagcagcgacatgatgacgctcggtggccaaatgctctgccaggatgaggcccgcttccaggaggtgtgcgccaacgtgctcttcctgattggtggattcaactcgccgcagctgaaccgcaccatgctgccggccattttggccaacacaccggccggtgcctccgttaatcagctggtccactacgcccagggctacaattcgggccgcttccggcagttcgactacggactgacgctgaacctaatccgctacggttcgatccgtccgccagactacccgctggaccgggtgactgctccggtcgcactgcactacggtgacaacgattggctagcggccgtgtcggatgtacgccagctgcactccagcatccgcaacccgatcggactgttccgcgtgtccgatccggactggaaccatctcgacttcacctggggcatcgatgccgactcgctgctgtaccggcgcgtcattagctttatggatcgatacaactaa

SEQ ID NO: 223 - DNA, 13212 bp, Anopheles gambiae
atggacttcattcgtgacacgaacggggtcgatagcgaccatcagtggtgtgaagttcaagcaaaaatcgacaaattatttgctgttattttgctggcttgcctatgtctaaggccagatctgctggttgacgacttcgcactagatcagcaatcgatcgaaattccggaaacggaatgttccgacagctgcgagaatgatgtcgatatggatgagtcggacagttgcgacaacgatgccgacgataatgaagattccgacgaagaggacgaagatgacgatgacatggttcatagtacggtacccggaaagtttctcttagagaacgatgacgataccgaccatgaacgagacgaagcagcgcatgcattgacgcgaatgaaatccagcgatggcagtccaagggataagaatttgctatcgcgttcgctgattgcggcctgcactgataacgacgtaaacactgtccggcgactgcttgtcgagggaaattcgctgaacgaagcgaccgaagagggcgattctttgctatcgttggcgtgttccgccggctactacgaactggcccaggtactgctggcaatgtctgcacaggttgatgatcgtggccaaaagaacgactgcacaccgttgatggaagctgcgtcggctggtcacgttgatatcattgagctgttgttcaagcacggtgcagacgtgaatgcgcagtcttccaccggcaacacaccactcatgtacgcctgtgccgggggtcacgagaaagcggtgaagttgttgttggatcacggtgccaaggtggaggaccataacgaaaatggtcacaccccgctgatggaagccgcctccgctggtcatgttggagtggctaagatcctgctggaacatggtgccggaattaacacccattcgaatgagtttaaggagagtgcattgaccctcgcctgctacaagggccatctagatatggtgcgctaccttctggaggctggggcagatcaggagcataagaccgacgaaatgcacacggctctgatggaagcgtccatggatgggcacgtggaagtagcgcggctgctgctggactcgggggcacaggtcaatatgccgacggactcattcgaatctccgctcacgctcgcagcgtgtggcggacatgtcgatctggccatgctgctaatcgatcgcggagccaacatcgaggaagtgaacgatgaaggctacactccgctgatggaagccgcacgtgagggtcatgaggaaatggtggcattattgctacaacagaatgcgcagatcaatgctcaaactgaagaaactcaggagacggctcttacgctagcgtgctgcggaggcttcatcgaagttgccgagtatctcatcaagaatggtgcagatatcgagctcggtgcatcgacgccgctaatggaagctgcccaggagggtcacatcgatctggtgcgctttctgctgcagcacggtgcaaacgtacacgcccagacgcagacgggcgataccgcgctgacgtacgcgtgcgagaacggccatacggaagtggcggacatcctgctgaattacggtgccgagctggagcacgaatccgagggtggccgcacgccgctaatgaaagcctgtcgggccggtcactggtgcattgtgaagttcctgattgaaaggggagcggatgtgaatcgccacaccaccaacaacgaccacacgccactatcgctcgcttgcaccggcggtcaccagaatgtggtggaactgctgctgaagaacggtgcagatccgttccatcggctgaaggacagcagcaccatgctgatcgaagcggcgaagggtggccacataggagtggttcagctgctgctcgattttcctcactcattgatgaacgctaatgctgcccagcagcagaacatactcagcagcggtcagatgcagcaactgcagcaacagcagcaggtgcatcagcaacagttgcagcagcaacatcagcaggcggcacagcagttgatcattacgcagaaccaccagcagcagcatcaactgcagcaagctcaacagcagcagcagcagcagcaacaacagcagcagcagcaacagcagcaacagcaacagcagcaacagcaacagcagcaacagcaactgctagcgggtccacccgggctgcgcgaggttcctgaagcaatccgagtaagcaacaaacagattttccaactgccaagcaaggaaatgctcgaacagcagcagcaggtgcaagcgcagggacaaccgcaacagcagtctcagcaggcaacgctgcagcagcagcagcagttgcagcaacaccagcaattgcttgccaacagccatcagctgatcaatcaggcaaacatgctgctggacagcagcggcaacgatacttccgtactggcacaacatctgctggaaattcaggactcttcaatatcgaaggacagctttttcgaggatttgcgcaatggctttcgcacgcgggcccgccgcatgaacaccgtaccggcggggtctgctacctcctcggcaataccacccgttgctggacagcaacagcagcaacacgatcaggccgctgtcgcgcagcaacagttgatacaatacttgcaccaacatcagcagcaggcgcagcagctgcaagcagcgcagccaatcattttgcaaggcaacaacgtcgttacccagcagcagcagcagcagatggtcggtaacaacaacaatgcggccgggttgagcggtggaaacaagcagcagcgtagcttgctgcgcaaaaaacaacagcaaccgacagtagcactgccttcgccgttcgaggcaaaccttaccagttccgaggcacagcaggtgaggagcgaacccattggggaggataacaagggcaactgcagtgctggtgtgagcaacgtttcgccgctgcagcaacaaccaccaccccgcgtgagcaatgtggcgatgcgatctgattatgaacagtatcagaagcagatgaacgagatccagttccagaagaaggcgaaaatacaattcatcagtgatgctaaaggtccaccatcgactcttttgccaccaacggaaacatacatcaatctaggcacacccgttcaagctggtaaaacatcaatcgacggcaacagtgggcttctctttggtacgccattgcaaaccaacttgcctcaatcgcaacagcagcatcttcagctagcaacaatagctgctaatgccgctggcgcttcggttgtatccaccggcacttccgtcagtccggccaccggagggaccagcagcggtacactcttgaccggcccttcggaagtgtcacaaagcactgccatcagcgatcgtccaaaggttaagcccgtgtcgaagaaagatgccaagaataatcgcaaaacggcggcagcagcagccgcggcggcagcggcggctgtagcaactgctacggcctccgtacagcacactcttgcacagcagccgcagcaatcatttttcaggccgctggcgggtaacaactcgtccggcggtagtggcaattccaccagtgtcctacagcagaacccgatggtgtcaatttataacaacttgtcctctgtgattccaagttccgaagcgaatgtgcaaatgttgcaacaatcgatggcgaacttgaatctgcagtcacagtcatccataacgccatccaccatgcagtcagcaccaatgccatcaagtgcaaaaccgagcgaaaagaagacgctcgtgaatgcaggagaggagctgaagaagagcgactcggatggggctaatgacaccgaaacgttggcaactgccaacgccgggagtgaaagtggaagtatggttcctacgccatccgctaacccgtcggttatcacgagcaccgcagcagctgcaaagcgtacatcgggcggccagaacgacgatgccagcaaaagtcgatcggccgaccaattgtctgcagcatcctccgcgcaagaggagcgccagttaagttcgagcaacttaccggccgacggtagcggagcagcggacaaagatgcaaatgcaaccggcacggctactacacccagcacagcaaacgccgagggtgctagtgatagtgcgagcagcagcagcagcagcacgggcgaaagtggctccaccggcagcgttaacagtagtaccgtcgcaagcagcagccactctacgacgagcacaaccagcaccgatggtagcagcgtgccggctggcgaagctggcgctggtggcgacggcgaaggtagcactaccagcagtggcagcatcagtgccgccagcagtaccagcaacagcagtgccagcagtagcgacagcagcacgactaccaccggcagctgcgacaataacaccactgcccaaggcggagatggaagcaccggtgcaggtaatgccaatggtgaagaagaagaagaagaagaagaagaaggaggcaccggcagtggtggtaacggcggaacgatggccagcctcgatccggacaaccatttcaacctttttgcgatggtcgatcgtaagttgatgctcaagctcgcgcatcgcttgctctgcgatacgtccaaatcgccgtcggaaacgccaccgctgagtagcagctgcccagggtccaacctggaccctcccgcctcccccccgccagcgatgatgaacaatgccgatattgagtactcagagctgtcgcgcatcatctgcagtttcagtcgctcggacatactgcctgcccccgaatttgtgcaagtgcatcagcatatgcaaaacatcattcagcataagggtggtagcaatcctatcaaactcggcgattcgaccgacggccaccagtatgccgaggaaggcgaggaacaccttccgatgtttaacatcgaggaatctgaggcagacggcatgaccgagtgtgttggcggaatgtatccagcgctggacgaaacgctggaaacgttccacggggaggacggcacggccacgcaagcgcacggttcgcgggaatcgatgtacaactacgaatgggtggacagcattgacgatgtgatccatgtgctgaatggttgcccagaaattccaatggcactgcatgatatggctgccaacttcgggtgtcaggatatcgacatgtatgcaaatctgatcggattaaattcgttctgcaagacacgctgggcgggcaaccagaaccagcttacgtctggtacgtcgtctccagccgaggaggacggcagcgcggttgcccttaccgatgagcagtgtgcgtaccgccaaggccaagctgccgccagccaactgctgacgtttgatccgcaacaattttcaatggatcaaatacagctgctgaatcaaatacaccaggcatccgcctccggatccgtattacatcatccgcaagcgagcagcggtgccgacgggcagcaaccaaagcttgtgtttaatgtcgatgcagataaagcctcgcaagtgcatttgctatttcaactgccgactctgcaatcacagcagcagcagcagcaacaacagcagcagcagcagcagcaacagcagcaaatcgcgcaagatcagcagcatgatcatatgaccatgcttccgaacagtggccaacagcagtcgcaaggccagcaacagtcactatcgctgcaacaagcgactggccagcagcagcaacaacagcagcagcagcagtgtaacattgccacaatgcaaccgcatgccgctgcagcagcagccgcagcagcaattcagcacgcgcagctacagcagcaattgcatgcgcagggaatggtcgctgccggtcattccggttccgtcacgttgcagcaacatcaacagcagcagcgacagcaaatgcagcatctacagtcccaggcccagggacagcaggtacaacatttgcagtcgcagcagcagcagcagcaacaacagacacagcaacaacagcactgtttgcagcacgcccaaatgcaggtctccactcaaacatcccaacagcagcagcagcagcaagtcgcatccaccagaggcgaagaggagatgcccccgctggtgaggacgcaacactttgcgctgatggataacaatcagtcggcgaatgctgtcgctgggggtggcaaaatggccggtgccggtggtggcaaaaagggagaaaagaatcgcaaagagaaaaaccgtgtcgccgtcccggcagttcgccaggcaccggccggacagcagagtgctggcggcagtggacagctgcaaaactatcaatacgacaccactgccggcaacgggcgttcggttggaggagggatggacataccgccaccgaccggggcccttcagcccttccacgcgggtaatggtatattgcccccgcagggtggatcggtggtatcggagcgtacgattgatgtggattccgaaacggattcgaatcacgacaccgcgctaacgctcgcctgtgccggtgggcatgaggatatggtggaactgttgattacccgcggtgccaacattgagcacaaggataagaagggcttcaccccgttgatactggctgccacggccgggcacgagaaggtggtggatacgttgctgcgcaacggtgcagagattgaggcacagtcggagcgaacgaaggacactccactctcgctggcatgttccggtggtcggtacgaggtggtcgagctgctgcttagcatgaacgctaaccgcgaacatcgcaacgtgtccgactacacgccactcagcttagctgctagcggtggctacgtgaacatcatcaagctgctgctccagcacggcgccgagattaattcgcgaaccggaagcaaactcggcatttcaccgctcatgctagcggcaatgaatggacatgtggccgccgtaaagctgctgcttgacatgggttcggacataaacgcgcagatcgaaaccaaccgcaataccgcgcttacgctggcctgtttccaaggacggcacgaagtggtaagcctcctgctggatcgcaaggccaacgtcgagcaccgtgccaagaccggccttacccccctgatggaggcggcttccggtggatacatcgatgtcggtcgggtgctgctggacaagggagccgacgtcaatgcggcgccggtcccatcatcccgcgatacagcacttaccatcgctgcggacaagggacatctgaagtttgtcgagctactgctgtcccgcggtgctttggtggaggtgaagaacaagaagggcaactccccgctctggctcgccgccaacggtggccatttgggtgtggtggagctgctctgcagcgccggcggagacattgattcgcaggacaaccggaaggtgtcctgcctgatggctgccttccggaagggccacacgaaggtggtgaaatggatggtgggccaggtaacgcagttcccgtccgaccaggagatgacgcgctacatcaatacgatcagcgagcaggaactgctggaaaagtgtcacgactgtgtgaaggtgatccgcgccgccaaggatcagcaggccacgaaggccaacatcaacgcgtcgatcctgctgaaggagcttgatctcgagcggtctcgcgaggaaagccgcaaggcggctgctgccaaacggcgcgagaggaagaagcgccgtcgggcggaaaagcgggaacagcagcgtaagctagagatgggcgaggagggtgcagcgggcgacgggaacgacgacgacgacgaggaggaggaagccgatgacgataaggaggaggaagaggaagaggaggacgtcgacagtgagcacgacgaggacgagctgcttctttcagctgtgatgcaacagcaagcgtctggcggtaataaaaataaaaaccgcggttccaaccacgctgccgcccagtcgcacggtggcaagcagcagcagcaacagcagcagcagcagccgctgaataatcgtgagaaagagaaggaaggcaagggcaaagataaggaaaaggagaagcacaaggacacggacagggagaaaggaaaggaatccaatcaaactgcgtcctcttccgcttcgtccggtggcagcaatcagcgccagcagcaacagggtgcgaatgggcagctgtaccaataccgaccgatgtcgataccgtaccaggtgcaggaggaaggtgattccggcatcgatgccaacagtttgggttcatgctccagctcggaggtaaagtcgtcctcgaacagcaacgccctggagcagaagaaaaacaacaagaaacgcaaacagcagcagcaacagcagcaacagcaggcacaaacagcacgcggtgccattgcgtctaccaatgcggccggtgctgcaagagcggcgaaggcagcagcggttgccaacgctaccggtggaggtaagtcgtccaacaatgcgcatcagcaaagcagcagtaacagcaacaacagcaacaacaccaacaacaccaacaacagtcgtcaatccaagagcccggaaagtggttcggcagcagcgtctaacggcaacactgtggtgcaggataaaaactcaaaggaaaagaatcggcgtcagcaggagaaagaacagcagcagcagcagcaatacagtggaggacgggacaagcgcgaaaaaacgacggagaaggaaaatgtcgctccgaaggaccacgagcggtcgggtggaatggcagcgagcacgaaaaacgaaagcaaaaaatcctcttccaacgatcatcatcatcagcaggcgggcagtgcgggaggtggagcgatgcaccaccagtctcaccagagcagcagtgcggctggtaatcgcaaatccatcatcgtctttgggtccggcaatcggcacgctgccgaacagggtgatgacactagcggtggtgctaatttctacaacaccaccaacgctggcggaaagaaaacgcacggcaacaaaagcagcttctacaacacggaggaccatggtcatcatagtaaactatcctcagcaagtccgatgaagcaacaccagcagcaggcggcgtccagtggcacttctgcctcgcagcagcagagcgcaaatagttcgcaatccaactcggcgggcggcgccaagcgtgaggagggctggaaggaagtcgttcgcaagagctctgtgcagcagggtagcggcagcggtagcagtggcacgggaggaggcagcagtggcgggggcggtggttcttcctcctcgctaatggaatgtcgcaaggtgcaggtgccagtgcatgccatttcgcgtgtaatagggcgggcgggaagcaatatcaatgccatccgcgctgccaccggcgcccacatcgaggtagaaaagcagggcaagagccagggtgatcgctccatcaccatcaagggatcgcaggatgcgaccaagcaggcgcactcgctgatcgttaccctcatcaaggatcccgacgtggacatactgaccatgctcccaaagcacaactcgagctcaagcagtgcgacagcgaagggaggatacggatctgcttcgtcgtctgctgccagtggcggatctgcatcttcggccggccagcacgcagcagggacatctggtggtattgggtcttcgtcgtcgtcgtctaccacaccggcacagcagtcaccagtgatcgtgccagcggccatcataccaacaaatggtgctgcaccgaccatgtctgctatagtggcatcaggcggtgtggcggccgcagcagcagcagcagcagcggcagcggcagcagcggcggcagcagccgccgccgccgccgcaaacaacaattcgacggcctctgccaagggtgcaaagaatgtgttcagctcttcgaacaaagcggcgagcggtagtgccgccaatgtcgttgctggtggagccacgggagccagtgcaggagccaccaccgctgggccagttaacactaaaactccgtccagccaaggttccgcaccgtcaaacgcaagcgcacggccgacggcggccaagaatctgttcctatcttctgccgcagccgcttcgcagcaacagccgtcccgcgggttggcggcagccggcagcaacaatgccggtgtgactagtggcagtgtgccatatgcggtggctgcttccactggacagggcaaagattccaagcggcagccacccactgcacaaacatcacaacagcattcgtctgctgtaccgtcggcaaacggtggtagcaccggtgcgaagggatcgctccaccagtcagcaacaggcggcacgggtggttccggtgctgcaacatcagctccgttcggaagctcgggaatgaaggccaagaacggtaacatcaacaacaaggcatcagctgcttccaactcggctgtaccacaggctggtggtacaaacgttggtggcaacgctgccggcgcgacggctggtgcaccaggagtggcggcaggatcgtttgccaaactggtcgcatccgacggtggaaatgcggtgagcaatactagccagaaaaagaacttccccaatgccggtggttccatcggcagtggctcgaattccgtcgtcggaccgcagggacagcaagcagcagcagcagcagcagtctgctggaggaagcgttggaggagctgctgggcagcagaagatatcgacgtttattcctcccatcgcaaccagcggaccagggccaacgattgtggaggcttccgccgtaccgccgataccacctatcagcgtaccaaacacggccaatccgctggcagcaccgggcagtggtcgatcgataaccccgatcgggcaaccaccatcctcatcggcagcgtcctcatccgcacctacatccgtttcgatcgtttcgtcgtccgcatcgtcgacggtaacgtcggtgactgggccgatcggaagtcgcagcgtcactacgccatcgcctttgctgcaacagcaaggctcctctaccacctcgccaaccattgccagtggggtgtgggctcaaacgcgaccgccaataatgtggccgatgttggcaaacccccactgtacggtggccaccagcatcagcagcagcatcagcacctgtcgcatggaaatatgccaccccaccatcatcagcaccagcaccaccagcatgccggtggtgtaggtggtgcaggtagtggtgtgttgggcaccttcatggaaaatccgccaacgctgcaggttgacgcatcaaaggcgccaggatatcgcggaaacgccatctcgtcgccggttagctcgaaagcctcgagcaatgctaccacaccgccagcctctagcatgtcctcgcatcagcatcaacatcagccccaaccgtctttacacccggtggtgcagctgcccaacggtggaggtccaatgcatctccatcaccatccgccgcagcctcactcgcaccagcagcaacagtcgctaggactgggccatatgctgagtggggcaaatagcggcagcaacagcacgtcgccacttgccggcctgggcggtccacagcaacagccaccgtcgtcggtggtcgtctcgagggactcgggcgtgtcgaacatggtcggcggggcacactccgtctcgtcggcatcatcgtcaatgtcgtcatccagctcgggcgggggacagcatcagcatcagccatcatcctaccagtcagccaatgagccgccaaacgtgggcatgaaaccgacaccgccgccaccatcaatgcacgggggcggcaacagtgcgcagggcaatgggcaaggcgctcccggcggaggcctgggcatgctgcgctcgatgatgaatctttcctcccacatgcgccaccccgttgggggcaatgggccgccggactacctgggtggaggaaatgctggcggtcgcgatcattcggccggtctagcgccgcagcagcagccaccggtaggaagctcccgcccgccgccgtcgatgttcgacaatgtcggcggtcttggcggtagcggtggcggtggtccacccgattcactgcaatcttcctaccagccgcagcttggcctgggtggcaacggcaataccggcctgccgcccatctcccgactgaatccgaaagcgtccgcgttttcgggtggcatcggcccgtcagtcatgccgccatcgcagcaccagccgggcaagatgaacctgtccaacaaccatcagccgtacggtggtggtggtggtggtagcaatgcgggtggcgcaggcaccggaatgttccacgccccgccgccaatcggtatgggcggtggaaagtatccgtcgatgtcatcgtacagcctggcgccgggacgaccgaacagccagcagcagcacggtggtggcggatccggtgcaggtggcaacggtggaccgcctccggtaggaggcatgcatcaccgcggcgccgcaggaggaggtggcagcaattggttttcgtccgacttgagccacctgcagcgagacaacctgatgggcatggaaaatgggctggcgatggcattgaatgcagctggcggttcgccgaacatatcgccgaacaacaacaacaacgcgccgcatgccataaacggtggcgttgggggacttgtgcctcagcaccagcaacaacagcagcagcaacaacaacagcaacagcaatcgatgatggaagatgcacgaaagctgccgcgtgccatcggtaccgagcgggcctggaagttcggcggaaatggtaacgtcggtctcgttggcagcggcgctggagccggcggagcaagtgcgggcggtggcaacaatggcgcaaacatgtacaatgcaggcatggtaacggcatacgtcgggctggatggaccggatctaatgaacggtggagcatcgccagcggcaatggcggcggcggcggcggcagcagcggctgctgcatccggcaatcaaccgtggatgagcatggataagaatcagttcatgggtagcggtggcggactgggcggatcgcagcagcagcagcatcagcagcagcaaccgccccttccctggctaacggcggcgggaatgaacagacagtacatggacgacattcatctaccggatcatttccagcagcttcaaatggattaccatggtaacattggtggttctggacccagcgggccgaatccacctaacatgaacttcatgcagtatccgttcacaccatccaacgatatggcgggagcggcagagctgcgaccaccatgggaacatgagaagcacggcggctggtcgcaaaaatggtccggacactag

SEQ ID NO: 224 - DNA, 13212 bp, Anopheles gambiae; identical to SEQ ID NO: 223

SEQ ID NO: 225 - DNA, 13212 bp, Anopheles gambiae; identical to SEQ ID NO: 223

SEQ ID NO: 226 - DNA, 2255 bp, Anopheles gambiae
ttttgtgcgacgaacagtaccccggtgcgaggatccgtgcacgctattgccacgtggcagcggcgaggctgacgggctacaacactatctaccaattttctgtgtgatactttactgggtgcagtgcgtgaggtctgtttcaactccaacagcctagaaaacaaacaaaacaacaaaaaaacacacttaccgacatgggtttactcgcaccaaccacatcctgcgacggcgaggaagagctgcaggtacagctgcgcagcgttatcatcacccggtcgaaggcgggtgcaacggtggacgaaataataggtacggcgagcgcgatcgagcgccggaggatcgtgctgcactggctgagccgcgtgctaatgtgtgtttgtgtgattgtcctctatttcactaccgttcacgtagacgactatcgggagctaacgggggtacacctgctggaccgattttacacccattccgcgctgctaaactaccttttcgggatggagggcgtttggtgctcgaccgacggtgcacatggtttgatgctgtggttctgccggacagcccggacgaagcacgtggtcgacatgatacaggcgcagcggtccccgcgcggcggccccggcggcagcaattatcgacgctatatgccacgtgcaaccggggcgccggtgaacaactttcagtactgctactcgacggccggcacgcaaatgggcggccccggcacgcaaatgggcggccccggcaccgtggaatcgcaggaccttttcggcgatatgatgccacagccacagccggcacggccctaccgtgtgaggcgtgcgccccgcgccgagagaagacatccgtacacgcgtcgaagcggcggccagcagcggtccgcaggttggagacagtcccggtcggatgagcttgatttttcgatgtacggaccgtcgtaccatcgtcatcagctggtgggagacgactttttcctagccatagctaaatgggagctcggattttcattcgatccaggccacgacatcgatatgagcggactatgcatctcaggactaacgctctcggaggctgccaaacgcgtcgagatggcgccgttcatcgcggaccacgtgctggtgaacgtcggcacggtcgatctgctgcacggacgcgcgatgatcgatctgatccatgacttcaaccagctggtggcccggttccgcgagcgtaacgtggaaccgatcatgacaacgctgacaccgatcgccaacagtggcggccgcacgacgatggccgagcggctgctcaagctgaacgagtacatctgccgcacctgtccgcgcacgatcgatctgtggaagcactttgtgcacgcggacggtacggtgcggttcgagtgcttccagcccggaccgcgcaaggtgtccggcagcatcatgccgcacgtgctgtggaacaagctcggccggcagcacatgctcggtgtgctggggaacgaaatagccgcccagctgaccaccagcgaagagtggcggtactactgaccgctcaatcgttcatttgccccgtaccacccgtccctttcgatggggggagttgggacgtgtttggtagtgttaagatttcctcctcgcagaacggggcctcgcaccatttcccctctccgcacgcgcacccagttcccaccgttttcttttaacttgttatattcgtgttattgtttcgcgttggtgaccagcgtctcttatcctttacgttgtgaataagtcgcgcgcgcgcgtatttttgtgcttgttgtttgcttagttgcatcgcttttaatgttaacaacaaacgcggtatcggtgccaattgttcccaccgtatggcaacgcggcactagaacggcacactgtacaccttgaccccgggatcaagcgcatcgtacggtgtgctgttcctgtatcaccctcgggggagtggtggtggtacggccacgctagcacgaagcagcaagagtttgtccttccggaagacgaattggcttgatgcttcgcaacaactgtgctgggcccagatcgtgcccgtacccgagccgcaccgttgtgacgccagaggcagttccagtttggtggttcttcagcagatcggccgatgtcttggagagccagtagcctcgaactcccagcaagcttcgttgcggtgcggtaactagtaaattgacttgccaacgtgtgccagcgaacggtcctgttgtaagtcagttgctaaaaacccaccgccccgcggtgcgaaac

SEQ ID NO: 227 - DNA, 2255 bp, Anopheles gambiae; identical to SEQ ID NO: 226

SEQ ID NO: 228 - DNA, 2255 bp, Anopheles gambiae; identical to SEQ ID NO: 226

SEQ ID NO: 229 - DNA, 739 bp, Anopheles gambiae
tgattcaacaacacaaaggcgcgttcctgaaatttcaagtgaaaccgaaaacaaaacaatcaccctgcctaccggcttgttcgctaaattcgcacagcatatcagcggcggcgtcatcatgccatctgatcagattcaatattctgagaaatattacgacgatgtgtacgagtaccggcacgtaattcttcctcctgacttggccaaatatgttccaaaaacgcatctaatgacggaaacggagtggcgcaatttaggcgtccagcaatcgcctggctgggtgttgtacatgattcactcaccagaaccgcatgtgctgctatttcggcgtccccggacggatctggcaccacaatcatgaaaagtaaaaaccgcacacacacactctcactcaatttttgtacagacaaggcgtttttcatggcttttcgacgatctctacgctggcagtgggttttgatattttttacgcaagctgtaaaacgcattcgcttaggttttgttgccattgcatttagtaatgcagtggacggatagcagttctctgcaagaaaagggaaacaaatatctagccgagagtaaaacggcattgaatttttcggaaagataaaacgaactgccggatttgacgcggagataaacaatgttgaaataaaaggcgttacagcacatgtaaatattaatttaaatatgattatactgcgttgacgtcaataaataaaggttcacaagaaacaga

SEQ ID NO: 230 - DNA, 3989 bp, Anopheles gambiae
gtcgacgtcggttcggaagtacgccatcgcgtcgccccattgaaaaagtgtcagggttttcgcgaacagtgcacggtttgcgtgaaaggatcgtgcgtgattctgctgcacccgagtatttgaaacgcgcacccacatctcgatacatttaataagtccggtccattgaaaacacctttgaatccaccaaagcattttgaccggcatacaacgattcatgtgcaatggaaatgaacgaggaactattttgttggtgaaaaattaaatcgtagaaaatgccccacagacatgcaaatcctgcaaaagactatcatcgagcgaagtttaaatagttgatttatttcctcacgagcctgtggttacgaatgtgtttcgttttcttttcttttttgcagtgcaacgtgcagttaaaggtgataacggggtatgaaaatgaatgcagcaatcgttgcagtttgaagtgaaataaataaagtaagaaacaacacacagtgatcgagcgtgtgtgtgtgtgtctctctgtgtgtgattgcgcgcttgagtgtgtgtctgtgtgtgtgtgtgtgtgtggggggagggtttgtgtgtgaatccgcgtactggatcgcctcactccaataataggaaaagcaaagcctctgctctgtttataatattagtggatagtttagtagtgtaacgagtggcaccatccccagtcagacgcgagaaaagtgtagctggatcgttttctttttcttcgattaattttcacccctcgctttgcataacgaagggtcatataaatagtatgaaaagtaaaactatgatttaattagcgtgttgcgagctgcaagatttgaccgacgagtgtccctagtgtattagtaggtatgattttgtgttaacgcgttgtcgcataaaagcgccgacaaagcgacggagatcgtaacagcacgcgggctgaaaaggaaatcatacaacaagtggcaagtgtgtgaaaaccattgatatatgtaggtgtttcctgtggaaaaaatacgacacgaaaaaaaaggtgtgtaactcgcccagcccgacgcagcattcatttcctcgtcacatcctcctaatcgcaagcgaggaggagatcgatacgccgtgtcgctcgccctgcgccctgttggagtgtgtatgtgtgtatcgaagtcaatcgaagaagccttgggcagccttagcatcattgttgcatccgtcagctaatgtgcgagtcgcgagtcggtgttgtagtgaggcaaccgtgcataatcacagcggtgatgataagtctgttctaacctgatcgatctgcatctgccgtttctttcgatgacagctgttcgctgaaaggtttcgccatcaaagcccggaaagtgttagaccgcgtgtacagtgaagacgaaacgggaagcgcatatctcactagcgcgtatgtcgtgaacccaaccgaagaaaggcccagtgtgaaatactcggtgtcaaggcgaatcatcgacacaataaagatccatccctccacacgcagcagagactagtctttctgtggcagattttgttgtgcccagaaagcgagacaaaagcgcgaataaggcaggagaagcaactagagcgagggcgagcctctctagtactatacatacaccagattgaaacagaaagggcacaaaactgcatcctgccgatcaaacaatgtcgtctggaacgttcgtagatcgaatcgatccgttcgccaaacgttcgctcaagaagaaaagcaaaaaatctcagggctcatcgcggtacaggaattcacaggatgtggagctgcaacagttacccccactcaaagttgattgttccagcttagaacaggaggagctgttcattcgcaagctacgacaatgctgcgtgtcgttcgattttatggatcccctctcggacctgaagggaaaggaaatcaagcgagcagccctaaacgatctttcagcctacatcacacacggccgtggcgtactgacggaaaatgtctatccggagattatcaaaatgatatcggtaaatttatttcgtaccctgccgcccagcgaaaatcctgactttgatccggaggaggacgatcccaccttagaagcttcctggccccatctgcagctagtgtacgaagtatttcttcggtttctcgaatcagccgacttccaagcgacgttcggaaagaaagtgatcgaccagaagtttgtactacagctattggaactgttcgattccgaagatccgagagagcgtgactttctaaaaactgtgctgcatcgtatatatggaaaatttctaggattacgtgcgtttattcgtaagcaaattaataatatattcctacgttttatatacgaaacggaacatttcaatggcgtcggcgagttgctggaaattttgggaagcataatcaatggattcgctctgccgttgaaggcggaacacaagcagtttctggtgaaggttctgttgccattacacaaggtgaaagtgctgtccctctaccatgcccagctcgcttactgcgtggtgcagttcctcgagaaggacgcctcgttgacggaaccggtcgtgcggggtttactaaaattctggccaaagacgtgctcgcagaaggaggtgatgtttcttggcgaaatcgaagaaatattggacgtgatcgagccaccgcagttcgttaaaatacaggaaccactgtttcggcagatcgccaagtgcgtgtccagtccacactttcaggtcgccgagcgagcactctacttctggaataacgagtacgcaatgtcattgatcgaggacaacaatgccgttataatgccaattatgttcccggcactctaccggatcagcaaagaacactggaaccagacaatcgttgctctagtgtacaatgtgctgaaaacattcatggaaatgaactcgaagttgtttgacgagctaacagccagctacaaagcggagcggcaaaaagagaaacggcgagagcgggagcgggaagagctgtggaagcgactgaacgagctggaaatatcgtcccgtgcgccaaacaaggatcaaaatctgctcaccaatcaatcggcagggggactaatacaggacgccaattcgctcggcgctggcggcgcgcagctaaatccaaaccagctttcatcgcccaccgctacatccacatcatcctcgtcgccctcgtcggcaaactcgactggcaataacaataatagcaccgcctccggcatcggaactgcccagcctccgggatcgtccggtgccgggtcggcgctttccgccgccgcatctcagcagaatgcttcggcggtcgatgcggctgccgcattaaacaagtgatgtactgaataatattttttctaaagtcgctttcttcttcacagagaaggagcaaaccatgcgtaacatgctacatacctacataaacccacgcccccacatccatcctcacaaaccaacaaacactagtgtacacacatcaacacacatacacactgacacgaacacgctaaacaatgcgctcgcatacatatacactaatgcattatatgatagggttcactcaaagtgtaatgacatctttgtcaccaccatgcgggatgccggaggtttgttaggcgatccttcaaccgaaagcgtttggtacatggaaacgtgatctatcgtccccacaccacttacgcctgcatgtccttttcgctgtaggaaaagtcgactaaataatgattgttaatatatatacgcttgggggaggagaaggtaaaggagtgggcggcgtgaagtgttacaattgagaaaaaaaaaatagtactgcagatagtatatctttgagcaagtgtcgtttgtatgtgaattgaacagcagagcagtaactggctaattacgtatgaagtagattacaacaaaagcattgaaataatgtctgtctgcggcaaagatttggattgcgcaaagcgaatttgaagcttactgtcaag

SEQ ID NO: 231 - DNA, 3989 bp, Anopheles gambiae; identical to SEQ ID NO: 230

SEQ ID NO: 232 - DNA, 3989 bp, Anopheles gambiae; identical to SEQ ID NO: 230

SEQ ID NO: 233 - DNA, 1025 bp, Anopheles gambiae
acactgcacaagtctcactgttttggtgccgacaaatcaacacagcttctaaaaagccggctaattgcatctacattaacaatttattaaaacgtttaaatatgtctaaattttgctcactttttgccaaaccgtttccaatcattggaatgatccacgtgggtgctctgccaggaactcctctatacaaaggacatatgaataaacttattagtgaagcgcaagccgaagcgaacatttatcggaaatgcggagtggatggtgtgctggttgaaaacatgcacgacattccttacattcgaccgagggatggcctcggtccggaaattacatctgcgatgaccagagtaacgttggcggtgcgagaaacaataccggacataccatgcggagtgcaaattctagccggctgcaatcgtgaggctctggccgtagccaaagtatgtcagttgcagttcatccgtgcagaaggattcgtatttggtcacatggctgacgaagggtttacggatgcatgtgccggatctttgctacgctatcgaaagcaaatcgatgccgaggatgtccttgtcttaaccgatataaaaaagaagcacagttcgcacgccattacaagcgacgtctcaataacggaaacggcaggtgcggctgaatttttcctttcagatggcttgatagtgacaggaagttccactggtgcaagtgctgaacagggtgatttgcaagccctacgcggtaaaacgaatctaccgataatcatcggatctggactgacgcttgcgaattttcctagctattggacactagctcacggtgcaatcgttggatcccacttcaaagagaacggacattggagtgctgcgctttgtcagagacgagtccaaactttcatggaaggtgtagaaacactacggtgtcaacattcaagctaacggctagcaatgggattgtttattcatatagctaaatcaaactttattttttctgcaacaataaatgacctttgggcttcagctttgcggcta

SEQ ID NO: 234 - DNA, 1025 bp, Anopheles gambiae; identical to SEQ ID NO: 233

SEQ ID NO: 235 - DNA, 1025 bp, Anopheles gambiae; identical to SEQ ID NO: 233

SEQ ID NO: 236 - DNA, 1724 bp, Anopheles gambiae
tttgcttcaacaggcatgtgattttcaaacgcactctacagtaaacaataaaagtgtgaaaagaacagctccacgacactgcagggtctgaaaaataacccgaaaccatgagcctgtggacggataagaagttttccgatctggggttaacctactggataacacggcaaaccgaaaagttgggactgcgccggccgacaccgattcaggtagagtgcataccccgcattctgcagggtcaggattgtatcggtgccgccaaaacaggatccggcaaaacgtttgccttcgcgctgccgattttgcagaagcttagcgaggaaccgacggcaaactttgccctcgtgctgacaccgacgcacgagctagcgcatcagatagcggaacagttcatcgttgccggccagccgatgaatgcgcgcgtgtgcgtcgtgacgggcgggacggactatctgattgaaagccagcagctagagaaacggccacacattatcgtagcaatgccgggccggttggccgaccatctgaccggatgcaacacgtactcgttcgcggccctccagttcctggtggtggacgaagcggatcgaatgctgtgcggcagcttcgatgaggacctgatggtgataaaccgtttcctgccggccaagcgtcaaaatctgttcttttcggccaccctgaaggatttcctgaagacgtcgatcgtgtttccgattgcggacgatgtgttcgaatggtccgaacagtcaccggtcgctacggtggaaacgcttgaccagcggtacctgctctgtgccgattacgatcgcgacaccgttatggtcgaggcgttgcgcaaatacaaagaggaccaggaagacgcgagcatcatgatctttaccaactcgaagaaagattgccaaatcctgtccatgtcgttgaactcgttcggcttcagcaatgtgtgtttgcatgggtttttgcgccaaagggagcgcgtggcggcgctgaacaaattcaaatccaagcacgtgcggatcatgatcgcaacggatgtggctagccgcgggctcgatatacacgatgtgcagctggtagtgaaccatcgactgccgaagaaaccgatcgaatacatccaccgtgtgggacgtactgcgcgcgccggtcgcgctggaatggcgatatcgatcttacgctttccgcgcgatctggaagcactgggagaaattgaagccctcatcaacaccaagctgacggagtactcggtggatgaccgtctcgtgcagcgcatattcatgcaggtgaaggtggcccgtgccgaggccgaaataaacctagacaacaaggactttgacgaacggaagcacaagtatcgccgcttgcgctggatacaggaaggtctcgatccggacgaaatggaggcaaagtggaaggaagacatgaaagcccgcgaacaggaacgacgggagcgattgcggcaggaaaacgaagagcgccgcaaaagggataagcaaacgatcgccagcccggccgtggtgaatgatgctcggttccaggcggctgcaagcgacaaaaagtttaagaaacggaaattcattcccacggaaaagctgaatgagttgattgaacaacgcaaaactgaagcaaagggtggcaaaaaagcccgcgcccgtgggaagggcgacaagaagattgtaaagaagaaggcgaaaatggcacaataaatactacacacttcactaaac

SEQ ID NO: 237 - DNA, 1724 bp, Anopheles gambiae; identical to SEQ ID NO: 236

SEQ ID NO: 238 - DNA, 1724 bp, Anopheles gambiae; identical to SEQ ID NO: 236

SEQ ID NO: 239 - DNA, 994 bp, Anopheles gambiae
aacggcatatcgctccattggccccgcaaggttggtagtcggatcctgcttcctgtcctccattttgccagcgcccaaaaaaagccgctttactaatctgcccggctttgtgtgtagtgtgttgcacggggtgaatctgcagatagttagccgttagccgtttttgtttcgttctattgtttttgtgtgtgtgtcccttgtgtactgtgtctttttataatggctactacaaaatctaaagcgagcgagttgaccgctgtggtaaattccgcaaccgcactgcaaccgtcaccgatcatacagaagatctccccgaacggcaactgcaccgcggacgtttcgttcgaggcgtacaagcagccgaagaatcgttcgaaacggcgcagcttctcgccgatggtacaccaggaccggataccgtcaccggagctgtcgccgatcgagctaagccaaacgttccgcatctcgccccgtatgaacacaccgagagctacggagcgtcaggacgtggtgggcaagacgtacctgttggccaaaccgattcgtcctcagtacaaacgatcgccaaaggaggatgaagtgtacgtggtgacaccggtggccaagcgtgaactggagcatcgcatctgcgtgtcgaacatactgaaggacatgggtctggagaagtacatacgcatcttcacgaaggaggaaatcaacttcgacgtatttctgaccctgtgcgagaaggatctgcacgagatcggcatccactgccaggaggacatcgagaagatactggccaaaattgccgactacaacatgggcgtggaaggctagccaagatgtgtgtgtgtgtatgtgtgtgagacatgcaggtcattgatctcgattggcagcggaggtcgcttgtataggattttaagttatgtgataagctttctatgtgtgtatttgtgtgattttaataaaatgatacttgaagacttttactaagaatagttaaggatatgaa

SEQ ID NO: 240 - DNA, 994 bp, Anopheles gambiae; identical to SEQ ID NO: 239

SEQ ID NO: 241 - DNA, 994 bp, Anopheles gambiae; identical to SEQ ID NO: 239

SEQ ID NO: 242 - DNA, 828 bp, Anopheles gambiae
atggtttacatccacttcccgtcgaaccttaccgaagaagagctgatgcttcaggcaaagtacgccaagctgcgcaagaagaaaaaagcgctccaagcactgaaggcaccgaaacaggaaccggagaagaacttgcttcccaagcgtccggccgacgcgagagatgcccgcgaggtggcccgtaagctgttgaagagcggcgccatacaggcgatacagaaacctcagcccaaacaggagggttccttcaagcgtccgaagggccaggagcggaagcgaacccagccggaaatgtcccccgccggtcagtatcaatctgcgtcgacgacgccggccgaaactcccaacagcccggcggagaaggaaacgagccgcgtgcagaacctctaccaacaatttgccaacgagcgggagaaggaggaccagagcgacaaatcgaaaccgggcgcggatgcatcgaaggacaaaccacgctccgggaacacggtgtacgtgtcgggcaacaaggtgacggagaactttctcaagaagcacttcagcgactttggcgaaattctcaacatatcgatggagatcgagaagggacgagggtttatcacgttctcgaagacggaatcggccgacaaggcgatcgccgacctgcattcgaagacggtcggaggaatacagctgcaggtgcagctggcccgccgtcagccccagatcaatccgatcaacgatgcaggctcgtcggccgtctggtccgcgctcgctaccaaccggtcgcagaagggcaaacacaaggacaatcgtgagctggtgtgttacgatcacgatgatatattttaa

SEQ ID NO: 243 - DNA, 828 bp, Anopheles gambiae; identical to SEQ ID NO: 242

SEQ ID NO: 244 - DNA, 828 bp, Anopheles gambiae; identical to SEQ ID NO: 242

SEQ ID NO: 245 - DNA, 1274 bp, Anopheles gambiae
aagaagccgagagaaaagaaaaaaaaaacgttccggccaaagcagggtgtaaaagcgacgcggaaagttgttaattctaaacatattccgatatatttagttttgtgacaaagttatagctcgtgttcagtagttcacaaacacacacacccaaacaaacgcgcagtgactcggttagataagtggcaaagtgcaaaagtaaagtttccacacacacacacgcacgctaggcgcaccgttctaccccaaaagcagcaaagatgacttcccaggcagtaaacaaaaccggctccggatggccccgacgaaacagccacggaacgggtctaaccgagatgaacaaactacagacgaatcaatcgatgacactgaaccggacaattaatctttatccactgacaaactacacatttggcacgaaggaaccgctgtttgagaaggatccatcggtaccggctcgcttccagcggatgcgcgacgagttcgataagataggaatgcgtcgatcggttgaaggtgttctgctggttcatgaacacggtcttccgcacgtgctgctgctacagctgggcacaacgttcttcaagctgcccggcggtgagctaagcgccggagaggatgaggtggatgggctgaaacgactactgacggagcactatttgccgtacctaagaactacaagctagtagcggcaccgctgttcgagctgtacgacaattcgcaaggctacgggccgatcatatcctcgctaccgcaagcactctgcaggtttaacttcatctacatgtaaaaattggctcctaagccaggtacaagtacaatactgcatgcaagagggctattgtgctgcggatcgcccggcgcgggcacttgaagggaggaagaaggacctttcctttctgcaaacaaagagacagcctccgctgatggagggtgtgaagagggggggacaacaaaactggggggaagtacggtaatagtggcccctctctctctctgtgttttattcactgtgtgtgtctgtctgtgtgtgtgtttgtatgtttgttggaagcaataggaggataggcgttcgcaagctagagagagagagagagagagagaaaaaaaaacggacggttattttagagcgcatgtacaacaaagagctttccttttcccccacttacctactccctttccctcaccccttccccacctccacccttaactttaactatcttcttactccctatgtctgatataagtgaatcgagaataaatagtttacgtat

SEQ ID NO: 246 - DNA, 1274 bp, Anopheles gambiae; identical to SEQ ID NO: 245

SEQ ID NO: 247 - DNA, 1274 bp, Anopheles gambiae; identical to SEQ ID NO: 245

SEQ ID NO: 248 - DNA, 829 bp, Anopheles gambiae
ccacagcaaaaaaaaaaaccgtgcgtgcgttcgttttgtacgctcgccggttaaatgtagctaataatttagtgcaataaaagaaaacaggtggtatcgagcttgcggaaaactggccggagtgttctaccaatcggaaatggataaatcggcacccgaatctccgctgaagatgctgctcagctcggcaccacgccaggctggcacatcaatcgggcagacagtgaaacaacctccacaagcggggatacagatgcaaattcccgtacccactggaccacaggaagcaatcaactcggtgcttgtaagaaactgtgtcgcgacggtcagtgtgggctgcgagctaaacctaaaaacgatcaatttccgcacgcgcaactcggagtacaacccgtcccgatttcacggtgtcgtcatgcggatacgggacccacgctgcaccgcactggtgttccgctccggcaaagtcatctgcaccggggcgaagaacgaacagcaggcacatctcgggctgcgcaagtttgtccgcatcatccagaagctcgggttcgacgtcaagttcctagactttaaggtacagaatctggtagcgacggcggacctgcgatttcccatccggctggaaaaccttaaccaggtgcacgggcagttcagctcgtacgagccggaactgttcccggggcttatctatcggatggtgaaaccgcgcgtagtgctgttaatattcgtgaatggcaagatcgtttttaccggtgctaaaaatcagcgagagattcacgaaagcttagaaaacatttacccaatcttgcaaagcttccgcaagaactag

SEQ ID NO: 249 - DNA, 829 bp, Anopheles gambiae; identical to SEQ ID NO: 248

SEQ ID NO: 250 - DNA, 829 bp, Anopheles gambiae; identical to SEQ ID NO: 248

SEQ ID NO: 251 - DNA, 738 bp, Anopheles gambiae
tcattaacaaaatcaattgccttcggtgttctcatcacatttcttatccaaaatcctttaaatactcgttactttcatagaacgccttccctctcttgttccagccggcttttcagcaccaccgcaacacgatggcaagaccgatctcgttcgttaccggaaatgccaagaagctggaagaggtgcgtgccatcctaggggcacgcttcccgcgggaaattgtcgccgtaaagctggacctcccggagctgcagggtgaaatcgatgacatctgcaagctaaagtgcttggaagcggcccggcaggttaaggggccagtaatggtggaagatacctgcttgtgctttaacgcactgaaaggactgccgggtccctacatcaagtggttcctcgacaagctcggaccggaaggattgcataagctgctcgacggttgggaggacaagtccgcccaagccgtgtgtaccttcgcctacacggaccggccggacggtgaggtgatactgttccagggccgcaccgagggagacattgtggcaccacgggggccgcgcgatttcggctgggatcccgtcttccagccgaccgggtacgaccaaacgtacgccgagctgccgaagccaaagaagaacgaaatctctcaccggtaccgtgcgttagcgaagttggcggaacattttgccgatgaaagcaaatgagttgaaggtttttatgagtaaaggtgttagcattttacaa

SEQ ID NO: 252 - DNA, 738 bp, Anopheles gambiae; identical to SEQ ID NO: 251

SEQ ID NO: 253 - DNA, 738 bp, Anopheles gambiae; identical to SEQ ID NO: 251

SEQ ID NO: 254 - DNA, 693 bp, Anopheles gambiae
ttatcgcctttcagtattcattaagcttcccaacgaaaatgaaaacattcgtaaatgtgctactcgtcacactaagcatcggttccgccgctgccatccggtgctaccagtgttcctcccaaaccgatccgaagggagtcgacaactgtggcgcgtacaaggcgttcaacaagacgcaaaacattgcgatcgagtgcaacagcgatgagtcgcacatgcccggctcgttctgcatgaaggtggtgcaccagagcccgcgaggattcatctgggatggtcgatggcgccaagtcatccggcagtgtgcgtccgtctcggagacgggtgttaccggagtgtgcaactggggtgtgtacgagaacggtgtgtactgggaagagtgctactgcgtggaggacgaatgtaacggggcgacgggtttgaaagccacgtcctttaccgccctgtgccttgccgtgttgctgttggtggctaaaattgtatcgtaggcgcttattacccctgtgggtacactgcgttcccttcattccatccgtgtctccgtggtgagcttgctgcagctaaggaactgtttccgtccatatgagaatatcatgcataacattccacctgtagattgtgaattgtaagttttaacgttaacaaacgatttttttatacacaaaaacgatcaataaaaggtacaattgtagt

SEQ ID NO: 255 - DNA, 693 bp, Anopheles gambiae; identical to SEQ ID NO: 254

SEQ ID NO: 256 - DNA, 693 bp, Anopheles gambiae; identical to SEQ ID NO: 254

SEQ ID NO: 257 - DNA, 2173 bp, Anopheles gambiae
tcggtcgacacggtacgtgcgtgtagtcgtccaccacacgattcctttgaccaccgaccagcattcaagtgtgtgtggtgctctgtgtgattgtgccgcgcgggttcaagttgaagtgttttcccgcattttccgacggttgctgacaaagccatacttatccggttccgcggaaaaaaaacaagtgtcgccgtgatttattctacccatcgggctactcaagttcctattcgagcgagatctcatcttagtggtacggaagtgttacacacatagaagctaccgaaatgcaggcgccagagttcaaggactttgcgaaggagatggtcgattacatctccaactatctcgagaacatccgcgacaggcgtgttctgccgaccgttcagcccggctacctgcggccactgattccggacgaagcgccgcagcagccggaaaagtgggaagaggtgatggccgacgttgagcgcgtgatcatgcccggtgtgacgcactggcacagccccaagttccacgcctacttcccgacggccaactcctacccggcgatcgtggccgacatgctgagcggtgcgatcgcttgcatcggttttacttggattgccagtcctgcctgtaccgagctggaggtggttatgcttgactggctgggcaagatgctggacctgccgaaggagttcctggcctgctccggtgggcagggtggcggtgtcattcagggcacggccagcgaggcaacgctggtcgcgttgctcggcgctaaggcgaaggcgatgaagcgcgtcaaggaggagcatcccgactgggacgataatacgatcgtgtcgaagctggtcggatacacatccaatcaatcccactcctcggtggagcgtgccggactgctcggcggtgtgaagctgcgcggcctgaaggcggacgaaaatctgaagctgcgcggtgaaacgctcgaacaagcgatcaaggaagatctggacgcagggctgattccgttctacgtggtggcgacgctcggcaccaccaacacgtgcgcgttcgaccggctggacgagattggacccgtcgccaaccagtacaacgtgtgggtgcacgtcgatgcggcgtacgccgggtcggccttcatctgtcccgagtaccggtacctgatgaagggcatcgagacggccgactcgttcaacttcaacccgcacaagtggatgctggtcaacttcgactgcagcgcgatgtggctgaaggaaccgtactggatcgtgaacgcgttcaacgtcgatccgctctacctgaagcacgatatgcagggctcggcgccggactaccgccactggcagatcccgctcggtcgccggttccgtgcgctgaagctgtggttcgtgctgcgcctgtacggggtggacaatctgcaggcccacattcggcgccactgcggcttcgccaagcagttcgaggcgctgtgccgggcggacgaccggttcgagatattcggcgaggtggcgatgggcctggcctgcttccggctgaagggcacgaacgagctgagcgaggcgctgctgaagcgcatcaacgggcgcggcaacatccatctcgtcccgtccaaggtgaacgatgtgtacttcctgcgcatggcggtgtgctcgcgcttcaccgagccggccgatattgactactcgtggaaggaggtggccgcggccgccgacgagctgctggccgagcagaagaagtagattgtgcatcatcgcactgtcgctcaccctctcctcatcctcatgcaaacaatctacatcgttaagttttgtgtttttatgttgttgtgtaccgtcaagtgaacgtttaatttattattacatgtgcaagtcaacgaaaaacacgttcactgtgcgcgcgtagccgttcggcgcgcgctctgcaagtattacagggaccagggggaatttggtactgcggggaagctggtgtacccgtgtacccaacttagggacacattcgcgtggcaatcatgttgcaataccggcaaaccaggcaataatgagtaacgataacacaataacgcgttatgcgcgatgaaccgttttagccagatgttcgtatatgcttattgggctcgttgttgtatcgatgttcgatgtttatatagtgaacctgttgggctgataataaaatctaaggcatacca

SEQ ID NO: 258 - DNA, 2173 bp, Anopheles gambiae; identical to SEQ ID NO: 257

SEQ ID NO: 259 - DNA, 2173 bp, Anopheles gambiae; identical to SEQ ID NO: 257

SEQ ID NO: 260 - DNA, 711 bp, Anopheles gambiae
acgctacaggatatttgctcctgcaacataccatcaaagagtcctcgaaccaaacaaagaagcccaagagggagagaaagcgagtgcgatttgtgcccaaaccacaatttgctacggaaaagaaaccactaaccgagctcgagagacagtgtgcccgtgtgcgttgcttattatttaccaaatagaagaagccaaaaaatgagcgtgaaagatatttactattcggataaatattacgacgacgagtacgagtacagacatgtcgtgctaccgaaggacatagcgaagctggtgcccaaaacacacctcatgaccgagaacgaatggcgagcgatcggtgtacagcagtcccgtggctgggtccactacatggtgcaccagcccgagccccacattctgctgtttcgaaggcccatcacgaagacataagaaaaaagaaccttcccaccctggagcaaaaaccaccccgagatcgatcgagctcttcaggacgaaatatgtgtgtgtgtgtgcgtgagtgtgtgtcgcggcgtgtccctgctggatacgaatgtgtatgtgtgtgcgtgcgtgagtgtgtatgaatgtatgagtatgtaccctttgccaatagacacccggggaggcgtgcaacaacatcgccccttgttgtacgcgtcatgaagattctggaaatgttcaacgcgccgcgagcgtcagttctcgccgtcg

SEQ ID NO: 261 - DNA, 711 bp, Anopheles gambiae; identical to SEQ ID NO: 260

SEQ ID NO: 262 - DNA, 711 bp, Anopheles gambiae; identical to SEQ ID NO: 260

SEQ ID NO: 263 - DNA, 1544 bp, Anopheles gambiae
atgtacgcgaaaggcaaagggacggcggtgccgtcagatgcacaagctagggaaaaaattgcactttatgtatatgaatatttattacacgtaggagcatcgaaagcagcacaaacattcttatcggagatacgatgggagaaaaacatcacactaggcgaaccaccgggcttcctgcattcgtggtggtgtgtcttctgggatctctactgtgcggcaccggagcgacgggacacctgcgagcattcatccgaggccaaagcatttcatgactacggtttcgtgagttcagggtacggagtgaacggaatagcacacaatgccggcccggcaccgagcccactgggacagttaccaccaaacgaaggcatgcccggcggcccgatggcaccttcaggcttctttccgaactcctccattaggccatcacaaccttcacaccctagtagtcagcagtccccacatccacagcctccaaactcgcatggacaattgatgagcggtcagccgttcatgggtggcccccgatatccaccaggacccaggccgggagtgagaatgccgcaaggaattggaaacgatttcaatggtccccccggacaaccaatgatgccaaatagtatggatccgacgcggcaaggccctccaggtatgggtcccatgaatcctagaatgaatccacctcgcggcccgggcatgggccccatgggagcgggcacgtacggtccaggaatgcgcggccccccaccaaacagcagtttaggaccgggcggtatgccaccgatgggtatggccggcggtcggccacagtggcaaccgaacacgtcatcgccgatgaactactcgtcgtcctcgcccggcaactacggcggaccgccgggaccgagcgggccccctggaccgggtacgcccatcatgccatcacctcaagattcatccaactccggcggcgaaaacatgtacacaccaatgaaacctgaattccctatggtcggcggcacggacggcagcggcccgatgggtggaccgatgggcccgaacacgatgggcggcccggtacttaataacgatggtttggacggcatgaagaacagccccgcgaacggtccgggcacgccacgggaagactccggcagcggtatgggcgattacaacctcggcggcttcggtggtcccggcgagaacgtaagtttcgacaatttctagtgaccagtgtactgccaatgtacctcttcgctcacattgcccccacaaccacaacccttcattttaacaacattttgcaacaacaacaacaacaacaaaacaaccaatcgacaacaacccgcaaggctgaatgtgtggggtaaaacagcgaccgactttttatgtatgatttagtttacccgcgtctccccccccatcccactcaagtgtgtgtttgtagtgggtcttcgtcccgcacctccctcaaatgcatattttgtgtgcgctgcacaatgcgaattattttatcacacaaaacatttcctaactgtgttgttcctgtaccgagctattaaaat

SEQ ID NO: 264 - DNA, 1544 bp, Anopheles gambiae; identical to SEQ ID NO: 263

SEQ ID NO: 265 - DNA, 1544 bp, Anopheles gambiae; identical to SEQ ID NO: 263

SEQ ID NO: 266 - DNA, 1207 bp, Anopheles gambiae
caagaaacaacactttggacgcgtattggctgtttctgttgatttcgcaccatattcccggcattttcgtatagtaagttgtgtgtactggatcggcaaacgcgtcaaccctaaacggcacaaggcatccattcgaaaagcgccacagcgtcgcgttgtgcctcctcgtagcgattggaaggtttgtttgcatcgcttgtttacacgctaccgcgacctttgccagccaccagctatggaccagatgctgccgagtccgggattttcgatccccagcatcgggacgccgctgcaccagccggaggaggatcagcagattctgccccacgcctaccagcagcaacagtcgatgccacacatgacaccgatgggtggccttagctcgagcaactacacaatgccggccatcggttcgacgtccggcaagagcatgcacacgtacgcgcccagcttctccaccccgcagaacatgattcaaccacagacaccgcaaagtctcatgtcaccgatggtgccgatgacggaatcgaaggcggcagcaacaccgagccacccgcagagcggcagcgggggcagcgtgcgggatccggaaaacatcggcagcgtcaacatccatcagacgatgggtcccgccaccccgatgacaccgatgacgccgagcgaaccggccatcctgccgcagctgcaaaacatcgtctcgacggtgaacctgagctgcaagctcgatctcaaaaagattgccctgcacgcccgtaacgccgagtacaatccgaagcgtttcgctgcggtcatcatgcgcatccgggagccgcgcacgaccgcgctgattttctcctccggcaagatggtgtgcacgggcgcgaagagtgaggacgattcgcgactggcggcgcgaaagtacgcgcgtatcatacagaagcttggctttacggccaaattcctcgactttaaggtacagaacatggtgggcagctgtgatgtgcggtttccgattcggctggaagggttggtgctaacgcacggtcggttcagctcgtacgagccggaactgttccccggactgatctaccgtatggtgaagccgcgtatcgtgctgctcattttcgtgtccggcaaggtggtgctgacgggggctaaggtgcggcaggagatttacgacgcgttcgaaaacatctacccgattctaaagagcttcaagaaacagtag

SEQ ID NO: 267 - DNA, 432 bp, Anopheles gambiae
atgtctattggcgtaccaatcaaagtgctgcacgaggccgaaggccatgtggtgacctgcgagaccatcaccggcgaggtgtaccgtggaaagctgatcgaagccgaggacaacatgaactgccaaatgacgcagatcaccgtgacttaccgggacggacgcgtcggaaatctggagaacgtgtacatccggggctcgaaaatccgcttcctcatactgccggacatgctgaagaacgcgcccatgtttaagaagcagggcgccaagacgggcactgccggacgaggcaagtcggctatactgcgagcacaggcggcccgaggcagaggtcgtggggcgggaggcggcggaggtggtggtcgaggcggtaacaaaggaggatggcaagggcaaggacagcaatcttctggccgtggacgcggagggttgtag

SEQ ID NO: 268 - DNA, 432 bp, Anopheles gambiae; identical to SEQ ID NO: 267

SEQ ID NO: 269 - DNA, 432 bp, Anopheles gambiae; identical to SEQ ID NO: 267

SEQ ID NO: 270 - DNA, 846 bp, Culex quinquefasciatus
atgctccaagctaaatacgccaaactcaaaaagaagaaaaaggccctccaagctctgaaagcgcccaaacaggaaacggaaaagaatctcattccaaaacgaccggccgatgctcgggacgcacgcgaagtggcacgaaagctcctcaaaagtggtgccatccaagctattcaaaaaccgcagatcaagcaggaaagttcgttcaaacgtccgaagggtcaggagcgaaagcggtctcaccaggaatccagtcctggtgctcagtatcagtcgttctcgtccgtggaaactcctccggctacgaatccggttagtccatcggtcatttcgacgccgaccacaccgaccgctgcaaacccgtcgtccagtccggacaccccggtcgagaaggaaccgccgcgggtgcagaatctgtaccaacagtttgccaacgagcgcgaccgcgaggagcaatccctgaaggccggagattcacctcgggataagccccgctccggaaatacggtttacgtgtccggaaacaaggttacggaggactttttgaagaaacactttggcgagtttggggaaattttgaacatttcaatggaaattgaaaagggtcgcgggtttataacgttctccaagacggagtcggccgaccgcgcaatctcggaccttcacagcaaaacggtcggtggcattcagctgcaggtgcagctggcccgcagacagccccagatcaacccgatcaacgatgccggttcgtcggctgcgtggtctgcgctggctacaaatcgatcccagaaaggcaagcacaaggataatcgtgagctggtttgttacgatcacgatgacattttctaa

SEQ ID NO: 271 - DNA, 1230 bp, Culex quinquefasciatus
atgtactcctacttcgttgttgcgatagttgcaagttgcttaactcaacaaaccaaaggatttgtcgttccggattacttcgactttcaggtcgaatctcaagacgccaaaataactgcccctgagcttgcaataaagtacggctaccgggcggaaactcacaaagtacaaaccgaggatggatatctgctggaactgcaccgaatcaccggaagtggttccacggcgtacgacaagcgacttccgccaatcctgttgatgcacggtctacttacctcgtccgcggattggctgctgatcggcccaggcaacggccttgcctaccacctcagcgatctgggcttcgacgtgtggctgggaaatgcccgcggaaatcggtactgccgaagtcacgccagctggacgcccaacatggtcaagttctgggacttttcgtggcacgagattggcgtgtacgatctgccggccatcatcgatcacgtgctggagagcacgggaaagccacggttgcactacatcgggcactcccagggtacgactacctttttcgtaatggcatcggaaagaccggagtacagcgagaaggtcatcctgatgcaggcgttggcacccgttgcctacatgaagaacatcggtagcccactgctccggtatttggtcaagtacttgggagcgattgagacaatgatcgactttttcgggctgggagagttcaaaccaatacccagtgtgctgctggagctggcaaagctgatctgcccgacatcgcaatccaacaacctgtgtctaaacgtgatgttcctgctagcgggagccaacccagaccaaatcgatcccgtcatggtccccatcatcctcggccacatcccggcaggctcatccaccaaacagctggtccactttggccaggaggtactttcgggtcagttccgccggtacgattacggcaaggtgaagaacctgtacgagtacggccaagcggaaccaccggcgtacaacctcacccgggtgaccacacccgtggtgctgcactacggcgccaacgactacatggcacacgtggacgacgttcgacggctggccgcgcaactgccgaacctgctcgagagtcacttgattgagttggatttgttcaatcacatggactttttgttcgcaaaggacgccgtaaaactgttgtacaacgacttggtcaacaacgttgagaaatacaccgaccgcggcaattag

SEQ ID NO: 272 - DNA, 228 bp, Culex quinquefasciatus
atgagtgtaaaagacatttattattcggataaatatttcgacgacgagtacgagtacagacacgtcgtcctgccaaaggatatcgcaaaactagtgccaaagacccacctaatgacggaaacggaatggcgatcgatcggagtacagcagtcccggggttggatccactacatgatccaccagcccgaacctcacatcctgctgttccgacgacccatcacgaaatag

SEQ ID NO: 273 - DNA, 1539 bp, Culex quinquefasciatus
atgtcgtccggaacgttcgtggaccggatcgatccgttcgccaaacggtcgctcaagaagaagggtaaaaaatctcagggctcatcgcggtacaggagttcacaggacgtggagctgcagcagctgccgtcgctgaaagtggactgctccagcttagagcaggaggagctgttcatccggaagctgcggcagtgctgcgtctcgttcgacttcatggacccgctgtcggatctcaagggcaaggaaatcaagcgggcggcgctgaacgacctgtcggcgtacatcacacacggccgcggcgtgctcacggaaaacgtctacccggagattatcaaaatgatatccgtgaacctgttccgcacgctcccgcccagtgaaaacccggactttgacccggaggaggacgacccgacgctcgaggcgtcctggccccatctgcagctggtgtacgaggtgttcctacgcttcctagagtcggccgacttccaggcgacgttcggcaagaaggtgatcgaccagaagtttgtcctgcagctgctggagctgttcgattccgaggatccgagagagctcggcgagctgctggagatcttgggaagcataatcaacggtttcgccctgccgctgaaggcggaacacaagcagttcctggtgaaggtgctgctgccgctgcacaaggtcaaggtgttatcgctgtaccacgcccagctcgcgtactgcgtcgtgcagttcctcgagaaggacgcctcgctgacggagccggtcgtgcgcgggctgctcaagttctggccaaagacgtgctcccagaaggaggtgatgttcctgggggagatcgaggaaattctggacgtgatcgagccgccccagttcgtcaagatccaggagccgctgttccggcagatcgccaagtgcgtgtcgagtccgcactttcaggtcgccgagcgggcactctacttctggaacaatgagtacgcgatgtcgctgatcgaggacaacaacgccgtcatcatgccgatcatgttcccggccctgtaccggatcagcaaggagcactggaaccagacgatcgtcgccctcgtctacaacgtgctgaaaacgttcatggagatgaactcgaagctgtttgacgagctgaccgcgagttacaaggcggaacggcagaaagaaaagaaacgagagcgggaacgggaagagctgtggaagcgactgcatgagctcgagagtgcccgccggccggacgcgcccctagtcgacggtggtgccggcagcggagcagccgccggaggatcgctggccgccggagccgccggatcgcaactaaatcccaacgccctgacgctatctgccacgtcgacatcgtcgtcctcgtcgccgtcgtccgttacatccgctagcaatctgaccgccgcgtcccaggcgccaccacccggctcgaccggaactagcctgcagcaggccggcggttccgcaacatcctccgccacgtcccccaatgccgccaccaacaatgccgccgccgccgcgccgttaagcaagtga

SEQ ID NO: 274 - DNA, 573 bp, Culex quinquefasciatus
atggcctctcgaccgatttcgttcgttaccggcaatgccaagaagctagaggaggtccgtgccatcctgggagcggccttcccgcgggagattgtggcggtgaagctggatcttcccgagctgcagggcgaggtggacgatatctgccggaagaagtgtctcgaggcggctcgcaacgtgaagggaccggtgctggtggaggacacgtgtctttgctttaacgcgctgaagggattgccgggcccctacatcaagtggttcctggaaaagctgggcccggagggtctgcacaagctgctcgacggctgggaggacaaatcggcgcaagccgtgtgcacctttgcgtacgcaccggacgaacaaggcgatgtgctgctgttccaaggccgtaccgagggcgatatcgtgtttccgcggggaagtcgcgactttggctgggatcccatattccagcccaaggggtacgacaaaacgtacgccgagctgccgaaggagcgcaagaatgaaatctcgcatcgctttcgggcgctggacaagctgagggagtactttggcggtgaggagaaaaagtga

SEQ ID NO: 275 - DNA, 711 bp, Culex quinquefasciatus
atggacaaaccgccggcgcccgattctccactgaagagcctgctggccactccgctccaacgtcagacctcatcgggcagcggatccgttccgctgataaaaatgcaaaatgttccaccacagtccagcatggtcatgcaggcaccgatgccgaccgggccgcaagaagccatcaactccgttctcgttagaaattgtgtggccaccgtaagcctgggctgcgagctgaacctgcagtccatcaactttcggacgcgcaactccgagtacaacccgagcaggttccacggggtggtgatgcgcatccgggatccgcgctgtacggcgctcgtgttccgctcgggcaagatcgtctgcaccggggccaagaacgagcacgacgcgaatttggccgcgcgaaagtttgcccgcatcatccagaaggtgggctataacgtaaagttcctggagtttaaggtgcagaacctggtggcgacggtggatctgcggtttccggtccggttggagaatttgaaccaggtgcacggccagtttagctcgtacgagccggaactgtttccggggctgatttaccggatggtgaaaccacgggtcgtgctgctgatcttcgtcaacgggaagatcgtctttaccggggccaagtccgagtgggaaattagggagagcttggagaatatctatccgattctgcaaagcttccggaaaaattag

SEQ ID NO: 276 - DNA, 2682 bp, Culex quinquefasciatus
atgcgatctagtgaaggcggtggcagcccgcgagataagaaaaatgctcttcgtaatttcagcttgctctcgcgctcgctgctggcggcctgcaccgacaacgacgtcaacaccgtccggcggctcctcggcgagggcaactcgctgaacgaggccaccgacgacggggactcgctgctgtcgctggcctgctccgccggctactacgagttggcccaggttctgctggcgatgtcggcgcaggtcgaagaccgcggccagaagaacgactgcacgcccctcatggaagcggcctcggccggtcacgtggacatcattgcgctgctgttgaagcacgatgccgacgtgaacgcccagtcgtccactggaaacaccccgctgatgtacgcgtgcgccggcggtcacgaggacgcggtccggctgttgctggagcgcggtgccaacgtcgaggaccacaacgagaacgggcacacgccgctgatggaggcggcgtcggccggccatgtcggagtggccaagattctcctggagcacggtgccggcatcaacacgcactcgaacgagttcaaggaaagtgcgctcacgctggcctgctacaagggccacctggacatggtgcggtacctgctggaggcgggcgccgaccaggagcacaaaaccgacgagatgcacacggccctgatggaggcgtccatggacggccacgtcgaggtggcgcggctcctgctcgattccggcgcccaggtcaacatgccgaccgattcgttcgagtcgccgctgacgctggccgcgtgcggtggccacgtcgacctggcgatgctgctgatcgagcgcggcgccaacatcgaggaggtcaacgacgaggggtacacgccgctgatggaggcggcccgcgagggacacgaggagatggtggcgttactattacaacaaggtgcaaatattaacgcccaaaccgaggaaacgcaggagacggccctgacgctggcctgctgcggcggcttcgtcgaggtcgcggactacctgatcaagcacggtgccgacatcgagctgggtgcgtccacgccgctgatggaggccgcccaagagggtcacatcgatctggtgcggttcctgttggagaatcgggccgatgtccacgcgcaaacccaaaccggcgacacggcactgacgtacgcgtgcgagaacggtcacaccgaggtggcggacattctgctgtactacggtgcggagttggagcacgagtcggaagggggccgaactccgctgatgaaggcatgccgcgccggtcactggtgcatcgtcaagttcctcatcgagaagggcgccgacgtgaatcggcacacgaccaacaatgaccacaccccgctgtcactggcctgtgccggtggccatcagaacatcgtggaactcctgctgaaaaacggtgccgacccgttccacaagctcaaggacaacagcacgatgctgatcgaggcggccaaaggtggccacattggcgtcgttcagcttctgctcgatttcccgcactcgttgatcagtgccaacacggccgcccagcagaacctcctgaacaacggtcagatccagctccagcaagcgcagcagcaactccaacaacaacaagctgccgcagctgcagccgcggccgccgctgcccaacaacaacagcagcagcagctcatcatcacccaaaaccagcaacaacagcagcagcaacaacaactgcttgccgcaccacccggccttcacgaagtcccggaaatgaatcgagtctccaacaagcaaatgttccaacaacacccctctgccaaggatggtggcgtactcgaccagcaacagcagcagcagcaacaacaattgctcgccaacaaccaaatgctggtcgccgccaacccgaatgtgttcctcgatggcaacatcgcgtcggccgacccctcaatactcgcccagatgcgactgatccagatgcagggcttcaaggacggtctcgcccacggcctgtcccgagcgcccggcaacaacaacaacaccaaccagcaacaacaacagcaacaagtcctttcccagcaaatcccaacccacttggtcgctgcccagcaacaacaacagcaggtcatcgccaacaacgccgccattctccagcagcagcagcagcaacaacaacaacaagcagctgccgccgccggaattggcaacaaacagcgaagtctgctgcgtaaaaagcaacaaccggctgcgtccgccgtagctcaggcccagcagaaccagcaacaactgtcgccgttcgagccgaatctaaccagttcggaagcgcagcaagtgcgcagcgaacccatcggcgaggacaacggaggacagcagcagcgggttatgcgatccaactacgaggcgcagtaccagaagcagatgcaggaaatgtaccagaagcagaaggccaacatccagtttatttgtgattcgaacggtccgccaccgacgctgttaccgcccacgggaacctacatcgatattacgacgccagctcaaggactgatttgtggcaccgccggggccagtttcaccaccaccccgaacggggcgccgccactgctcgggccaatgtcgacgctcggcgttggtcaccagcagcagcagcagctcgccattccaggcaagtgccgctgtgacaaaattccttaa

SEQ ID NO: 277 - DNA, 1161 bp, Culex quinquefasciatus
atgatcctgttgcgcattctgttggtagtattctgtatcggaactacgtttgctacggttgacctgatatccgctgagggttacactgtagagcagcatgaaaccgttacctccgatggctacgtactaaccatgttccgcatcccaggaacaccaggaaactccagccgaccagttgtgtttcttcagcatggcctactctgctcgtcaaccgactggctcgtactgggagcgggacattccctggcctacttatttgcggatgccggatacgacgtttggctgggtaacgctcggggtaacactcactcgcgacgacacgtagcgctagatcccgcgagggacgaaacgttctgggactttagctggcaccagatcgggctgtacgatctgccggccatggtcgactacgcgttgcaggtaaccggggaatcggcgctgcattatgttggtcactcgcagggcactacggcgttcttcgtgatgacttcgctgcggccagagtacaacgggaagatccggtcgatgcaggcgctggccccggtggcttttatgggtcacttgcagtcaccgtttctgcgggttttggcgccgtttgtcgatcagatcgagtggattaccggaatgctcggagccaatgagttcctgccaagtaacagtatgctggcgctgggagggcaaaagttctgccaggacacgtccccggtggttgaactctgtgccaacacgctctttctgattggtggattcaattcggctcagctaaaccggagttcgctcccggtcatcctggcaaatactccagccggagcttccgtcaaacaactggtccactacgctcacaacatcaattcgggtagcttccggcagtttgactacggttgggcccttaatctggtccggtacggatcgatcctgcctccaaagtacccgttggatcgtgtaacggcgccggtactgttacattacggagaaaatgactggcttgccgctatcagtgatgtccatcttttggcaagggagctcgggaatctggtcgcaatacttccggtttccgaccggaagtggaaccatctggacttcacttacgctgtggacgccaaaattcgactctatgagaaagtcatcgacattgttgagcagtacgaaaacctaacctag

SEQ ID NO: 278 - DNA, 1197 bp, Culex quinquefasciatus
atgaaacaggtgttgttggtctttgccactctagtgcttgttggagtcaacagtcaaatacatccggatattatagaggatgcgcatttagatgcgcttggattactgagaaaatacggttaccccgctgaggaacacatcctagagactgacgatggctacctccttggactgcaccggtgcccgggcagtccaatgtccccaccggcacccggaaagcccgtagtcctgttgcagcatggcatgttgagctcttccgccgattacatcctgatgggaccgcagaccagtctggtgtacatgctggccgacgccggttacgatgtctggattggaaatgcccgtggaaatcggtactcgaaccgtcatcgcacccggaacaactcaactcaacagttttgggacttttcgtggcacgaggtcggctcgatcgacgtgcccaacatgatcgacttcatcttggcccgaactggcgagacggctctgcagtacgttggacattcccagggaaccaccgtgttctgggtcatgatgtcgcagcatccgtactacaaccgtcgcatcaagagtgcccacatgttggctccggcagcttacatgcaccacacgcgcagcccttacgtgatcttcctggcgacgttccttcacactacggagttgatgctgcagatgatgggaacgtactacttcgcaccgacctccgagatggacatccagggtggactcgaccgatgccacgacggagcgcccttccagcagatgtgcacgatcaatacgttcttgatcgctggcttcaactcgcaggaggtcaactacaccatgctaccggtcatccatggacactccccagcgggagcatccgccaaccagatgatccaccacgcccaaacggtacgatcgcgcatcttccggcagtttgaccacggtgccacgatcaacatgatccgctacggttccatgatccctccgaggtacaactttgacaacgtccaagccccgaccctgctctaccactccaccaatgactggctggccgccccggaggacgtcgaacttcttcgccgtgagctgccgaacgtccacaagacgtacctggtctcgcagcgcgagttcaaccacatggacttcatctgggccatcaacgtgcggccgctactgtacgatgaactactggccgatttgcgggcgtacgcgtag

SEQ ID NO: 279 - DNA, 1212 bp, Culex quinquefasciatus
atggcgcaactacttccatcaatccccatcctgctggcccttatcagctgggcgtgtggagtcccgacggcccgtaacatctcagcgactcgacactttcaagtggacgccgaggatgcacacctgtccgttccgcagctgattctgaagtacggctatggcgccgaagtgcatcatgccaccaccgaggacggttacatcctggaactgcaccggattcccaaaccgggagctcccgtagtgctgctcatgcacggactgctgtgcagctccgccgattgggtttccattggtcctggaaacggtttggcatatttgctagctgatcaaggttacgacgtttggttggggaacgcccgcgggaatcggtactctcggaagcatcgcaccctaaccccgaagatgttcgccttttggcaattttcctggcacgagatcggcttctacgacctgccggcttcaatcgattacgtgctcgaaaagaccggcaggtcgaaacttcactacatcggtcattcccaaggtaccaccagcttcttcgtgatgacctcaacccgtcccgagtacaacgccaagatcgccctagcccaagccctcgccccggtagccttcacggagaacatgcagagtccactgctgcggatcatggctctctttcaggacacgctggccgccctgtttgaaacgttcggcgtcgccgagttcgccccgagcaacgccatcctgcacgacatctccaagctcctgtgcacgacccaaatctccaacaacctctgtctgaacgtgctgtttcagctggccggcgccaacccggaccaggtcgacctaaagctgatccccatcctgatgggacatacgccggccggagcgtccaccaagcagatcgtacactatgcgcagggtgttaggagtgggcggtttcgacagtacgatcacggaacgatcaagaaccggttcgtgtacgggacggctgacccgccggtttataatctgacgcaggtgaccgctccggtggtgttttactacgcgctgaatgattatctggccgttccggtggacgtcgagcggctgtcccgggggattgggaatctggccgggtaccggcaggtgcgcatggagacgttcaaccatttggactttttgttcgccaaggacgtgcggacgctgctgtacgaggagattctggggaacgttcggcgttatggtggatga

SEQ ID NO: 280 - DNA, 1068 bp, Culex quinquefasciatus
atgctgaactggtttgcggttggtattctgggcaattaccccggtggaaactactggttcagtccggtatctccaccagctcccggaaagcccgtagtcctgctgcagcatggcatgttgagttcctccgccgattacatcctgatgggaccgcagaccagtctggtttacatgctggccgacgctggttacgatgtctggttgggaaattcccgtggaaatcggtactcgaaccgccatcgatcccggaacaacgaaacccagcagttctgggacttttcgtggcacgaggtcggctcgatcgatgtgcccaacatgatcgacttcatcttggcccgaactggtcaatcggctctccagtacgttggtcattcccagggaaccaccgtgttctgggtcatgatgtcccagcatccgtactacaatcaacgggtcaagagtgcccacttgttagctccggcagcctacatgcaccacacccgtagtccgtacgtgatcttcctggcgacctaccttcacaccacggagttgatgctggaaatgatgggcacgtactacttcgcaccgacctccgagatggacatccagggcggtattgatcgttgtcgagacggagctccgtatcagcagatgtgtgccataacgaccttcctcatggctggcttcaactcgcaagaggtcaactacaccatgcttccggtcatgcacggtcactccccggcgggagcttccgccaaccagatgatccaccacgcgcaaacggtgcgatcgcgaatcttccggcagtttgatcacggtccaaccatgaacatgatccggtacggctccatcacaccacccaactacaacctgcagaacgtccaagctcccaccctgctctaccacagcacgaacgactggatggccggcccggaagatgtcctcctgctcgctggacaactgccgaacgttcgcaagcgctacctggtcccccttccggcctttaaccacatggactttgtttgggccatcaacgtaaggtcgctactgtacgatgaactgctggccgatttacgggcttacgtttga

SEQ ID NO: 281 - DNA, 1290 bp, Culex quinquefasciatus
atgtacgctaaaggaaagggggcagcggtgccgtcggatgcacaagctagagaaaaaattgcactttatgtatatgaatatttattacacgtaggggcatcaaaagcagcacaaacattcttatcggagatacggtgggagaagaatatcacactaggcgaaccaccgggcttcctgcactcgtggtggtgcgtattctgggatctctactgcgcggcaccggaacgacgggacacctgcgagcattcatccgaggccaaagcatttcatgattacggtttcgtgagttcaggctacggagtgaacggaatagcacacaatgccggcccggcgcccagcccgctcggacagttaccaccaaacgagggcatgcccggcggcccgatggcaccctccggcttcttcccgaactcctccattaggccatcacaaccctcacaccctagcagtgggcagtccccacacccacaaccaccaaactcgcatggacagatgatgagcggacagccattcatgggaggtccccgatatccgcccggtccccggcccggagtccgaatgccgcaaggaattggaaacgatttcaatggtccccccggacaaccaatgatgccaaatagtatggatcccacgcggcaaggccctccaggtatgggtccgatgaatcctagaatgaatccacctcgcggccccggcatggggcccatgggcgccggcacgtacggccccggaatgcgtggccccccgcccaacagcaacctgggccccggcggaatgcccccgatgggcatgggcggcggacggccccagtggcaaccgaacacgtcatcgcccatgaactattcatcctcgtcacccggaaactacggcggcccgccgggaccgagcggaccacccggccccggaacgcccatcatgccatcacctcaagattcatccaactccggcggcgagaacatgtacacaccaatgaagcccgaattcccgatggtgggcggctcggacggcggtggcccgatgggtggccccatgggccccaactcgatgggtggaccggtacttaacaacgacggcctcgacggcatgaagaacagcccggcgaacggacccggcacgccccgggaggactcgggcagcggcatgggcgactacaacctcggcggcttcggcggacccggcgagaacgatcagaccgaatcggccgctatactcaagatcaaggaaagcatgcaggaagaggcgaaacgcttcgagaaagattccgaccagcccgactactacatgcaataa

SEQ ID NO: 282 - DNA, 1134 bp, Culex quinquefasciatus
atgtacccggaaattgccgtccgccacgggtacggcgcggaatcgcacacgttgaaaacggccgacggctacctgctgacgttgcaccgaattccgtgcggcagagccggatgttcgggcggcaagggaacgggccagccggtgtttttgcagcacggtctgctgtccagttcggcggattggttgctcagtggtccggaacgggcgctggcgtttattttggccgacgccgggtacgacgtttggctgggaaatgcccgcgggaacacgtactcgaggaagcacgtgtccatgaacagcgacgagacggcgttctgggactttagctggcacgagatggcgctgtacgatgttccggcggaaattgactttgtgtatgcgatgagggagctcgaacggaacgatacgaggaagaatctgctctacgttggccactcgatgggaactacgatggcgtttgtgctgctggccagtcgaccggagtacaacgcgaagattcaggcggtttttgcgatggctccggttgccttcatgggtcacgtgaaaagtccgattcgcctgttggcgccattttcacacgacattgagatgatcctaaaattcttcggcggcaacgagttcatgccgcagaacaagatcattcgctacctcgccaaatacgggtgcgagctgaccgaggcggaaaagtacatctgcgagaacacagtctttgtgctgtgtggcttcgacaaggagcagtacaacgccaccctaatgcccgtcatctttggccacaccccggccgggacgtccaccaaaaccgtggtccattacgcgcaagagatccacgagtcgggcaactttcagcgcttcgattacggagaggcggaaaacgaacgccgctacggacaggccaaaccgcccagttacgagctggagaacatctcgaccccgattgcgctgttttacgccagcaatgactggctcgccggaccgaaggacgtggccaacctgttcaaccggctgacgcggacggcgatcggaatgttccaggtgccgaatgttaactttaaccacgtggactttttgtggggcaacgacgcgccggaagtggtgtacaagcagctggttatgcttatgcagcggtacaagtga

SEQ ID NO: 283 - DNA, 600 bp, Culex quinquefasciatus
atgtcgatcggtgtgccaatcaaggtcctgcacgaagcggaaggacacatcgtgacgtgcgagaccatcacgggcgaagtttaccgcgggaagctgatcgaagccgaggacaacatgaactgccagatgacgcagctgacggtaacgttccgcgatggccggacggccaacctggagaacgtgtacatccgcgggtccaagatccggttcctgatactgccggacatgttgaagaacgcgcccatgttcaagaagcagggcgccaaatccgggacggcgggccgcggcaagtcggccattctgcgagcacaagcggccagaggacggggcaggggtggcggcggtggtggaggaggcgatcgggatcggggcgaccgaggtggtggcggcggaggaaatcgtcctccaggcaagggtaactggcagggacagggaccttccggcggcagaggccgaggagggctgtagagggctcggttgggcggacgagcggtttacccttaagttaaaacataagacatcttacatctttgaagcattcaattgtatttcctttgaacagaactaataaacaatctctgaaatgtaaaacaaattaaa

SEQ ID NO: 284 - DNA, 282 bp, Culex quinquefasciatus
atgccatccgaccagatccagtactcggagaagtacttcgacgacgtgtacgagtatcggcacgtcatactgccccaggacctggcccgcaacgttcccaagtcgcacttgatgacggaaacggagtggcggaacctgggcgtgcagcagagccccggctgggaaatgtacatgattcacgtgccggaaccgcacatcttgctcttccgacgaccgcgcacggatctaccgccgaagacggctgcggccggtggtcagggctcttcgcgattggctgtttga

SEQ ID NO: 285 - DNA, 969 bp, Culex quinquefasciatus
atggaccagctggcaatgagtccgggcttttcgatcccgtcgatcggaacgccgctgcaccagcccgaggaggaccagcagattatgccgcacgcgtacaaccagcaaacccccagcggcatgaccccgatgggcggcggcctgagcgcgtacggaatgccctcgatcggcatgggaacaccgaacaagcacacgtacgcgcccagcttcgccgcgccgcagagcctgatccagccgcagaccccgcaaagcctcatgtcgccgatggtgccgatgcaggagacgaaggcttcggccacgccgagctaccagcagcagaacagtacgggtggggggagtgtgcgcgacccggacaacatcggcagcgtcaacatccactcgacgatgggtccggcgacgccgatgacaccgatgaccccgagcgaaccggccatcctgcctcagctgcagaacatcgtgtcgacggtgaacctgagctgtcggttggacctgaagaagattgccctgcacgcccgtaacgccgagtacaacccgaagcggttcgccgcggtcatcatgcgcatccgggaaccgcggacgacggcgttgatcttttcgtcggggaagatggtgtgcacgggagcgaaaagcgaggaggattcgcgacttgcggcgcggaagtacgcccggatcatccagaagcttgggtttacggcgaagtttcttgactttaaggtgcaaaacatggtggggagttgcgacgtgcggttcccgattcggttggaggggctggtgctgacgcacggcaagttcagctcgtacgagccggaactgttcccggggttgatctaccgtatggtgaagccccgcatcgtgctgctgatcttcgtgtccggcaaggtggtgctgacgggggccaaggtgcggcaggagatttacgacgcgttcgataacatttacccgattcttaaaagtttcaaaaaacagtag

SEQ ID NO: 286 - DNA, 825 bp, Culex quinquefasciatus
atgttgtctagattcaaacagctattaagtcaaaagtttccaataattggaatgatccacgtcggtgccttgcctggaactccactgtactccggggacttcgacgaaacagtcaagaaagcggttcgcgaagcggagatctacgctgaaaatggaattgacggtctcatgatcgaaaacatgcacgacgtcccgtacgtccagtcccgccacctgggtccggaaacggtggcctgcatgacacggctggcgaccgccgtgagggaagtcactcggcgtgctgccattccatgcggggttcaaatactggcctgcggaaacccggaagcgctggccgtggcaaaggccgccgggttggactttattcgcgccgagggttacgtgtttggtcacgtcgcagacgaaggctacacggacgcgaacgctgggctggtgctgcgctaccggaaggcgattgacgccgagcgggttctggtgctgaccgatatcaagaagaagcacagctcacacgcgataacggaggacgtttcgctggtggagacggcgaaggctgcggagtttttcatctcggatgggctcattctgacggggagttcaaccggaagtgaaacgagtgtggaggaagttcaaagtttgaggaataagacgcgactgccgctcattatcggttccggtgtgactctcgagaatatcgacagatattggaacgcggcggacgctgccatcgttgggtcacattttaaggacggcggtagttggcaaaacgagctcagtgcgtctcgggtggacgcgttgatgaagaaattggacgaaattcgaaactag

SEQ ID NO: 287 - DNA, 2109 bp, Culex quinquefasciatus
atggagaagccgcagaagatgccgaaggtggcaaaggtcaaaaacaaagccccggcggagatccagattacggccgagcagctgctgcgggaggccaaggagcgcgatttggagattttgccaccgccgcccaaacagaagatctccgatgccgccgagttggccgactaccagcagcgtaagcgcaagacgttcgaggacaacctgcgcaagaaccggatggtcgttagcaactggatcaagtatgcccagtgggaggaatcgcagaaggagatccagcgggcgcggtcgatctgggagcgcgcgatcgacaatgaccaccggaatattacgatatggctgaagtacgcggagatggagatgaagcaccggcaggtgaatcacgcgaggaatctgtgggaccgggcggttacggtgatgccgcgggttaaccagtactggtacaagtacacgtacatggaggagatgctggagaatgtggcgggggcgcggcaggtgtttgagcggtggatggagtggcaaccggaggagcaggcctggcagacttatatcaactttgagctgcggtacaaggagattgaccgggcgaggcagatttacgagcggttcgtgatggtgcatccggaggttaagaactggatcaagtttgcgcggtttgaggagtctcatgggtttataaatgggtcgcggtcggtttatgagagggcgattgagtttttcggggacgacaactcggacgagcggctgtttatcgcgtttgccaagtttgaagagggtcagaaggagcatgatcgcgtgcgggttatctacaagtatgcgttggatcatttgccgaaggatcgaaccggtgagctgtacaaggcttacacgattcacgagaaaaagtatggcgatcggtccgggattgaggacgtgattgtttccaagcggaagttccagtacgagcaggaagtggcggagaatcctacgaattacgatgcctggttcgattacttgcggctggttgaaaacgagtccaatcaggagcttattcgagagacttacgagcgggcgattgcgaatgttccgccggcgaaggacaagaatctctggcggaggtacatttacttgtggatcaactatgctttgtacgaggagctggagacggaagatttggagaggacgagacagatttacaagacctgtttggagttgattccgcacaaagtttttacgtttagcaaaatttggttgctctacgctcagtttgaaattcgttgcaaaaatttgcaggttgctcgcaaagcgcttggaatggccattggtatgtcaccacgagataaactgttccgtggttacatcgacctggagatccagctgcgcgagtttgatcggtgccgcattttgtacgaaaaattcctcgagtttggtccggagaactgcataacttggatgaaatttgccgaactggaaacgctgcttggagacacggatcgtgcccgggcgatctacgaactggccatccagcaacctcggcttgacatgcccgaattgctgtggaaaagctacatcgatttcgaagtccagcagggagaattcgagctggcccgacagttgtacgaaaggctactggaacgaacgacccacgtcaaggtttggatttcctttgctaagtttgagatggccgcggaaaacgaagacagcatgaacaacgcccagctggcacgccgagtctacgaacgagcaaacgactccatgaagaacgcggctgaaaaggaatcgcgagtcctgattttggaatcttggcgcgactttgaaaaggacaacggagacgaggagaacctcaagaaggtgctcgccaagatgccccgcaaggtcaagaagcgccagaagatcatctccgagagtggcgtcgaggagggctgggaagaagtgtttgactttatcttccccgaggacgagatggctcgaccgaacctgaaactgctcgccgccgccaagaactggaagaaaaagatggaaacggttccggcagcgaccgttgcagcgcccgcacaaccggaacctgctgccgctgatactacagaggaggatgaacaggaaacagaaaacgaaccgacggaaagctga

SEQ ID NO: 288 - DNA, 456 bp, Culex quinquefasciatus
gcaagcggcggcgagaagtgtgtgcgtgtttatcaagcgatttttagtgattaaaacagcgatttattagcaaaaatggcaggaggcaaagctggcaaggactccggaaaggcgaaagccaaggccgtatcgcgctcggcccgtgccggacttcagttccccgtcggtcgtatccatcggcacctgaagaaccgcacgaccagccacggacgcgtcggtgccacggccgccgtctactccgctgccatcctcgagtacctgaccgctgaggttctcgagttggccggcaacgcgtccaaggatctgaaggtgaagcgtatcacgccgcgtcacttgcagctcgccatccgcggagacgaggagctggacagtctgatcaaggcgacgatcgccggcggtggtgtcatcccgcatatccacaagtcgctgatcggtaaaaagggcggccccgaataa

SEQ ID NO: 289 - DNA, 1551 bp, Culex quinquefasciatus
atggcacagaaaacggaccagaagtttgccgatctcggcctcaaaccatggataacgaaacagttggagaagctgggtcttcgccgtcccacgcccatccagcaggcctgcatcccgcgcattctggacggccaggactgcatcggagcggccaaaacgggttcgggaaagacgttcgcctttgcgcttcccatcctgcagcggctgagcgaggaaccgacgagcaacttcgcgctcatcctgactccaacgcacgagctggcctaccagatagcggaacagttttcggtggccggtcaaccgatgggggtgaaggtatgcgtggtcaccggcgggacggaccagctgctggaggcgcaacggttgcaggcgcggccgcacattgtggtggcgatgccgggccggttggcggcccatttgactgggtgcaacacgtactcgttccgggcgctgcagtttctggtggtggacgaggcggaccgggtgttgagcgggagtttcgacgaggatttggaggcgattaagcggtttctgccggagaagcgacagaatttgttcttttcggcgactttgaaagagtttatgagggagagtagcgtgtttccgattgcggggggtgcgtttgagtggtcggaggagagtgaggtggccacggtggagacgctggaccagaggtatattttgtgtgcggactacgatcgggacatggtgctgattgagacgctgaggaagtttaaggaggagaaggaggatgcgaatgtgatcatttttacaaattcgaagaaggattgccaggttttgtcgttgacgttgaacaagatcgggtttgataacgtttgcttgcatggctttctgcggcagaaggaacgagtggcggcgttgaatcggttcaaatcgaagcacgtgagaatcttgattgccacggatgtggcaagtcgtggcttggacatcccgaatgttcagctagtgttgaaccaccgattgcccaaggttccaaacgagtacattcaccgggtcggtcgcacggcacgagccggccgcaaaggtcttgcgatttcgatcttccgattcccgcgcgatctagaatttttgggggaaattgaagcgcttatcaacacgaagctaacggaacatccggtggaccagcgcctcgtcgagcgtatctttatgcaggtcagcgtggcacggcgcgaagcggaaatgaacctggacaacaaggactttgacgagcggagacacaactaccggcgcaagaagtggctcgagcagggcctggatccggacgagatggacgccaagtggaaacgcgaacaggagcagcggaaggttgagcggaaggagcgtctgcggagagagaacgagatgcggaaagaacacggtgaaaggctcgggttcgtggtgaaagatgatcggtttaaggatgcggttgagagtaaaaagtttaagaagcgaaagtttgtcgagacggaaaagctggacgagttggtgcagaagaagaaagtggaagggaaggttgttaaaaagggtaaactgaagaaggttaagaaataa

SEQ ID NO: 290 - DNA, 1470 bp, Culex quinquefasciatus
atgaccagtcactacaagttgcacaacaacaaaaaagagacaaattcacacctcctacacgttgccgactcggagttgtccagcaaaaaaacgtcgcgatcacgctgtgggaacagacgcgttcttccggaggtccaaccgggctacctgcgcccgctgattccggcggaggcccccgagaagcccgagagctggcaggacgtgatggccgacatcgagcgcgtcatcatgcccggtgtgacccactggcacagccccaagttccacgcgtacttcccgaccgccaactcgtacccggcgatcgtcgccgacatgctgagcggtgccatcgcgtgcatcggattcacttggattgccagcccggcttgtaccgagttggaggtcgagatgctcaactggctgggaaagatgttgggtctgccggaggaattcctggccagttccggaggtcaggctggtggtgtgattcagggaactgccagcgaggctacgctggtggctctgctcggtgctaaggccaaggccatcaagcgcgctcaggaggagcatccggagtgggacgagaccacgattgtttccaagctggttgggtacacttcaaaccaatcccactcatctgttgagcgagctggtctcctcggaggtgttaagcttcgctcgctgaaggccgactcaaacctgcaactgcgaggtgaaactctagaagccgccatcaagcaggacttggccgacgggctgatcccgttctacgccgtgtgcaccctgggaacgaccaacacgtgtgcgttcgatcgtctcgacgagctcggtccagtcggcaacaagtacaacgtctggatccacgtggacgctgcgtacgccgggtcggccttcgtctgtcccgagtaccgtccgctgatgaagggaatcgaaacggccgattcgttcaacttcaacccccacaagtggatgctggtcaactttgactgcagtgccatgtggctgaaggagccgtactggatcgtcaacgcgttcaacgtcgacccgctctacctgaagcacgacatgcagggatccgctccggactaccgtcactggcaaatcccgttgggtcgtcgtttccgtgccctcaagctgtggttcgtgctccggctgtacggagttgagaacatccaggcccacatccgtcgccactgcgccttcgccaagcagttcgaagccctgtgcgttgcggatgaacgcttcgagatcttcagcactgttcaaatgggactggcttgctttagactgaagggaaccaacgagctgaacgaggcactgctcaagcgcatcaacggacgtggcaagattcatctggtgccatcgaaggtcaacgatacgtacttcctgcgtatggcggtttgttcgcgattcaccgaggccgccgatatcgattactcgtggaaggaggtggccgcctccgccgacgagctgctggccgagaagaagtga

SEQ ID NO: 291 - DNA, 1818 bp, Culex quinquefasciatus
atggtggcccatacggcaaaggcacggttcaatatgctgaaggtcttgggttcgagtctcggtaccgcctcagccggacaggctggccagctgaagacgatcgacccaaaccagcagatctcgctggatcagcttcagctgcaggccaccacgaccgcatccggagcgacggtccttcaccacgcgctcggcgcagttggccaagtaacggctgctggcggaagccagcagcagcaacccaagtttgtgttcaacgtggacgcagcagccccaaacgggaggtccgccgatgttgattccgtacgacaggcgccggcaggtcaacaaagtgcagctgcagcggccgccgttcctggaggataccagtttgaggctattcccgctccggcatccactcaatatccggctggaaacgtcgtccaggagcgtcaaattgacgtggactcggagaccgattccaaccacgataccgcgttgccgcaggcctgtgccggtggtaacgaagaactggtcgagttgcttatcattcgcggacaaaaagggttttacgccgttgatctttgccacaaccacacggttgttgcgttgatcttggccggtcacgagaaggtcgtcgaaacgctgctccgacatgaggcgaaaatggaggcccagtccgaatgcaccaaggacactccactgtcgctggcctgttccggaggacggtatcaagtgggggagttgctgctgaacatgaacgccaaccgtgaaaaccgtaacgtaaccgactacacgccactcagtttggccaccagcggaggttacgtgaaaaacatcaagcttctgctgagtcatggcactgaaatcaactctcaaacgggcagcaagctgggaattttcccctcaagctcgcggccggcggccgaggacaagaacaaaaagggcaaatctccactttggctcgctgccaacggagaccacctggcggtcgtgggggatctgtgcaacgcaggagccgacatcgattcccaggaaaatcgcaaaatgtccagcctaatggcagcgttccgcaaggaccacaccaaggtcgtcaagtggatggtgaaccacgaacggcagaaggcgcataaaggcagaaaagcgcgaacagcagcgcaaactagtcgaaggcgaagccgaaaagagtgcgaaaaaaagtaccgctttcacctgagcaaagtccccgaagaatcggtcgacaaccaaggccctgccaacgaatctccggcctttcggtccgcgtggttcgaggtcgtgttggcgttacttcagcacacgccgtttctggcggccgggcgctcttcaacagcggctcggccgagcgacgcgacgaacccgatgccaactcgcaccccgctgcgaagatcaactccacacgctgatccacaaaatcgtacgtcgatcgcatctccttcacccgtgaccaggcgtacgttcttcatccagcagttccagtgcttcgaactgttccatttcctggccgaaccaggccaacccatcggcgctctgccgcaacatcaacactcgaatcctcgaggaaaccgtcatgccgagcctgtctggcgtttcgttaatccggatagctgtccgtggcgacacttcccaacaccttcgtgccaatccgccttacttgctgtagcgcagttcttccgaccgatggaggtcgatctggtactggtcgaccaagcggaaactcggatggaaaccgccggtcgactgttccgtcaggaaaattttgatgcactggaatcgaacggccgaaggtcacaaggcagcagcgttttttcccgactctgctaa

SEQ ID NO: 292 - DNA, 1119 bp, Culex quinquefasciatus
atggccaacagttttcagaacccggtcacgagtctgtccggcgtcacggtgtccacctcgaacagcccctacgactaccgtctcgggatgagcgctgcggcggcgtccggcgtcgtgtcgaggcccggcgatccgccaaccatggccagcacagccccaacgacccagtggtggtaccccggtggacagaacgccatcgacaacagtctgcaacagcagcagcagcaacaacagcaacagcagcaacaacaacatcaggtacaacaacaacaacaaagccaacagcaacagagccaacatcaccaacaagctcataaccaacagacccaatcggcgcaaaacaatgcgatccagagcaaaataggcggcggcggagggggcggaggcggcggcaaccggcccgtcaaggacaataagccaagggggcgcatgacagcgtatgcctttttcgtacaaacctgccgcgaggagcacaagaagaagcacccggaggagcaagtcatattcgccgagttctcgcggaagtgcgccgagcggtggaagacgatgctggacaaggaaaagcagcgcttccacgagatggccgagaaggacaaggcgcggtacgagctggagatgcagagttacgttccaccgaagggcaccgtcgtcggcaagggcaagaagcggaaagcgttcaaggacccgaacgcgcccaagcggtcactctctgcgttcttctggttctgccacgaggagcgaaacaaggttaaggcactgaaccccgagtacggcgtcggcgacatcgcgaaggagctcggccggaagtggtccgacatggacgccgaggtcaagtcccggtacgagcagatggcggagaaggacaaggcgcggtacgaggcggaaatgaccgagtacaagctaaagtgcaaaaatgagcagggcggccaggtgcaaggccaggcgctcaacctcggcggtctccagaacctgcacgtgcagcaggcggcagcggcccagctgcaggcccaggtccagcagcagctggcggcccaggcagcggcagcggctgcggcggcggcggcccatcacgctgacgacgatgacgatgacgagggggacgaggatgataacgagtaa

SEQ ID NO: 293 - DNA, 228 bp, Culex quinquefasciatus
atgagtgtaaaggacatttattattcggataaatatttcgacgacgagtacgagtacagacacgtcgtcctgccaaaggatatcgcaaaactagtgccaaagacccacctaatgacggaaacggaatggcgatcgatcggagtgcagcagtcccgaggttggatccactacatgatccaccagcccgaacctcacatcctgctgttccgacgacccatcacgaaatag

SEQ ID NO: 294 - DNA, 659 bp, Culex quinquefasciatus
gctgtcagcaagaaccggccggctggtttgcgaacccgcgtgaatgtccgcagtgccgccgccaacgttggccataatttgcatcgtgaccatactatcagcagtgctcgttgccgttcttatcaagaatcgctccagcgacgtcgccatcgtcattgacgaaaggagttccgttccggtgaccctgcaacagaacgaggtaacagccagtatgtccacgacgtctgccgatcaagccgaggtcggcccgtacgagcccggccagcactcgatcgcgtacgtaacgacaccggacgaaaactcggccaaggcactcgcccggaagctggtggagcgcaagttggcggcctgcgtgaacatcatccccggactgacctcggtgtacgagtgggagggcaagctgaacgaggaccacgaaacgctgctgatgatcaagacgcggacgagccgcgtagacgagctggccaagtttgtgcgggagaaccacccgtacagtgtggccgaggtcatctcggtgccgatcgaaaacggcaatccaccctatctggagtggctgagccggagtgtgccggaggggaagaagacttgaggggcgcagtgagtttgggctttgatacgattgttttggtttattaaaaggttttataaataaacgtgtt

SEQ ID NO: 295 - DNA, 225 bp, Culex quinquefasciatus
atgcgtaaccggaaaagaaggtgtgcatgcctggcacgaacactcaaagcgtgttctagcgtgctgctcgtactgactcagagcaaggctctttttgccgtaccgaaaaactacaagctagtggccgccccgctgtttgagctgtacgacaattcgcaagggtacggacccatcatttcgtcgctgccgcaggccctgtgccgattcaacttcatctacatgtaa

SEQ ID NO: 296 - DNA, 1308 bp, Culex quinquefasciatus
atgttttgtttggccggcaaccagaaccagcaggtggcatccgggacgttgtcgccgatcgaggacgacgcggttggcaacttgaacctggtggacgccgtgcagtgtggcgttcgacctaaaccagaagatctcgctggatcagcctcagctgcagcgacgctccttcaccacgcgcccggcgcaactggccaagtaacggctgcggacggaagccagcagcagcaacccaagtttgtgttcaacgtggacgcagcagctccaaacgggaggtccgccggcgttgattccggtgaacgcgtccggaatgcccacgaagatagccaaaaagaccaggagcgccaaattaacgtggactcggtgaccgattccaaccacgataccgcgttgccgctggcctgtgccggtggtcacgaagaactggtcgagttgctcatcagtcgcgataccaacatcaaacacaatgacaagaagggctctataccgttgatcttggccgcaaccgcaggtcacgagaaggtcgtcgaaacgctgctccgacatggggcgaaaatggaggcccagtacgaacgcaccaaggacactccactgtcgctggtctgttccggaggacggtatgaagtggtggagttgctgctggacatgaacgccaaccgtgaaaaccgtaacgtgcccgactacacgcttctcagtttggccgccagcggaggttacgtgaaaatcatcacgcttctgctgagtcatggcgttgaaatcaactctcaaatgggcagcaatgggtcgcgtcctgttggacaaggagctgacgtgaatgtggcaccggttcactccttacgagacacagtcctcacgatagccgctgacaagggtcaactgaactttgtcgagttgcttctgtcctgcggtgcggccgttgaggtcaagaacaaaaagggaaattctccactgtggatcgctgccaacggaggccacctgacatcgattcccaggacaactcaaccacccccgcaacaaacaatcgcattcatccgagagaacctccaccagcttcaatcgtcgtctagcagcatcaacaacagcatcagcaggacaaagaggaaggtggagactccagcatcgacgccaacagccaaggctcgtgctcgagctcggaccagcctgatcgagcaaaagcgaagccatggcacgaaaattgccaaagaacttaagcaagtcacttcgaacatgcagacccacaagaacctgactgcgctccggaccggccccggacaattcgaatcggtgtcagaatcggtgttgaaattctaa

SEQ ID NO: 297 - DNA, 765 bp, Culex quinquefasciatus
catccatggcgtagcattttgttttgaatctccgaccaagaatttcattttccttcatttgacctgctttcaaatcacaattcggtagcagaaatgaatcctacggtgtcccttgtcatcctgtcggccctgttcagctcagcgttggcggtccgctgttaccagtgttcctcgcagactgaccccaagggggtggacaactgtggggcgtacaagccgttcaacgtatcgcagaacatcgccatcgactgcaacagtgacgagtcgcatatgcccggaacgttctgcgtcaagatcgtccagcaaagtccgcggggattcatttgggacggccggtggcgccaggtgatccggaagtgcggctcggtggccaagacggccgtcacgggtgtgtgcagctggggtgtgtacgagaacggtgtctactgggaggagtgctactgcggcgagaacgggtgcaattccgctccccgatcggtatcgattgcgaccagcagtctgctgtgcctgctgggggccagcttcctagcgatgaaacgatacctcgtgtgaagatgaggttgagcttttttaacatttcatctcgaaacattccattatttttttagccgtaagacgatgaactctatttttaacactgtaacgaaacattgcaccaaattgagtgcacaattttgatgtagaatcgaatccgtccagagccatgaagtgcctaaaatacatgtactaaatagttccgaataaagaatctctttacacagttta

SEQ ID NO: 298 - DNA, 858 bp, Culex quinquefasciatus
tcgacacacagtgtgagatttggtgaccatcgtgattgcagctttatttcgacaaaatgttccaccaacgagtcccaacgcccaccgtgaccaccgtcatggtgtcgcccaagatcttcaagttctcgccggaatcgctggccgccgtggacgtgtcgttcgagtcgtacaagcagcagtcgaaaccgcgaaagcgcagcttctcgccgatcgtccacgagcagaaaatgcgatcgcccaacatctccccaatcgaaatcagcagcaagaccaagacgacgacgacgacgtcgatccggatgacgccccggcatgtcaacacgccacggccaaaggactttaagcggcccatcgtgccgaaggtgctgatcgacaccagtaagctatcaaccggcatgatgacggccaaggagcagcggaaccgcagcatcatcctgggtacgcccctggccaagcggcagctcgagcatcgcatcacggtggccaacatcttgcgcgatctggacctggcccggtacatcgacgtgatggtgcgcgaggagatcgacctggtggtgttcctgacgctgtccgaggacgacctgcacacgatcggaatcgactgccagcgggacattgagctgattctgggcaaggtggccgagctgaacagctgtctgtgaaggcggtttttactttttttgaaaattagtgttaaatgttttcatttttttatacttacgtacgaagattgtgatgcttgaacttcttatttgatgtgttgtgttgtaattaggtattagatttatgaaaatcattcaatgttttccgtcttagtagtgctaaataatttaacaaatataatatgattcgactgat

SEQ ID NO: 299 - DNA, 969 bp, Culex quinquefasciatus
atggaccagctggcaatgagtccgggcttttcgatcccctcgatcggaacgccgctgcaccagcccgaagaggaccagcagattatgccgcacgcgtacaaccagcaaacccccagtggcatgaccccgatgggcggcggccttagcgcgtacggaatgccctcgatcggcatgggaacaccgaacaagcacacgtacgcgcccagctttgccgcgccgcagagcttgatccagccgcagaccccgcaaagcctcatgtcaccgatggtgccgatgcaggagacgaaggcttcggccacgccgagctaccagcagcagaacagtacgggtggggggagtgtgcgcgatccggacaacatcggcagcgtcaacatccactcgacgatgggcccggccacgccgatgactccgatgaccccgagcgaaccggccatcctgccccagctgcagaacatcgtgtcgacggtgaacctgagctgtcggttggacctgaagaagatcgccctgcacgcccgtaacgccgagtacaacccgaaacggttcgccgcggtcatcatgcgcatccgagaaccgcggacaacggcgttgatcttctcgtcggggaagatggtgtgcacgggagcgaaaagcgaggaagattcgcgactagcggcgcgaaagtacgcccggatcattcagaagcttgggtttacggcgaagtttcttgattttaaggtgcaaaacatggtggggagctgcgacgtgcggttcccgattcggttggaggggttggtgctgacgcacggcaagttcagctcgtacgagccggaactgttcccggggctgatctaccgtatggtgaagccacgcatcgtgctgctgatcttcgtgtccggcaaggtggtgctgacgggggccaaggtgcggcaggagatttacgacgcgttcgataacatttacccgattcttaaaagtttcaaaaagcagtag

SEQ ID NO: 300 - DNA, 1101 bp, Culex quinquefasciatus
atgtttgccgtgaatctgttccggacgctgccaccgtcgtccaacccgaacggggccgagttcgatccggaggaggacgaaccgacgctggaggctagctggccacatttgcagttcgtgtacgagctgtttttaaggtttcttgaatcgcccgacttccagccgagtgtggccaagcggtacatcgaccagggcttcatcctgaacctgctggagctgttcgactcggaggacccacgcgagcgggactttttgaagacggtgctgcaccgggtgtacggtaagttcctcgggctgcgtgccttcatccggaagcagatcaacaacattttctacaagtttatctacgagacggagcaccacaacggaattgccgagcttctggagattctgggcagtattatcaacggtttcgctctccctttgaaggaggagcacaagcagtttttgctgaaggtgctgctgccgctgcacaaggtcaagagtctgtccgtgtaccatccgcagctggcgtactgcgtggtgcagttcctcgagaaggacccggcgttgacgcaaccggtcatcaagtgtctgctcaagttctggcccaaaacgcacagccccaaggaggtgatgttcctgaacgaactcgaggagatcctggacgtgatcgagccggccgaattccagaaggtgatggaaccgctgttccgacagattgccaagtgcgtctcgagtccgcacttccaggtggccgagcgggcgctgtactactggaacaacgagtacatcatgtcgttgatatcggaaaactccaaggtcattctgccgatcatgttcccggcgctcaacaccaactccaaacagcactggaacaaaacgatccacgggctgatctacaacgcgatcaagctgttcatggagatgaaccagaagctgtttgacgagtgtcacaaaaagtacaaggccgagcagcagaacgagcgggaaaagctgaaccgacgggaggaactgtggcagcaggtcgagagcctggcccggcaacatccgacctacgagaagctcgttgacggaacgaccggtgagctggttctcgccggaaccggacggaagacataa

SEQ ID NO: 301 - DNA, 573 bp, Culex quinquefasciatus
atggcctctcgaccgatttcgttcgttaccggcaatgccaagaagctagaggaggtccgtgccatcctgggagcggccttcccgcgggagattgtggcggtgaagttggatctgcccgagctgcagggtgaggtggacgatatctgtcggaagaagtgtctcgaggcggctcgcaacgtgaagggaccggtgctggtggaggacacgtgtctttgctttaacgcgctgaagggattgccgggcccctacatcaagtggttcctggaaaagctgggcccggagggtctgcacaagctgctcgacggctgggaggacaaatcggcgcaagccgtgtgcacgtttgcgtacgcgccggacgaacagggcgaggtgctgctgtttcagggccgtaccgagggcgacatcgtgtttccgcggggaagtcgcgactttggctgggatcccatcttccagcccaaggggtacgacaaaacgtacgccgagctgccgaaggagcgcaagaatgaaatctcgcatcgcttccgggcgctggacaagctgcgggagtactttggcggtgaggggggaaagtga

SEQ ID NO: 302 - DNA, 4224 bp, Aedes aegypti
acggtatatgtatgttatattgaggaatttcaatcggtacgaaaatgctatacaccagcaaagcataaaaatcaacacgtggtcgcggcgttcgcctgcgcgcgtctgtcggcacgtgtacatatgcagcaacacgtcttagcaaccgtcacccaggcttcttgtaagttgcttttgaatttgtttgtaaatcgattttcgatattgttccgctcgtaaaaattgcaacttcaattttctgccggtctcaatcaagtgcccaaaaatgtcccaaccgtacgtgatccgtgtgatggaggagatgggttggggctcggacggtggcttcatcccgatcgccaacgaagagaacaaaaagctgctggactacgtcaaccggttgggtgatcggaaaacggaaggatcgtccaaggtgcaggtcagcgatcagcgcttgaacaatctgcaggcccatctgaagaacgcacaggtggagttcgatcaaaatcttaaactgttggcggaggacaagggccagatcgatacggagcacgggctgctgaagctgtcggagaacgatggcggcaagatgcggaagatggcgaaggaggtgcagtacgtgagggaagaactggagcggcacgatcagcggtcgcaaaaggaaatgaaaaagctgaccgccaacatggaacggttcaccgagcggatcaagtgggctaaagcggccctaaccgagtggaaacaggtcatggacaatggcgaagaaacgaacaagcttatcgaaaaatactgcaagctggataagggtcgagcggaagctttagaagccaaacgaaagatcctcgaagacaaggtttcaaagcggaggacaacactggttgcactggccgaagagtaccgctccttggaacaggtactggaaaggacttcacagttgtaccgccaggcgcattctgagcgccgccagttggtgttgaagtggaaggaggcagtgaagcacatgaaccaacgcgaggaagacatcaaagaggttgaagcggaaatcgagaaggcacgggagataagcgccatgctgaatgatgatctgcaggctcaggtggaattcctagaggaacaggaacgcaacaacaaggagattgaactagggattgcagagttaaacgtggaggtttcaaagctccggaatcgtctgaacgcactaaccgatagcgtgcagttgaaaacaaacgagtaccagataacgcgcaaagcggtacaaaacgtgtcaaacaagctgaccggcatgcgcaacaaaaaccggcaggcgttgatggaggaagcggagaaggaaaggcaaatcaatacaaatttaagccagttggaagaattgagggaaaaatatgaaaacttcaggagtaaaactttgtgtgctcaggagagattgaggcaattgaatgagatcgtcgagcaggaggagaagcagatcaaagtgctcagcgacgaaacggcacgtctatcaaccgcactgtaccgtgcgcaaacgcaactggtttcgatgagggatgaggacaagcttttgaaaatagagattcactcaatggaatctggcattggaaaaattaaggcagcgatgaaggtacaagagaaggaaattattcgccagacagagatatcgtacagcgtggactacaatatggagaagatcgagaagagaatagcaaatatgaaaggagaaaataagcaggagggagcaagcagagcgcacgcaaaactagttcaagccgaggcgatttactatgcccggatgcagaaccactcgttgctgcaggcgcaaattgcgaagattcaaattgatttccggaatttgaatgcgatctatcaacaggattgcatcgagattgacagaatgatcgggaaactgaaggaaaagtctttgatggtggagggtggtgagaagaagttgaggcagtgtacgacggaaaatcaggaaagactggtggaaaagagtttgctgaagatgcgaattaaccagatggagatgctggtggataaacagaatgataagatgtatacgctggagcgccatcgaatggaactggaaacggccatcaatgagaggttgatcgacataaagtcccaaaaggatatgctgatgctgaagaagaagtatttacatgacgagcgggcacagctgaaggcggatatcagcgaaaggacgttgaaaatcgaccagttgaaaaatcggtatgaattgtcgttggatttgctgggtaagaacgatgatggaactatcgttactgcaacgcaaatcaaaattcagaacgcacaggaaaagtacatgttgctgcgagaaggcagtgaattgaatgtgaaaatcttgaaggcggaggaagatttgaaagccttggagaatacattgaaactgatgaatttttcgaatgagacctacaagcgtggatttcaaaaagtggatgatgataatccagatattcagcagatgaacaacattcagaatgactactgtaaggcactgtcggcgttgaagaacgtgagaactgacttggcgttcaatacggagaatttgcacaacttgaacgaagagagggaagaaagtgataaggcgttggaggtaactaccaaggttcggctcgataacaatgatatactgctgaagattcaaaaggaactgcttgatcagaagacaaaaatccaacgcgctgaacgagagctgcgactagctatcaaggctgcccgtgcgaagaccaacgacgaagatctgttacacacgttccagaaggatttgaatcttaaggagctcgaagaacgcaacaacatggcactgcatcagatggccgatttgattgagatcttccaggagatgaacccaacggtgaacaaatatttttacgacaagggattgcgtttgccggtagttcgtcgcgccaagagtcagatatcgtggcgtagcgagaattctcctgggtcggattacagcggacgtgacgatacaggatcgtcgaaaccagcatctaaaatgtccatgtgctcggcatcgacgcgttcatcggactcatcagagaacattgccaagtcgtttgacaatcgaatgagtgccgggctttcggtgatcctgatagactttcccggagcaagtggcagcaagaaatccggccttggtggattactaccgaagaaataatcttggaacgacggcgccaacgacgttctttcatttctactcggaacggaaactctatattgtcgtacatttcagttgaccatcattgtcgtcaaatttattttaattggcatttatatcatatgtatgatttgtgtgtgactttcatgcaatgtcggtaattcgataaaaactactacaaatacttattccgttatcaatcaatagttcgttcgatataagtcttgtcagcgtaaatttcgaaccaaagcctaaaacgtgaatagttttgcctttgctagtttgagtgttcttttgtgtggatttgaatgattttttatgcccaataaatacgaattgttgtatgccgaacgtcatccggcgacgacggtttaatatcttgcaaaggcttacccctagtagtagtaacacgagtacggtgtttagggcacataatgagccccttggttttatgtttcattaatttcatacgaatcctagaagtgataaccaaaattcgtaatacatctagcctcgattgctagaacttttaccttctaatattatcactaactttgtttgcattgaatctgtctccgtcgcttcacttcctctcggtctgattcgatgccacgttctggcttacaaccctaggtttatttatatacaattacggttttgtctgtctatacaccatttgtaatgatatcctattaaatgcaacatgcgcagaaacagtagtttgtttgattggatccgaaaaaagcatctacttttacatatataggtacaaagttttaaatttttttttgttttgaaatacacggttaacgatacactgaaatgagctcaacttgataatgggtgcatgtttgtatgctgctgttccaacaccaaaacagctgtttgtatcgttatcattttttttttattaattgtatgccgaaaagtttggaaaaggttgattcttttttatttacaatttcaagctcacaattgaccgttgaggttatgttcctgatatttgtgattcagctctgtaatggttttgatgactcttgagatccacaaacgaacggaaggtggaa

SEQ ID NO: 303 - DNA, 723 bp, Aedes aegypti
attgcagggaacctcctcacaatcacagcacttctcaaatatcacaaactacggaagcatccaacgacagcgttcgtgctttctcttagcatatcagatctctttttctgtgcagttaatatgcccttaacggcaataaggttccttaatcagcaatggacactgggtgaggatttgtgtaaagtgtttccagtattcttctacggtaacgtggctgtgtccgtgctcagcatggtaggcctcaccatcaatcggtatacgctgattttacatcctagtcgatattctaagatctacactccacttagtttatgtttccaactgttcgccatatgggcgttttctttcggcataatgctacttccactattcgaaatctggggcacgttgggtctggacgaagaaacgttctcctgtacgatcctgaagaaaaatgacacatcaccaaagaaattcatcttcctgtttggggttctggtcccatgtataataatatcgatatcctattcgtgcatattctacacagaagactgtcggctaacgctgacgctgctgaccatctacgtatgcttcttggtttgcttcctgccgctgatgcttgccaacgtgatcgacgacgacggatcgtatgctaacctgcacgtgttcgcctccgtgctggcgtggatgtcggccgtcatcaatccattcatttacgccatcggaagccagaactacaggtaa

SEQ ID NO: 304 - DNA, 552 bp, Aedes aegypti
atgtcgtacttatgcttaggccctataagtgcgggaaaaaccctgttgttgacgtgtttgcagaatcctgaatcggtcaactttacgtcccattcagtgcccagtgtgggtaccaatttgttcactattaaaattcctcctgtggttatcgatgagaaggaaatcaacgtaaaaccaccaccgccacctcgcaaacgcgatcttgtgcaggttcgagaagttggcggatgtttggcgccaatttggcgagactacttgaatagacctgtggataaaataatctacgttgtggacacatctaatctttgccaaatctccgctgctggtgttttactgtattccatgcttgccgagccaaggttacagaaggcgaaatttctattggttctctcgaagatggatctcgcgtatcgtcaaatgagaaacgaagctcttctaatgttgcaaatggaaaagttccgaaaacagattgctcaagagatcaccatcgtgcagttcagtgccattaataaggaaggaatagatgaaatctatgaatggttagccacctag

SEQ ID NO: 305 - DNA, 1283 bp, Aedes aegypti
caattacgaattagctgatcaagatcgaatcctttgctttgtcacaccggttaatgaaaaagaagattaaatatgatttcgaaaacacctgttgattataacagccgtttccatatcatatccacgtgcaaccgtgcgttctgagcatgtcccttttgaaacaaggacggttaccacagacaaccaataggttatttatcttttatcgatgttaaattctagtctgttgtaagattaattgaaccttttgcaaaaatgacggccaaagctactacgataaaagaggcccttaaacggctcgaagaccgaacgaagaccaactcctgcgacgacaaagaaatcgatctgtgcttccagtggccaccgatagagaagatggacacaactttgtccaccctggtcgcttgcgagaaactttcgctgtcgaccaacatgatagacaaaatcttcggcctgagcggaatgaagaacctgcgggtgctgtcgctgggccggaactacatcaaggccatttccggcctggagggcgtcagcgataccctcgaggagctctggctcagctacaacctggtggagaagctgaagggcatcaacgtgctgaagaagctcaaggtgctgtacatgagcaacaacctggtgaaggattgggtcgagttcaaccggttggccgatttgcccgtgctggaagatttgctgtttgccggaaatcccctggtcgagtccatggaggagagcgtttggcgtgcggaggccagcaagcggttgctgtcgctgaggaagttggatggggagacggtcattcgggaggaaagcgacgcacagcagacgccacaaccggccggtcaaccggagaaggcttgagcaggaagttggattacaatggaagaggaacttttcgttggaaccaccttcgattgaagttatggccagctaggtttgattgaatagttcattttacgacaagtagcaactagtttttactatacttatcctactttatcgactttatcttatttgtatctgatccgacattgcctctattgcatttcactttcgccagtagatcaaaaagtacgtgattttgcttttcagtccagagagagaggttaattattccttgctgttggtcgattgtcgtgttaaccgagtttgtcagaacatgtttgctcagggtcggttgtcagttcgttttagtaggccgtggtgttgaacgggcggactcgagacatttttcctgtgagaaaaacagcggaaccgaacaaaatcaggtggaatttcgctac

SEQ ID NO: 306 - DNA, 2392 bp, Aedes aegypti
ggcttcgattcatcttcacattaagagaaaataaccgtcatcgttttaccaattttcgaatcaaatttttcgctcaaaatcgaaacaatattcataaacatctaactaaactaatctttaccacgagtagtgagttaattaatttaacttgaagcggagcttatgaatacaactagcataagccttttaaaaaactagtcaatgtcaaatgacattttaagaacttctgatccatctgtttcttcgtataagttgcactaacactaaagtatcagagttaacgttgagcgcataaacatttaaatttgtttactttttatttcagtaatgtaaaactctgtttaaaaactgttttatcataacataatggatacgacactggacaaaaagctgctcggcttcaggcaaattgcccaagaaaagcttcaaaatattctttgttcaatcccactggataaggatctcataattgaaccggctctgataaagcctctagaaaacattgtaggagcatcctggttgagaaagaacggcatcgataaaatctacaaattcgacccgaaaaatgccccacccaagcggaagcagtttctgtattttctcaccagcaacctgttgacgttcaaaagtgcactggatcaaatcagcagctaccagagtcagacctccaatagcattctggcggcggaatcggaacgaaatagccgccagtatcatgtgatggtgtttccgcaagtgctggctagttttgaacacctgctagaggaggaaggtctttatggatacgtagatttgtacagtttccagtgggatttcatagcactcgatcagggactgttaagcctagagataccaaacttgtttgccgatgtgtttgtcagacgagatggttcattgctgggatctgttgctcaaagcttgagaatattcaacatggtgatgggaaggccaaacttgttgttcagttttggggaaaatgcggagaaggttttgcaaatgatacaacaaattgatgcagaacgaaaggtgaaaagtggcgaggcgaaagatatttcagacttcagtgccatgttgatcgtagatcgagataaagactatccgtcctgtctactgactccagtcatttattcaggcctattgttagaaatccacaaacacaactcgggttcactgacaatagaatctacgggtaacaagatacagaatggaaagctggcaattcttcaaaacgagaataacagtaaaccaaaaaataaggagacaacaaatctccgaatgaatggagcacaagacctcatctatcaggagaaccggtaccgccacttttcggaagtgataggccttctaagttcacaagcaaaagctctcggactggaaggaaagatgtactcgaaggatatgaaactatccgaaatgaaagattacgtcaccaacaaattgcccaaggtagctgctcagaaaaaggaactttttaagcacttgctactatgcgaaacaatcatggaggaaatcggcgcaaattttgaaaaacatcaacttattgaggaaagcatcctaaccaacaccaaccgcaaacaaattatgtcttacattgatgaattacttgcggcggatgcccacaagttcaacacgctccgtctgatttgcctgtatcatgtgaccataggccttactagcgaggacatgaccaaacttatgaccgcctatttgaatgcctttgggtatcaacatctgaccgtattcaataaccttttccaggcaaaactgttcccagatacaaccaatctaacgaaagctaagatcttgtcgcaaatctcaattcccattctcaaaacaccattccaaatagaagcgaacaaactcaagctactaccaacagatgcgaacgagaccgcccagtcaccggtatcaccgagcagcccgacgacgcccaccggaagcggcaagaagcaatgtcccagttacgtcttcaacggaaactacattccactgatcgctcagctcagcagcatgatattgaacgcggtcagcttcgaggatttgaacaatcgtttcggccatttggaacggttgaagctatccggtaaaaactttggacccaaaacgttgcgggagctctctatcaccagtgcaaaggcggacgtcaaccagttgttgccactgaaggttaagacgatagtggtttttgtgattggtggaatcacgtacgccgaggttgccgcctgtcagttggtcgaaaaactaaccggtggcaaagtggtgctcgcttcggacactgtgctctccgggtgtgatttgttggaaagcgttgtgggatgttgaaatgcaattaggtatgtgtattgaaatgggtttggattaataaagacatgttacaaatggttcgttacat

SEQ ID NO: 307 - DNA, 918 bp, Aedes aegypti
atgttatccgttagcaatctactcaagtgtgacgacggcaatggcagaaaacgaactaacagtggtggagaggtcgtagaaagaagtgtcggtgcaattgccaaatccggtgtcgttagttccagttccgtggcgaaagcgagttctttttgcaacagtgttcaaacgtcaaggataccgaaatgtgcacgctgtcgaaatcacggagtgatatcaggattacgtggtcacaagaaaaattgcacctaccgaaattgtaggtgtccgaaatgtgagctgattctgtcccgacagaaaatcatggcagcacaggttgcattgaagaggcagcaagccgttgaagacgctatagcactgcgactggcgtcaacggaaatgggaacccagctggaaacacttcctccggggaagatctacggtatgaccgtaaccgaaccctgcgcatcgccagggattggatccccctcatcgatggacatttcatcatctacctctcccgcttgcagtgacaaagaaccggatccagtgggaaccagcaaaccaaataattccaacacaaatgtaccagtgtcgcaaaatgcactggacatgttgtcgcagctatttccacaccggaagcgatccgtgcttgagttgatactgaagcgttgcgattcggacctcctgaaagccatcgagcagtgcagtaagactccgccaaccagtgcgttcaagcctccggtttcctcggcatcagtcctcgctcaccatcagattccaatggcgccacccagtccaccgagttatgcatcgttgatcgcctacccaaaatggttgcttccgatgtcgattcctgttccgatgggccacattgctcccaatttggcgccaagatgcacacttcccaactgcgtaatgtgtgtacatcatccggtgtaa

SEQ ID NO: 308 - DNA, 1547 bp, Aedes aegypti
aatttcctcaaatctacagtgaagttcgactgggcgctcctccgaaaggaatgctcgtgaggatggtgtacaattccgtccgaaacatgacaaaggcgagaaattttgcgttcctaatcgtggtcgcacttttggtgtttgccatactttcactgctgagcaatacctcgtctgctgcctcagatgacgtcaacaaagaatactcaatcgtgcccgaaaatgacactatggcgctgtgcttcgaaagcttgcaagacacccgcaaactattgtacagctccacagacaacgataacgacattgaaccagagccgatcatctactttgtaacgccaacctatccccggagggaacaggttgcggaaatcacccgtctcggccagacactgatgcacattccctatcttcactggatagtggcagacgatacgtccgtgtgcaacaacttcctcaacaatttgcttaaaaaatttggcattccctatacacacattgccagcccgatgcccgagttttatcgcaccaagaagcttgttcctcgtggtgtagccaaccggcgagcagcactagcatggatacgtaacaacaacaagaagaccggtgtgctgtactttggcgacgatgataacaccttcgacttgaagttgttcagtgaaattcgcagcacgaaaaaagtatccatgtttccggtagggctcatcggtgattatgccatcagcaccccggtggtgaagcatggaaaagtcgatggtttcttcgactcgtggcctgcgaagcggaagtggcccgtggatatggcagggtttgcagtgaacctggaatacatgggtctcagtcctaacgtgaccatgccgtacaaggcaggctacgaagaggacgaattcctgaagagcattggactgaagatgcaagatatcgaacccaaagcgaacaactgtaccgagatattggtgtggcacacgcaaactaaaaacaacaaaccaccaaagatacggattagtaacggcatactgcggaacaatcaattcaacctgggggttctcctcaagaagctcgaaacgatgggcgtgagtcatatcagtcagtcagaaggggaaacacaccgccaaagacagtaatctcgacatgagaatgttcgaagcattctcaatcggaaacgctcattggcaaacggaaatgcgtatcgtcgatggaaataataagacagaggtttgcacccggacggatgtgaccataaccgaaaaggatatgtaatgttggaggaactaaaaggcgaacactcaccttgtacaatcagtgctccgagcgcagcagcttccccaatcgaacagtacaatcggccatgtcgcagatctcgcttcagctgctggaacagcatcaccttcccgtatcctgtcagtcgacagggatcagctgggtagaatttaacacgaaaggatagcaccaagggatcgacatctgcgaaatattcgatttattactgttataaaatgtaactcttataaaatttgatgataactgaaaatgaatcgctgtttggatgcttg

SEQ ID NO: 309 - DNA, 2100 bp, Aedes aegypti
atggctctgccggagattccttcccatttcccggtggacaccaaggtgctacccccactgtacattatcacaccgacatatcgccgtccggagcagctggcggaaatcacccggctcggttacaccctcaagcacgtgccgaacctgttctggttgatcgtcgaggacgcggacaatcggaccgaaaccgtaacgagactgctgaagcaaatcaatgtgccatttatccatttaacagctcccatgccggccaaatatcgcaaactgaaagttaagccccgtggcgtgtccaaccgaaatcgtggcctccagtggatccgtgccaacgcgactgaaggcgtactctatttcgccgacgatgacaacacttacaatttacaaatctttgaacagattcgttacattcgtaaggtgggaatgtggccggtgggtctcatatccaaatatggcgtaagcagtccgattgtggtcaatggatcgatcaccggcttctacgacggatggattggaggacgcaagtatccgatcgatatggccggatttgccgtgagcgtaaaattcttgttgtctcgacctaaggcagaaatgcctttcaaggcaggatacgaagaggatggcttcttgcgaagtttggatcccctggacttgaaggatattgacctgttggcatctaattgcactgagattttgacatggcacacgcagtccaaaaagaacccagcagcacttccgttgaacctgacaaaatacggatcaaccaatctggtgaagctaacgcgaacactagtttaggatttgacgtaaaaatcacgaataaaagacaactctaagtttccgaaccgaagtacagaaggaattgcaataaattgttttggatgaaaaggattgaatgaatgaaaaaagagataaatacataattctgggtgctattttaaattttaaacaaagattcacgaactaaatcacaataattttcaaagcaagaagaacatgcatcaaagcgttgagtgcaactgcataggttgacaaaacagggggtacttaaagattgatgatagattaaaacggcaaatgccaaattggttgagattggtttcccctacgaactacggagtgaaatgaaccagttatgcatcgtaatgtaaaataaagttagataggatatgataacaattaggtactgtaaggatatttttcttatcccaattttcttccaacagcaaatgattgtgcgtgaaactgaattaataaaaaatatctatatcgcctgcgcgagttccacactaagctgtaaatactctttatgttccttaactcgtgaaatgatatttttattgaccgttctgtaagcaacattgtttgatatattttccaaacctcaactagatattcttagatagttttagctacataaatttactagttaaaatcatgtaaatacattcaaatccagaagatctgaaattctcccatatcttagaattttttcctatattttaatgtagtttagctattccaaaaaaagttactaaaaagaatagtaacgattatgaggtatcattgatcgcacttggtgcggcgcaaaagtaatccacaggaagacgataaagtgtgcaatcccttccacgtgtgctcacatttcttttaaaagaaaaaaaaaactagtatccaaagacgaatcgaatacgatgagtgaacatcgagctttcctctcaaattggtatcatgattaagtgaaacaaaatctaccagttgttctttccaaaaaaaaaacaaacgtgaactaaaaaatctattgccttcaattttttgatgttttgccaactggttcgattggtttgaaataacgcttgctcttatgttttgaccagcgtttcaattacaaattagctttggtcccatatgaaatctagaagttgaagttgttcagttctttgtttgtcagaaatctagcaaataatggaaaaaagtgaacgagttttccttgttcgatgctaattaatagtaattcactaataatgattctacttttattgtgatcaaatctgaaaatcatcaataaatcgtaagctataccaataaaatgatattgaaaaccag

SEQ ID NO: 310 - DNA, 2342 bp, Aedes aegypti
acgctaattccttcggcaccgcaaaactttaccgtggagaagattttgccatcgacggaaggcacctttctggcactgagcggccctcgaggactttcgatcctggaactgccccgccgctggggacccaatggacagtaccagaacgggaaggagtgcatcatttgtcgtcatacaacctggacgaacatctattcaccgagaatcctaatctggaggtcctacaaatccgctggcatccagcatcacccactgattcccacattttggctctcctgtcggacaactcgattcgcgtctacgatgtggactcgctgcggcatgtgtggcgtgtgggtccttcgccaggacttctggcctatctgagcagcctcggcgacacggccgttgattttgacattgcaccgccacgtgtggtttcggcgacggtcaacggcagcgacgatacgacggcactctccagcagcaggaccaccatggtcaacatgatgcgggacaatctgagcatttcttctccagtgactacggattcgtttgtaaaagcacaaaaaccagacaacggcaaagtcgagtggcctatcgtgatccttcgcggtgacggaaatgtctacatcctctgtgctggtatcgataccgatcgcccgaagttgcagggacccatttcgatactgccccaagtggaggacaactatggtttggactcttgctccctggtggttattccatcactgccacccaccataatcattgccgaaagcagcggcaaaacccatcatgctctacttctggaagaagaatttccgttccacagatcgttcagtgaactggactccagcctagtcatctatccctcggaatggtacctccaggtactggaaactgtcgaactggaacttggtctcaccggagtcgacgaaaccaagtcctattcctgcccaatccatttgaagcgtgatcctctcaacgaatctcgttacttcgcctatcacaacgctggtcttcacgcaatcaccttggatttcactcgccaactaatgcaatttgttgagaacgaagaagacacaaccgatcgctatccgctgttcacctctcagagccgcgctgagtatgttgtctgcaccaaagctctccaaaacatgagctccaatgccgttctcggatttgctttgttgcaatctccctccggattcttgctgcagttggcatccggtcaagtcgtgaccctggatttgatcagcgatcaccacttgattcgcgattggaaggttaaatcaggttcaaaatctttgaccggtacggaatcccctctgaagaaactgctcaaggatcctttccaggataggattcaatccattctgaagtccggcaccacccagccaattctgaaactggacaaaacctcggaacccaccccacaggaatcgttcgaactgttgacccaagccacacgaatgttgagggaacattatttcgttaagcacgagaaagcacgccaggagatcgagaggagagtgcacgtgctgcggctgctcaaggagcaacagttgagtgaaatcgcccagctccaggaggagaagcagcagattcgggaaacggcggaacgtttggctgagaactacgaggacatttgcgataaacagaatgctttgttcaagagggcgcaagaagtggttcggctggcaacactgcgccttcccaaaggatcgttttccgagaaaaggtacgcagagatgatcgaaaaaatcggcaacgctaccaaacagttgcagaagaacgtcgatcaagccaagcagaagatcagtgcccagcaggtgcaggtggagcagaagcagaaggcgtacaacgagcgaattgtcgtgctaccgaagaaacaggaagttatcattcagcagatcatcggtgaaatgtacacacaaattgatggctacgtcaaggacataaagaagatcaacaatatgttgaatctggcttaagtggatacatatgcatttcctataacactaggggacgtttaaatgtctcatgtaacttttatagttaattaccatggtatttatttaaaaaccaggtacttctacttaatattggactctattgcataaattaaactacaatgtgttgaatgaataatattttacgcataatattattgataagaataaaccatggttcaacctagagacttctacctagcaagttacatgagacaatttaaccaacaccagcagaaaaaaatcgtcatttggataacgtaagtataagacacttaaatttaatagtttcaacgtttttactgtacaaggcttcaagcataataaataaaaagagaataatgttacccg

SEQ ID NO: 311 - DNA, 1222 bp, Aedes aegypti
ttttagccgcgtgtgcgatcacaaccgttttgttcgagctcgaaagatttgattttgtgttttaatatttttagtatctaatatttttgcgttgtttcaagagtgttcttatgtttgtttgagtgttgtcgggcgtttttttggaagttcctcgtcaaagaaggcagagtcattgcattgaatcaaattcaaaaccggaaccatccaagatggcctttgctctgctgagaaattgtgctcgctcgtcgatcccgctgctggagcgaaattttgcagcgcttactacaatgcatggcaccggagctactctaatcccacattcacaaaagattgaccagaccactgccggacaaccgttgcccaatttcgtgtcgaccaatgtgcgaaagtactccaaaaaagctaaccgacccgaacgggcctacgagagcgattccgattcagactcggacgatgaacgggacactcacagcaagaggcagggtctccgccgggaaaggggaaactccgaattttggcgacgaaagatgcgtaccctgcacggcgtgctggacgtcaacaatgatggtgtcatttcctacgacgacttcatgctactgacagagaacttcgccacccagggtcatttgagcccagcagagaaggaagaattccgcgaaatcatgaaggaaacctggatcaagcagtggggcgaaatcacaccgtacaacctggtaacggtggagcagtacctggccgacatgcaccacgtggtcaacgacaaggacctgcgcaagaaggtgcaccgatttttgccgtacctgtacaaagcggtcgacaaggaccactccggatcgatttcgctgaacgagttcaagctgttcttccgctgtttgggcctcacggaggaggatgccgccgtttcgtttgccgtgatcgacaagaacggcgacggacaggtcacgttggacgaattcttgaagctgggacgggacttcttcctcaccgaacgggaggagaacgtttcccggctattctggggaccgctggtggaccattgaactgaaaaaaggatggctaaagtagtgccgacgggcgagtgtcgaaatgaggaaccatgtaggaagaaataagagtcttgaaagcagtcttttcacataccttaatattggatatttaacattaggattttgtctgatttgtgataatcaaaatcatttacatgagaaataaagtgtttgat

SEQ ID NO: 312 - DNA, 1353 bp, Aedes aegypti
cacatctcgatcacatctctggccctgttaagccggcttctggtgatagcgttgcaaatcatatcgaaccatttgatcccagatcacgatgcgggggtgttcattgctccccgtgacccggaagcacccccgggaaagctggacggttcggtgaatgccttactcggagggttacaccgttgggatgcgcaatacttcctgcacatctccgagcatggctattcctacgagaacaccctggcgttctttccgttgttcccgttcatcataaaaatccttaccagcatcctgggcgggaacacctccttgctgacatatcgagaactgtccctcgtcatagccgtactgctgaacgtggtgtgtttcgtgtttgcagcgaaagctttgtacaagctaagcaacatggtcctcgggaacaagaagaaaagcgaactggccgtgatattgttctgcttcaatccggcgtcgatctttttcactgccccgtacaccgagagcttatacgcgtggcttacgtttgccgtgatggcacaatgtatcgacgacatcaattcgatactgattacggtgccattgagcttgagcatcctgtgccgatcgaatggaatgctcaacattggatttttactgtacttctacatgcgtcgaatcctgtcacaaaactctttccacaacatcatctgcatcggatcgaagcttttctcgatcctgatcatcattatcttccactatggaatagcgcaagtgtacagctactatctcttttgcttcgagcagaagtttagcttcccaccgcacgttaaggcgtacgctatcgcccacgatttagtgctggctggcaataaaacagcggaatcgtcgccctggtgctcaaactatttgcctttatcttactcttacgtacaaagccactattggaatgtaggatttatgaaatactacgagttgaaacagttaccaaactttcttcttgccttacctgccatctatctagtagtgagtaactcgttcaaatacatccacgacaattgggacttttgcgcccggctgggtttattcagactcaacaagaagcaagtcaagagcatgcgaaactacgatcgactggcgttcgtgttcatagctcatgcgttgtttctagcactgttcagtgtattcttcgtccacgttcaggtcacaactcggatgctggcctcgtctagtcccgtgctgtattggttcgctgccgaatacttcaccggcgataaagccttcattcggaggcaacgaaatcttggactcattttactatattttgtaggatatgccgtaatcggtacgattctctttagtaattttttgccctggacctaa

SEQ ID NO: 313 - DNA, 3360 bp, Aedes aegypti
cagtttcgttactgattacaaagtgccaaataaaatcattttaaaagtgtgttaaaatgtacaaaacgtttcaattacaacagaattgtttagttatgacgtattataatagtttgagaatggttttctgaaaagtttaagattataagcatcttatttgtcattatgaaaaacaaatgaaaaaggtgtggcatgcgtagttttcaattagagcacatacagtagaaaattaaatatgaaaacttattattggaatttttacagtataaaacactccattttacaaaaaataacagttttattattcattgaggtcaattgcttaaaaataggcttgtcatatatatatatatatatatgaaatctagaaatggagcgcaaagtgttatctttgctctgcctcttttttattaacgtctctgcacaacggccagggggagattatccatcgtttttcaacattggaggagtattaagcaacaatgacagcgaaacccatttctcgttggttattgcccatctgaacttcgatcaaacatatgtaccaagaggcgtcacatattacgataaaacgattagaatcgataagaacccaataaaaactgctttggacgtatgcaaacatttaatttcacgaagggtatacgctgttgtagtatcacatgaaccaaccggggatctttcgcctgctgccgttagttatactaatgggttttatcaaataccaatcattggaatttcatctcgggatgcagcattttcggataaaaacatacacgtttcatttttgcgaacagtgccgcctttctaccatcaagctgatgtgtggcttgaaatgttaagccatttcggatatacgaaggtgatcgttattcatagctccgacacagatggaagggcaatacttggacgatttcagaccacatcacaaactaactatgatgacatagacgttcgtgctactgtcgagagcataatagaattcgaacccaagcttgaaacgtttacagaaaatttgatggagatgaaaacagcgcaatcaagagtgtatttgctgtatgccagtactgaggattcatatgttatctttcgtgatgcagcgcagaacaatatgacggaaaccggacatatttggattgtcacagaacaggcacttcaagcaaataatacaccgattggtgtacttggactaaaactaaacaactcaaatagtgaaaatgaacatataaaggacgcaatatatgtcttagcatcagcgattaaggaaatgataacccataacgagaccattactgaagcacctaaagattgtgatgatacaggtgccgtttgggaatccgggaaaaagatgttcaactacttaaaaacaagacacataaaaggagaaacgggacatgtggcattcgatagcaatggagatagaatatatgctgcatatgaagttattaacgttcagcaaccaatgttatcgtctacgcggaagaatgttaaggttggaagtttcttctatgatgaagagaaaggccgaatgaggctgaaaataaatgatactatgctggtttggcctggaaacaccgaaaaaaagccggaaggaataatgattcctactcatttgaaagttcttaccattgaagagaaaccatttgtgtatgtacgaaaattactagatgacgaaattgattgtgaagatgatgaaatagcatgtccccattttaattctactgatggaaacgaaaaagactattgctgcaagggatactgcatagatttgttgaaagcattagcgcaaaggataaactttacttacgatttagccctatcgcctgatgggcaatttggtcactatcaacttaaaaatcatactacgggcatcggcacaagtgtcaaaaaggaatggaacgggcttattggtgagctcgtcgccgagagagcagatcttatagttgctccgttgactatcaatccggaaagagcggagtttattgaattttcaaaaccattcaaataccagggcattactatattggaaaagaagccgtcaagatcaagcacactggtatcatttttgcaaccattcagtaatactctgtggatattagtaatggtgtcggtacacgtcgtagcactggttctctaccttttggatagattttcaccttttggacgattcaaactgactaccaatgatggaacggaagaagatgcgctaaatctgagttctgcgatttggtttgcttggggagtcttgctgaatagcggaattggcgaaggaactccacgaagcttttcagcgcgagtactaggtatggtatgggctggatttgctatgataattgtggcatcttatactgctaatctggctgcttttcttgtgttggagcgaccgaaaacaaaattatctggcataaatgatgcacgccttcgtaatacgatggaaaatttaacttgtgcgaccgttaagggatctgctgtggacatgtattttcgaagacaagttgaactatctaacatgtaccgtacaatggaagcaaacaattatgacaccgctgaacaagcaattcaagacgttaaagacgggaagcttatggcgtttatttgggattcatctcgtttagaatacgaagctgccaaagattgtgaactggtaactgctggcgagttgtttggacgaagtggttatggtattggtttacaaaagggttcgccatggacggatgctgttacgttagcaatattggattttcatgaaagcggatttatggaatcacttgataaagaatggattttccacggaaatattcaacagtgtgagcaattcgaaaaaacaccaaacacattgggtttgaaaaatatggcgggtgtatttattctggtcggcgcaggcattgttggtggtatagggttgattataatcgaagttatttataaaaagcatcaaataaagaaacaaaagaaactggaaatagctcgccatgcagccgacaagtggagaggaactattgagaaacgaaaaaccttgagagcatctctagcaatgcaacgacagtacaatgtaggattaaattcggtttccaaatccatcagtcaggcagtagacaaaaatcgaaatccaaaactcaatcccttatcgagagctccagaaagagcatggcctggagatcacgaaattgcgcgcaatcgtagaaataatgatcaaacatacaaaccacctcctagatacatgcccacatatgctacagatgtatcacatttagtggtataaataaaataattaacgaatactatattactaaacatattaatgtattttacctccttaaatatataaatgttaatactgtgtttagattcacataatcc

SEQ ID NO: 314 - DNA, 576 bp, Aedes aegypti
atgagttacccatgggaaaagcgcgtcgaattcatcgtcggccacatgtacgatattgacaacaatggcttcctggataacaacgacttcatgtgcatggccctgcgtgccaccgtcgtcgagggcaagggcaccatcaacccagcacgcctgaacgaataccggaccatcatgaaggctctgtgggatgagatctctgcccttgccgatttagatcacgacggtaagatcaccaccgaagagttcaaggatgccgtcaaagctacctgcgttggaaagtcctactccgacttccccaaggccatgaaggcattcatcgatgcccactaccagatgatggacatcaacaacgacggtctggtcagcatagaagagtaccgttataactgcatctccagaatcgccatggatgacatcaagaaggtcgatgattcctacaaccagctcgtcagtgacgaggacaacaagcgcggtggaatcaccctgcagagataccaggaactgtacgcccagttcatgggtaacgagagcgacaagtgcgcagccatcttcctgtacggcccaatcccagaataa

SEQ ID NO: 315 - DNA, 2815 bp, Aedes aegypti
ccccacggtaccttatctcatgtaggtttctctataattgtgttttcacaacaaaattcacaagtaactactagtctgctatttcgcctttttgttaaaatagggaatatacgctaaacaatagcactattaggttacttgggtgttggatttagcaaacgtaaaatacctttacgacaattgtaatgatcaataaagttccctgtacttatttaaaaccaagccgataaacacaattgctcttcttttgctttaatctttttcaacgcatgctgtgggtggtatcgctttgaatacatacattcgcgcacagtgtatcgttctttgtgtggtagtggccatgtagttgcattacggacggagagacggtgattccgaaacaacaccgtcgatgaaacaaaattttttgcttcacatcagtcaggcagtcagtcagttgtgatggtggttacgttcgtcttctgtcaagctttggtcagccaaagctgaaaattggtggttgtggcactcgaaggtctcacagcctacctagattgggaaataggaagaaagaaacagaaaaaaactcaggaataacgtgaatctatctgcaggtatcgtgttgtagactggtctcgccttctgcagcagtgttctggtgggaggattgcgtcaacaaccaccacactaaagtgaaacaaattacgcatcaactaaagggaaaatggactagaagtttgattagtgaaaccaatccaagcaggccaacaacgttacgttacgtgggtcgggcgtagagagaccgaagaagatgtcgtcattcagtgagtgctagaaaagatccaagtgtgccgtgaaagcaacaaagtctacagaaaacatccaagtgtgcgaagaaaaggggttcaaggatacggggccaggggatcaacaacatcagctgctcggaccatattgacgaagagttgtgggcagggggcaattgagtatcccacaggcagcgagcacatcacaggcccaagaatgctgtagtggcaaaggggggaatgttttcctttctccttcctttgccaacgtaaatgtatcagcaccttttgtttacccgactactgcgttcgacggacgagagcaaaaaaccttcgagggaaacaaacagtgacggccagcagacggtaaccccgattcacgttctgcgcctactgtggttacacaagacggcggagccaaacatcgtcagctgaaagtttgtaatctgcgagagaatccatctagtagtcgtcacattgccacaacaccatcatccaatccaatcgaacactgtgtgcgcgatggaagaagaatcgtaaacgcttcagtttgaaattggctgacagagggccctaagtgcggaagaacaaagaaacgtaatatatcgagtgtttcggtggactttgtgcgattctttgtggcaagaggcgaaatttgagagagccagaacgaagaagatggccgatttcgatgcgatatacgaggaacaggaactggccgagccggaagatctggaggagggccacgttcagatggtgccggatccgatcgtcatacgtggggcaggaaatatgacagtattcggtctgagcaatcgcttcaacgtgcagttcccagccggtctggtgtcgcgcgttgcccccgaagagttcaaagccaccatcctgcggatcaatgcggtcctcaagaagacacttccggtcaacgtgaagtggctgttttgcggctgtgtgtgctgctgttgcaccctcggatgttccctatggcctgtgatatgtttaagtaagaggactcaacacactatgaacaagctgctcgagtgggagaacagccatctgtaccacaaactgggtcttcactggcggcttagcaagcagcactgcgactccaactcgatgatggagtacgtgctgctgatagagttcatacccaaaactccgatctaccgtccggactaattgggagggttcttcctttgctgaattgtgttttcactttcgtttgtaatggtggtctccgataccccaaaactaagcgactgaacggtaggggcttgaccccatgacccctctattgtgtataagaatttccaagatgggtttccaccactacttgaaagtgctctgataccgaatgtcggacgatcggaaccactggataccaactttattacgttatcatagaactagtagttgtaattgtgaagcgtttttgtcggtagaatttagttgatcctctctgtttttgagggcagcaagtaccctgctactcgctcaagagtagtcggtgatcgtcagaaaaaaatgcgtattgtttatatattcgaattaattgtacaaaaaaatctgaatcgaattcgttattggacagcaacactttgtttcttgagaaaatgaatattcattaggatcgcagtcgtagattattcaaggtttaatcgttgcggtccgatgggcagcaaagacacagaattatccaagtgagaacgaatatttgtaatcttgaatttaaagaagaaacaaaaaacaaaacactcaagtgatcttaggcaagcaacaaatagaagagagcgaaaaaccatataaatgagatacaaagatactacaatactaaatgccaactggcattttcgaagctcggtacacgtaatcgagcggtgatgatttctgattaaaaaaaaaacacgcgataaagcgcgcaaatgcgagcaaatatttagcactagaaagtgattgtgtatagtgtatagagaattgtttagccatttaagatgaagcaaatacagaatggaagaaattatttgaaggca

SEQ ID NO: 316 - DNA, 3601 bp, Aedes aegypti
atgtccagtggcaccacgaagtttcatatgccgcagcccctcgtcaagcaggacgccctcaaggaacaccagtcagcgacagtcggaagcaccaccggtggcggaaccgtggtaggaggaaccagcgccaacaaagtggtcaaagtctttcagaaccaagtccagtacattgtggccaaaggaacgacagcttcgaccagtgagaacaatggtacaacagcaccagcagctgtgaagaatttggccacccccgcggattatgtttcgagcacagagatggcagatactgaggtgaaagtagttattaagccaacagcaactggtgcagtcgatgcggaaacgatcgaccaacaagagcaaagtattatctccaccgtttaccagccgcagcaaacgaagaatggtaacaaccgactgtcctcgcagcggtcatccccaggttcttctccctccccgccactacaacaatctgtaacgggatccacggcagccggaacgatggcgacggcggcaaacccgaaactgagcaatggtgctgctgcaaccaaaatgagtagtgcatcgacggcaggaactacgccggcggcagggcccacggtcacgaccgcaaccggaaacaacagctcaccaaatacggccaatttccacaacttcatcggccggctcatcagcaaggacaatatgctgctgatcagcgaggacatcatcgaggtgggccggaactcgtccaagtcgcaggtggacttccacgtgggcaagaacagtttcgtctcgcggaagcatttcatcatccagcacgacataaacgacgagttcaatctgttctgcctgagcaagaacggcgtcttcatcgacaatgtgttccaccggaaatgcgccgagccgtacaagttgccaaaggtttgtagcattcgattcccaagtacaaatatcaagattcagttcgagaatctgatcgatcaagccaacaacgggggcatttcgatcgacctgaaccagcacaccccgatcaaggtgggaaccggatcgggtggcagtgcggcagcggcggcagcagcaatcgccgcggtcggaggcaatctcagcgtgggtggcacgacgaccgccgccggcgacaaatccccctcgtcgaatgtcgtttactcaccgctcaagatctccatcccggaacagagtggttcgagcaatcccaacctagcggtggagatccgtggccattatgccggagggggtagcggtggtggcggcggaggcggacgagacaacagcatgcacatcagcggcagtgggtacccatcgcccactggtaccatcagcgcggccaatagctgccctacgagccctcggcaaaacacgcacgagttcccacagtatagtcacaatagtcatagcagtaacaacaacaattacgtcgaattccaagcacccgcatctcaatccatggccgaaggtgacaagccaccgtacagctacgcacagctgatagtgcaagcaatctcggcgtcaccggaaaagcagctcacgttgtccggcatctactcgttcatatcgaaaaactacccctactaccggacaggggccaacaagggctggcagaattcgatccgccacaatctcagcttgaatcgatacttcatcaaggtgccacgatcacaggacgaaccgggcaagggtagcttctggcggatagacccgtcgagtgagctgaagctgatcgaccagagctaccgcaagcgacgccagcggggatctcagtgcttccggacgccgttcggtatgccccggtcggcgccggtttcgcccagctacatggacaacaactcgcgggagggttcgcccgttaacgacgagctgatgctgtcggcgcccggctcgcccggtcagaacaatagcggcaacgtcagctacagttcggccaatcatgatggttctcagcactcatcctaccagaatcagtataacgcttacgccagcggaggtgccgagcacagtgtcgaagtgtacgacgaagacgatcaggtcgagtacgatagcgatgagtacgacgccccaacggcagtcaaacgccaaaagatctaatgcagcagcacgccatcgtcagcagcctctcattctcaccaaggtatggctagaactcatccactgagtatgagaaacgtctcaaccgttaaaaaactgaggaaacgcattcatacacaattgaagagaaacaaaaccaattgcacatagaggaggaaatcgtcaacttcaactaactgttactcagaaaaacactacgtcaccaacactaacacatccacaatacacatacaaacacacaaccacaattttaacgttcttgatggtcttatctgcgttcgttgtcggtttgtgaaaccacctgcatctttaaaaaaaatctgaatgaaacacaaaactttttccccccgtttatcagtgtaagcacacggaagagaacgagattcacctcgagtgatgtgttttactactggaggaaatcttttacgaacagtaacattgttgcacacattttcagtcactagaacgaagaaaaacagcgatcaggaactccaatcctgactgcattcatccattgtttcacgagagatagaggagaatcattctttactaagaaaggtggcaaaccggtttcttaccggtttaccacgcactaatcgtgtggcgcgcagacaagtgaatccaaaatattacaatttatataatctatggttaatataaagagagaaaaaaaagcaaaatggaaaatccgataaggaagtacatttaaaattctagttattaatgaatgtgagcaagaaaatctatacaaatttaaaggtaaactaatttaaatgcaaacaaaaccaagtaaatgagataaacaagtatttagtgtttagtaaaatgtctcttttattaaatatgaaaaaaaaatcgtaaaacaccccaacaaaacacataccgaaagagtaggaaaaaaacagcccgaaaaaccggtggagagccagcgacgtagttgcgattcttgcgcgcatggatggttccaatctatgccaagctggaattgcggaaccggatttggaatccaccagtgcagtgcaaagaagatcaacgccgaggcaggaaaacaaaaaaatagcaaaaatcacgtagcagaaaacaaatgaagaagtagctggtaaggttggaagaaaagaaaaaagagaaaaatccacacacgaaatcaatcaaattgattaaaactacacaactattattactcaaaaacgcaaaatcgtccgcgagcgagcgaactataacacgatgtctggcgctgtcctggcttcctatggatgtggcagcgactctgtttggcatgcaaagcgctcgctcgcgaaaaacgggaccctctgcgctgatcgcttgggcggacggtaggtacatttattgtgtaatggaaagatgtatgatatatacaaagttcaggcccattatggagtggaggatataagttgggttcgtcggaacgcaagataaggaagagaggaagtttgtaaggtagacgacaacaatgctgtgtaacttaattgtatttgtttaaatgtaaatttattaacaatac

SEQ ID NO: 317 - DNA, 639 bp, Aedes aegypti
atggtttcgcaagatcgctggatggtaaagatgtccgaggcagggtacgataaccgggcggatggcagtggagcttccagcagcagcctgaacccgcgaacgccgccgaactgtgcccgctgccggaaccacggtcacaagatcggcctgaagggacacaagcgctattgtaagtatcgcaattgtacctgcgaaaagtgctgcctgacggccgaacggcagcgggtcatggccctgcagacggctctccgaagggcgcaaacccaggacgaacagcggttgctggtagacggagaggtgcccgccgaaccgcagaggtcgttgatcgactgcgactcgtccaccggctcgatgaactccaccccgggcagctcgttggtaacgctgtcccagcaccgaagatcaccctgctccgccgcgtcggtccaccccagcgaggctcagcaaaacgttgcagccattattcgctatcttgttcgcaagacgagacgtgacgactttcagctaattgcaaaactattaatagcatcctccggtgatgtctgccgtctcgcattcttaaccggagagcatcaacagttaataatcatctggcatctactccagtgtccgccaggaaccttccgtgcgaccgaataa

SEQ ID NO: 318 - DNA, 2401 bp, Aedes aegypti
caaggataaaatgtgactcccgttttacttccccgaactaatcatgcgaacggaagattcgaccctggcggtcgcttctcctggtcggttttgacgttttcattcatctcttgcagatcgatgaatgggaacgtaaacaaaaatttgccttcgtggttcggcttcagtagtaaaactttgcactcgtgggaaaaaaatctcttcgcggctgcttccgtaaaaagatgtgagaaaccatcagtgcagcttctgcccgtccacgtagattattatattccgaaactgtgttaaataattgaaagaattatttcaaatcgctgtctgatagagtacctaaaagaatatcaccacaatgaaccaagaaatccgcataaaaacgaagcacttttacgccttgctggtgatattaggcttcctgctgatttatagcttaagttcgaaccgaggctgtgatagcaccaccgatcaaacgcaactggatcggcgagccttccaggagaaccgggaggccttcattccgaaccagaagggaccaaccatttacgccatcacgccaacgtatgcgagacccgtgcaaaaagcggaactgaccaggttatcacacgtaattcgccttgtgccgaatgtattttgggtgatcgttgaggatgccgagcacacaaccaccctagtcacgaatctcctgaggcgaagtggcctgcaagaccgaagcgttcaactgtctgccaagacacctacaaatttcaaactgcaaggcaaagatcccaactggcttaagccacgtggtgtggaacaacgcaacaaagccctggaatgggtgagacagcacatgactgagaatggagggcgggaacgacattctgtggtctattttatggatgacgataacacttacagtacagaactgttcgcagagatttcaaaaatcgagagaaataaggttggcgtatggccggttggattggttgggggtttaatggtcgaaaagcccgtcctcaaccgagacgaaatagtccttggattcaacagtgcttggcgtccggagagaccatttcctctggacatggctggatttgccattagctctgatttgcttttggacaatccgcaagcccagttcagctacgaagtggaacgtggctatcaggagagtgaaatccttcgtcatctaaccattgttcacgaaatgcagccgttggcaaacaagtgcactgaagtcctcgtgtggcatacgcggacagaagcaccgaaactcgatgccgagaagcaacttgtaaagtctgggaagcactccgataccggattagaggtgtaagcatagtctaagacgaatccaataatgattttgtcagaactgactcaaaacaagtgtggcttatgaaaatgttcaacataatacttgtgaaacactcgtaacttacgaagaatcatttttattaatataattttgctaagcaatttttcctgtccgtataatttgtgtgttgctcatttacgaagcagtattaaattatttggtagacatagttgtacatgatattacagacaaagaactctacgtaacgctaaaccgattattaggtgaacaagaattacagaaagataaaaaaatgtccattcgacaacttttgcatgtctaatataaagacttagtatcacgacaactaacattgaacagcatttaataaggtttgcgattttttaatcatccatttcatttcgttgaattttctattgttctgcgctatagataacttaccacggagtgtatagtttgggtagtgttgtcaataattaaatcaacataaaactcaatactaacatcacacgagtttatctatcctgtttagcgttatgtagcaagctgtctcttctcgcattttagatacccgtcatatttgtcctgtaaataagtctagatggattgcaggtatttacttttttaggatattgggtggggaaaaaaaggaagacggaaagatgagcaagagctaagaacacaaaatagcaatgaccactagtttggctcttccattcaaaattcaattcacagataacgacaagaaactgataatgatgtatagtgcttagtaaacgcatttaccgaattaggagttattagcactcatccaattcacccatttttaactcaatgccttcattttgaacattatttgggttctgttacactcgttgcccttttcaccttcaaagcaccacatagttatataagcggtacctatttaagaagattatctttgaaagaaaagcatttctcgaatttcacgtagtttgtacataaatagcgtttacgagtccaactttttatcgacttgttcaatcttcccttgaatagatgccaactagaagaaatattgaaaaataaaatcacactattcta

SEQ ID NO: 319 - DNA, 1770 bp, Aedes aegypti
atgaatagaatttactgctttctaggtgcaagaagcttagtaacgacaaacaaccttcggaacgatctgcttcggatacaaggcgccagcaggattggatttggctttaccaccagtatgacgaatcaaacgaaacccccgaacattctggcatatgccccagaaccttccgcaaaggcatgtatggtcgatatgcttcgtggcctggtacgagttgatacctacacggtttatccgatgacggaggggcaaatggaagcacgggcctggttggacagtaccgcactgctgatggttcacgggcagcttgatgaaggtgtggcgagggtggcagttgattactttctgggtggtgggaaagtaatggcagtttgttccaatttactgaggttggttttgccgaaccgagtgaaggatgatgagagtagaaatgagagcgtattactgagctacgataggtggcaaaatacgacgatggaacaggagatattagactggactgcggaggaagatgaatgcagagaagttgcaaggaattcagccggcgttgaacaagaactgaggattaagattttggcgagggagagcactttcaacacgccaagcattttgaatttgaaatgtttggacactaaaggaaacggtatcttcactcaactacatttaaatctagacagagagcctgaaagggacatactcaagcatttactagacaagcatttggagattagtattaaggaatgtatgcatcaagagcaaatccagtacaaaaatgcctttctgattggcagcttacatgaaaagaacaacttcctaaaaagcacacaaaaggttctcaatctgacaaaccttgaaatgcggttttgcaacagctcagagaatctccctgcatcttcggaaaccaaacttatggtcctggttgaccgccatccagaagatttctcagttgaagactatttcagcactttaaaaacatccttcctgggtcggaccgcaatttactgcccaatggtaaccagttcgatggatgtcgtttctaacaccacgtggagtgatggattcgcagtcatttcccggtgtcaaagccgaggcagcggacggaacaacaaccagtggctgagcccggaaggttgcgccatgttctcgctacagcttcacgttcccttggccagcgcccttgggcagagattgcccatgattcagcatctggtggccgtcgctgtcgtgaaagcgattcgaagcataccaggctatgagaagcttgatatccgagttaaatggcccaacgatatctatgcaaatggctgtacgaaaattggaggattgatcataaattcgcagctctgcgggatggaagccgttgttaacgtgggctgtggcgtgaatctcagcaattcgaaacccacaatgtgcatcaatgatttgatcagggagtacaacaaacttaaaggcacaagtttgcctttactgggaatcgaacaaacgttggcgtacatcttcaatgaaatagatcgaatatacgtttcagtacaggaaaaggacgatttgcaagacctgtatgatttgtattacaaatattggctacacagtaacagatctgtgatcgtcaaaagcgaagacggagaggaaattgctggaacaatctcaggaatcgacgaatatggctttctgttggtcaatacgaacaaggagggtaaaccgatctgtgttcatcctgatgggaacagtttcgatatgatgaaaggacttatcattccaaagtactattaa

SEQ ID NO: 320 - DNA, 1419 bp, Aedes aegypti
cgccaagcagccggcggcgacacgacgggcgctaccatgccaaccgcatatccgccgccgtcagacagagcaggggtagtgtggaaaaatgtttcatccaccgattgggaaaacgtgcggaaagcgactcggaattcataataaataaatttcgaaggagggtgacttcgatgatgaatcaccatagcgatacgataaacagttggggaaaagatttcaatcgagttggctggatttcgacggggcacttcttggcttgagttttgatttaggtatcgtgatttttggttccgtggattcatctcagattctagggcaacggtcaacacgtcacgatggatgatcaaccgaaagcggagggtgaagctgataagaaaattgtgcatatttatccactagtgaagttttccgacatgaatgacgatgtccgggccgaggcgatagaactgagcattacagcgtgtgagaaatacgcacaaaactatgagcacgccgccaaggcaatcaaggaattgatggacaaaaaatttggcaccttttggcacgtggtcgtcggcgaaggattcggttacgaagtgtcctacgaaaccaaaaacatcctgtacctgttcttcggcggtaatttggctatcgtgctgtggaagtgttcgtaaagcgtgattcggaaaacgttagattgataataaaccgttagaatattttattgtacataagataacggagaatgtgtttgtttttcataagtttgtacaaaaatgtaaatgagtgtgcaatgcatccgccagaagtggatccccgaaaaactaatgatgatttaaatatcgattagcaaaatcggagaataagttcttttggtatccacttctaaattgtatgatttctgtaaattggtgtatataattgttcaactattcgaaaactaattatcggcttcgatcatttcaatgagcagcaaacataaaaagctttttgaaatgattgacacgtgagatactgtacaaaatatcgtttcttgcgttctgcaatgctgttctactcaaatcaggaacaaacaacgtcgttaagggtcaatgtacagaaaaaaacgttgatgttgcattcatgcgaatgcaactatcaatttttaagaccatctgaaatcgaggtcctgtagtagtgtgtttttttttgttttcgttccatataagtacataggaatagactcaatatgtgaatatcaatcatctaatgttagcacttgtggcacatgttttttggttgattgctcgatgattgtttcctttccgtaaaaaatccatcatatttttaatacctttattagtaacatttaaaatattgcactcatttcttatatctaggcagcactatcatcttaatttgataaaattcaatagagctgttacagtcgactctccacat

SEQ ID NO: 321 - DNA, 3296 bp, Aedes aegypti
aaaagacacgaggaacatcataatatttacctggtccagcacagcagcatcaacccccacattttggacatccccccagaagggcttacgagtcgagagtgtttattgcgttggagcattaagaagattaatcataactgttttctcggtcaacatctgctgcgtgactcttcagtgacgagaaatttcgtctagtgcgagactagtgacaaaaataaaacattccgcttcgatttggttctgttttggtccattttcggttgacaacaagcgagcgaaacgagagaggaaggaagaaacctatcgcatacgacatacgaccgcataagcgaagcgaacaaaaactgtcgccgcgagttacatgtgcttttttttgcgtcgaatcgaaataaactgactggctgccgtttcgtttcatcgaaagtaaacattagagttccgtttgtttaccatcccatttctggatatcgagatagtgaccgtgcggaaggaaggacaggtgccttcgaggagaatcaatacaataccagagtgatactttaatccagaactctgttccggattgcaccccgagtcatcgatctgttctgtgtggtacagcgcgggtaatcgtttcgctaatgctcggcctcagtagcaacagcccctagcgactactactacaatgaccgacaacaacaatttccaccacatcccgcagcacgtgttgaaacatgagacgatccagtcgtcgtcctcatcgccgcctcagcagccccaattccaggtgtactatcaccaccagccggcgtcacatggacagccgcatggacctccgaagggtgcgataaaaatggtcgaaaccgttcccgccgacctttcggcttccagtaccggtttggactacagcactcaccatcaccacccgcagcaaatcatcgagtacgacccagtcagtgatccgaaccatccggtaaatgtggtcattgaacatcagcaggtggtggaaacgcaaccgaccattgagcaacaggaacaaagcgtgatagaggctctctgtcagcaagctcatcaaaatcggttacaccaagaacagcagcaaatagccaagggaaaacggatgcgaatggacaatgtacaacatgaaaatggatccggttatccaagcgaagacgaggatcatgaagatcctcggagaaagctcgttatccatcagggacctggcggagaatctatcgaggagcaggagcaaagtattatcgaagcgctctatcagcaacagcagcagaaccagctccggaagcaactcatccagcatcagcagcaccacgatggtgatcatcagctgtcctaccagagacggtcacctagcccgccgtcccggtcgctttctccctcccaatctccgaccgtttcgggcacaaccgattcgctcagttctcgcatcacacccgcatctcagcccccgcaaccgatctcgttggccaacatcaaccagagcaattttatcgctcggttgatcagcaaggacaacatcctgctcatctcggaggacctgatcgagatcgggcggaactcgtcccgggcgcaggtggatttccacgtcggccggaacagtttcgtgtcgcggaagcacctgctgctgcaccatgatcacacggatggggagttctacttatcgtgtttgagtaaaaatggtgtcttcattgataacattttccaccggaaaggtgccgagccgtatttgctgcccagagtttgcaacatacgttttccaagtacaaatataaagatccagttcgagaacttgtaccacaaaaacaactccgaaggacctcgtgacctgctggacaccagctgcggaccgtacgctgccagcagcagtacgatgcagctcaccggcaatggtccctcgaacaacagcgatatgcatcccgcctctatttccacaacaagcagcaccagcatgtacgccccgcttaagatctccatacctcccgaaccgcccagctcgtcttcgatggaacacatggatttgagcggccgtatccgggacaatggcaagagtccgtacccttcgccgaccggtaccatcagtgctgccaacagttgtcccacgagtccccgccaaggatatcacgacttttccgtctacacgtctggccatattggtccagtgggcggaatactcagtcacgacctcggtggaccaaccggtggccacttggcttcgagcagcagcggaggcggcgtcggcagccacagctttaacgatttccaacccccggcaacgtcgcagtcgctggagaacgaaaaaccaccgtacagctacgcccaactgattgtgcaatcgatttccgcctccccggagaaacagctaacgctgtccggaatctactctttcatctcgaagaactatccgtactatcggaacggagcaaacaagggctggcagaactccatccggcacaatctaagcttgaaccgctacttcattaaggtgccccgcttgcaggacgaaccgggcaagggaagtttctggcgtatcgatcccaacagcgagctgaagctgatagaccaaagctaccgaaagagacgccagcggggaagccagtgcttccggacgccgtacggcatgccgaaatcggcccccgtttcgcccactccgatggatccggaaagcagagaaggctcaccgttgcacgacatgctgctccagtcggcgcctggttcgccgggacaggtggcggccaacgcgtatgttcacagcagcaccggcaccagtgtggcaggccatcccgggcaggaagaacataccacctattcgatggtttaagtttgctttttttaagtactcgtcgtttctagagatctaaaatagcatttattttcgtcgtcttcatcgcaagattttctggcaaaacaacccaccaaacgagttcatccggaatctgttggtcaattgttcaaacagcatcaaccgcaacctgtagcatcaaccgtagtagcagcacccacaacttcagcggccccggcggcagctgcagctgatccaaaccacctgtagacaggcagaggcacgatcgcaatcgcagtgagattttccatcacctatttccgtttccattcataccgcgtaaggcaaaaatggggaaacaacttttattgatcatatgagtatgtacacatattttagtgttactaccaacacacataataataaaattgtaggtaaaatcaaaatacgaacaaaaccgctaatgtgttcgtattaatatataaattgttgataagcataaacactgggaatacaacac

SEQ ID NO: 322 - DNA, 606 bp, Aedes aegypti
ggtcttcctttttacaaaatagtaaacaaaatcaacgaaacaacaacgatggctgctatctccgaatttcgcaagaagaagcttttgtacgttttccacgtgttctttgacattaaccagagcggagaaatcgaccgcaaggatttcgagctggcaattaacaaaatttgtgagctgagaggctggccggagggacacgccaagaacaaggagacccacgatgccatgttcaagatctgggacggtttgcgaacgaaggccgacaaggataacgatggccaggtctctgtagatgagtggtgcaatatgtgggacgcttatgccaaaaacccaaacgccgtcctagattggcaagtgcgatacatgaacttcatgtttgacctggaggacgcttccaacgatgggaccatcgactcgggtgaattttctaccgtttattcgagctatggcgtcgataagaacgaatgcctggaggcgttcaagaagatgtcaaagggcgccaccgaggtgaaccgggaccaatttgctgtgttgtggcgcgaatacttctcatcggacgattcaagtgctccgggaaatttcatcttcggcaagaccgccttctaa

SEQ ID NO: 323 - DNA, 555 bp, Aedes aegypti
atgtctatctccgaattccgcaagaagaagctgttgtacgtcttcaacgttttctttgatgtcaaccagagtggagaaatagatcagaaggattttgagcttgcgatagagaaaatttgcgagcttcgtggttggccagctggaaatcccaaaaatgcggaaactcatgaaaacatgctaaaaatttgggaaggactacgagccaaggcggataaggataacgatggtcaggtttcagtggaagaatggtgcaaaatgtgggacgaatatgcacacgatccaaactccgttcttgattggcaactgaggtacatgaactttatgttcgatctggaggacgcatcaactgatggcagcatcgatgcggaggagttttcaatcgtgtgttccagttacggtcccgataaaaacgagtgtcaagaggccttccggaaaatgtcccagggtgccgaagaagtcgaccgagagcagtttgccgtgttgtggcgtgagtatttctcgtcggatgatcctgcagcgcctggaaacttcatttttggccgaacggcattttaa

SEQ ID NO: 324 - DNA, 1884 bp, Aedes aegypti
atgatcaacgtgtatgcattcaattttaccgacggggtggaaatatggaccaacaatgtagctccgatgtactccgataacaccagcccaataagtgtggtcgcagcagcgaaagcatttcttcagcagaaatgtcccccggcggcaaggaaagtcatgcgtaccagaagctctggccaggcgcatcatatctgggacgatcctatgatagagcaattcattacaaactactcacctgcctcgtcacgaagtcaccgcctagcggtggctccacctctgaccattgggtatccctttcaaagctcaacgctcggcaaccgtcgccgagattcggtcaacagctcaattggtgccacctcggttcggaggcttcttacggtgaacaatcgaagctacggctgtcggcacaagattcctacgcacgtgcgaaataaggtcaccaagaacttcattctgcttaccattgctcacgggttgatgtgtacggcgttgatcccccttattggactgcaaggttcgaactccacgtggttccagcaggaaccgtggctcgctatgggaccagatgttggctccggtttgctgagtatatgctgcgtggtgacggccctcatgtgcctcgtgacaaccaagatcatcaggaagtttggttactcaatagttctggcctcaatatacggagggttgtgtgtatttctggcaacacatatctacccggtgctggtgtcactggttccgggatatctagtgctcggtttggtcttggggccttcagtgatatgcaagcaaacgttggtggtatcgatggctggaaaactaagctgctcacaaccggaatgtggcggaaccagcatggccggaatcaacgctgatagttacgatgaccataggctgctgtgcagtagggacgaaagtattcgacgtctcggacgatggtttcgagccgcgggtgacttcggtatgatcatcggaaccatcattgcggcgtttatactaacgtgtgcctcgtcaaaccgcgccggatgcttctacatatcggctttcgacggctatcagctggatcgattcccgtacagtactttccaaactaacgatcacggtgaacggatctgtggatcccatttgtgcccggtttgggatcgaaacatcccgatcaacagcagcacgatcaactcgctcagcctgcagtcctacaccgggaccattccgctgatgggtctgtatctcatctgtgcggtagttgctttgactgttaccggcttgacgacggacatcgagcataacgtcaagttcgactcgatccggaagatgtccgatactttgctgtttgccggtccgatggcttacttcattggcaccgagcagggttacatgttggccgattttatgaaggcatttgtatcgtgcgaattgggtccaaatagtgtcgccggagctatgatcggaatgggagtaatgcaactcattgcagcatgcacccttagtatgctattaaggcacaccaaacgagtcgtcgtcataattgctggattcatattccacgcctgcctccttctggtcctgcttcgctggaaaccctcgcgggatgacagtgccgttctctacgtcattccagccgcctggggtgtatgcaacgctgtttgggaaacgctgacaaccgctttggtcaccctatcgcacacgaccaaggtagctgaagtgatgtctcccttgcaagctctgcgctttctgggactgggaataaccttcgctggacatggaatcctgtgcgaagctccgaagatcatcatcctggctatcctgctggtgatttccgttattccgtacaccatgctggagcttaagctcgaaactcaacgaaaagccgccaaagtgagcttatga

SEQ ID NO: 325 - DNA, 2862 bp, Aedes aegypti
gtaataatatgtcaaagtatttattttctttgggaaatccctaaattgacgcaatgtgctattacagaatttaaaaattgttgccaaaaagcattgaaccagtttgctcctatgtgccgcttttcaatacaggtaaaccttcactggctgtcactctcttattttcccattgcgtcggaaaacaaacaataaaccactctatttccctctccgattttggaaagttttcctttcaagcatgcattttgctttggtagtgtattagtatcgagacaggtccgtgagtattcgcatacgctgtgattgtgaccatcgcatcatatgatggtctcgcagatttaaatcctttctttcctataagacacgtcgagtggctgcaggacacgaacagctgaaaattcgtgttagttcgtaataagaattgtctggttggcaaacaatgaataagcttccacactgccataattaatccatcaaccgggcaagcgtctgccaaaagaatatgacttcatgagcaacactgtcaaagccactttttccgagcacatcaagatacgaattcgttggtcatctccttccacttcgtctccgagtagatcgaacagcaaaacccgcaccagcagcaaaatgagcgatcgtaaggcagtgatcaagaacgccgacatgggcgaagagatgcagcaggacgcggtagattgtgcgacgcaagccctggaaaagtacaacattgaaaaggacattgccgcatacatcaagaaagagttcgacaaaaggtacaaccccacctggcattgcatcgtcggccggaactttggctcctacgtgacacacgaaacgcgccactttatctatttctacctgggacaggtggccattcttttattcaagagcggttaagttgcaacaacatcacaggcagcaaaaaaaaaaaaagaaaagcagcagcagtcaccgcaagcagctgagagagcgcgtgttgcggagtattgtatacagaaaggatgagcagtagcagcaacggcagcagcgcaggaaacacattctatttactattacttctactattaataaattacaagtataacattgcccaaccaaacacaacaattgcaacaagaaccagtccggatagcgacagaagcagctgagaccgagaatgcgcgactttgtgatatccgcgagctgtgattgatgatggctaccatgggagaaagaacgcagcagaagagcagccagcacggtcttccggttaacggttaaccgtgagatgcataccaaacccagtggcagcaaatccataagcaaacctttgagaagagacgttctaatctttagctatcacactctctccggaacatatttagaagatctaacaagaagaacaaatcaattgaagacgctaactcttttttcgaagcagaacgtattaggagcacattttgatagtagataattgataatttgattatatgcaaaattttgaattttaacatctatttggattatccttgattagcgcaaataatgggttgaaattgtttttgtttgtaacgatacctacaaattaaatatgctgcgttgaaacgtgtttgtttccttttatcttatatgtattatcaaaaagcaaatgatcttaagttttctcatggaaaacattgatataatataataataaattacgatagataaaacaaaacaagaaatcctcaaagaactcgagttgctgtttcatttaccaaaattattgtcgaacctgctctgttgctcactttcttcaacaatgggttacgcatgtgatggtttcctgttgtcttgatgaaatcccttctgtctttctttgcgctcactcctcagtccattcgctgttcaagaccaatctattgtagaacaaaagatcgccttcctttttcagcgacaccttctttggtgtggcttgtgttcttatgctcatcgtcgaacccttagaaatcaccttcttgtcattttaacctgtgtccgacgtgtgttctccctttagtatatagttacacaaagaagcagatagaagtgtggaggaagtcagctgaagtgaaaaccatttccctctgatataacctactcgataaatcactgtccagaagcgaacgattcgttcgtcactagattttagtagtttagtacatacactacacacttatccaggagtgctcagagtgctgaactttcacatacacagatttctagctcagagaatattttatttaaagatttgtttaacaaaaaaaaaacagcttaggttacattttatattgttttcaagtcctcgagacaaaaaaaagaacaagaagacatcgcattagtgaaatccgcacctgagttcccaatagaacatgataaaaaccacgcagatataaatttatttacctccgtacggaggaagaacgaaatgcacattgccgaagttcaaacaaagcgagtactttaaaacacacgccgactcatatagaaaacaaatcaagtgaaatcaaccaaaaagtaaaggtttggaaattaaataaaaacaaaaccgggtcgaatcaatttatgtacttctcattattagctattatataaatggaatgaatattacagtatttttgtgtaacaggaaaaaacataaattgcaaaatcatggaaacagaaaggagatatgccgaacactcattgaacggtaatatagaagctacttaatgcaaaactgaaatcgtataaataaaaagagataaaaaacaggaaacacatttcgaaccaaaatgtatgaattggtctttgaatgagattttattatccgtttttccatgagattggccttgttagggtgtttttttttgttttttacaaggg

SEQ ID NO: 326 - DNA, 6788 bp, Aedes aegypti
atggaccaggcagccgtgcagcggcggtccaaggaaatcgaaacggaatacctgtccagtctggccgatctgaacgtcaacagcaagccgctgatcaacatgctgacgattctggctgaggagaatctggactacgctccgatcatcgtgaatgccgtcgagaagcatctggctaaggtgcagccagaattcaagttacctatcctgtacctggttgattccatcgtgaagaacgttggcaaacaatatcagcaactgttcagtcaggttattgtaaatatgttctgcggtgttttcgaaacggtgaatgagaaagttcgtgaaaagatgttcagtctacggcagacatggaatgaagtgtttccacagtccaagctgtacgctctggacatcaagatcaactcgatcgatcccggatggccgatcaccgcacagttgaaaacgccgaaatctccagccatccacgttaatcctatgttccttaagaatcagcagatacctgaaccaaatcttgatatgcaacaacagcttcgcgataaacaacgtgaactattggagcttcaggccaaaaagctcgaactggagcttatagctacgaaaaagcgtatcgaagagcaggaaaagttgttggttgcccaaacggcaagtgtaactaaagagcccgttcctgatctgaagcgtcctgctactgtgatcggttcgaatcatgttccgccacctcggggccgtattgctccaccgaatgcggcgatgatcaacctagctaaatcccgtgatcctcggttagcacgacaacaggcacaacttgcagcacaaatggtagcggccagcaccaattcaacaccaacgatggttggaggtacccagattcctccacataatccgatcgttctcgatcagtccggtaaaccagtcagcattagggaacgtttgggaaggatacccaaacggaccgatccacgtatcaaacctagtggaaccgacgttgatcgtaggaaaccttctagtaccgctacgagtagcagtgttaacaattcgtcatcgccatcacacaaatctcggagtgagaacgacgcttccaagaagcgcgagaagaaggatgagttgtcaccaaaatcggccagaagctcttcttcaaagccatcatcgtcggataaaaagaaactatcggccgatgctttatccccgaagagcagttctcctcttaagaagaagacttcatccctttcggaaaagtctccttctcggagcgagaaaacttctcccaaatcgcgagaaggtaaagtaagtaaaggaaacaaatcctctactcgacgtcctggagacattgcaaagaattccgaggattcctccgtttcaccatcgtccagcagcgaaaatctgatgcccgttgccaacgagtccaaggatgtggatctacgacttttgataccagagaaaaagcttaaactggagcagcagcaacccccgcagcatcctcaggcaaaattagttagcaaaccactaccagatcaaaagaaagccttgggagaagcagttgatgcagacaacgtaccttcagcactggcagccgtgtccagggacgtcgatcttcgcattccaccccccggtcttctgaaggatgtttccgacagcgttgtggtatcttcgacggcgggattgcccattgtggctccggttaccggcattgagtcggggccgagcatcgacagtatgccagcagtaacgacagctgccagagcaggttcaccatcggagacggcagtcaagaagcggccaagtaatcacaagctggaagaaccagtgaacaagaaacccaagtcggagaaaatcgatggattgttcggtagcgaagatgttgacctgaggaagttagcaggaccgatgcatcctatcgaacctcttccaccgccaccaccaatcatttcggaagcaacgcgaccgaccttacaggacacacctcaggttgaatctctggagaaacaacttggtgctccttcgtctaaagcagctcttgaagcggttcgagccaagatagccgaggccacgaagaacaaggatcgtgataagctgggacggcccttattgtacaataaactatcagatgatcctgttgaacggcgtcgctcgttaaatcagcccaaagcgatggacgtggatctgcgtcagcagcaaccccaattccctccagcggatccgtttggcgaagataactcccaggatggaatgaatgccaacatcaaaacgattgtcgcccaagcacaagagcagatggagaagggcgaaatcactccggagcagtacaacatactgatgaagcaagtaattcagctgaacgagacccaaaagattcggcaggctcaacgcatggaaatgatgaagcgacagcaaataatagggccaatgctgccggatgataatgccaattcgcacagcggcgaagaaatggcgagcttcagtcccaacattaacgacgacggtggggtgaagccgaatgttcccgcaattgctggtggtggtcctgttgtgagcaacgattttcgtggaaaaattaccccggtagatacgacgagctccaaggtagagccccagtttggtaacagtggtccgattggcgacatcaggataagagatccacgtcgtccgactgatgtccgattcaatccacagtggggcatccggggacctatgcctggtccaaatgccatgccaggagttgtgggtccaccaatgatgaaccaaagactgccggggcctatgttgaacccatgggatcagactccattcgcgaaaatgaatcaaaatgtggttccaccaccaccgatggcacctcgtttcccaccagttccattgaataatggaccccagtccaacatgctcatgcctggagtccccaagcagaatgaaagcgtgagaaccatcaatatcgatggtattcaaagggaaatccgtttctacgatgatatcgctgtaatttttatgagctgggacgaaccgaaagaaatcggtttccagaaaggctcccgaatggttgttgtcgatgatcgagattccttcgagcttagtttcaacgagtgctacaaagccatcaccattgagggcaaggtctaccaaatgaagttgggtgctcccaccagggaattgtacatagatgatcgatggtatgagtgctactttggggatccgccgacgaacatcgtattggatggaatcaatcgagtgttcaaaatcagtggcccggctccacaggtgaagatcggcaacagccgtaatgatctagtcgctggtaaaatcaatatgatcgttaatgcagagatcatcattccggtatttcttgactcccaaattcaaacctttgaaatatacggtcaaatgcacagactacagtttgctgatttcctactaacggtaataatcgatgatcagcccttcctcgtggaatacggtggtctgcctaaggtgttcaagcttagagggaaggatttctatatacggtttaccgctgtaccaaaagttgtcgttcccggacgcgtctacattagggatatgattcgaactccacttcatcgcgatctgcgaacacctccaagagaccaaaacctcctgatcccgttcgttcaaccaatgaacagtatgatgtcttcaatggctgcatcttctgctgtgccttcgttgttcccagcaggagctagtatgcaaccgaagcactccgctaccgttcatcccactgccactggtttggattacctcaccaatctgatgccgcattcgacgccgcactcaaacgtttcaaacaatttggccggttaccaaattcaagccgaagataaaccgctcgcaccacctgtagcagcagctccagcaaaacccgcctccggtgggttgaacttgccaattctccagaatctcaacatcgacgaactctacgccaagatcgttgctgccggtattattggcaaaactacaactaccactgctacgaccgctccgtccacctctaccagcaccacttcatcaactgcctctaaactggagaaagccctcgaagaagaaatcgaggacattgaaccggtatacctcaacaaaccagaaacgttgaaacggcgtcaatcagcaatcgttgcgcagctgttcctcggaatgcaatgcagcagttgcggcgttcgattcccaccggagcaaaccatgaagtacagccaacacttggactggcacttccggcagaatcgccgcgatcgggactcggctcggaaggctcactcgcgcaagtggtactacgacgtgtccgattggatccagtacgaggagatcgaggacctggaggaacgggaaaagaattggttcgaagcgcaacaaaccgaacagctggagttcaatggtgatggggaaacgggaagcggtcgacccggggcagaaacgcccccgccaagctgtccggctggttcggacgaagcgagcaaacggtgccacatgtgccatgacgaattccaacagttctacaacgaagaaacggaagagtggcacctgaagaatgcgatacgcgtcgaggaatgcacgtatcacccgctgtgctacgaagactacaaggcatcgctaacgttggacgaaacggccatgaatgcgaccaacgaggagggagacgaaagcaagactgatgacgacgtgaaggtgaagcaggaggcgatcagcgacgctgacgataccgtgaaggaaatcaccatcgatgacgatgacgacgtaattgttctgccaccatccgaagaagtcgtaacggaaattccggacgacgacgacatcgaaacggtggattcgcattcgacggcggacgatacccgaggagccacatcttccgtgactgcggtcgacgacgatagtagtaaaccgtcaaccgaggcagcccaaagctccgaaccgccggcaccgaagatcatcgaaacgcgaatcgatgacgacatcgccatccaagagcccaccatcgaacggatcgacgtgaacgatctggacgacagcgatgcccacatgagtgcggcggccccggcgataacggacgaatgttcccaaatgtcggtcaaggtgaaggaagaaccgaaagacgacgacgaggacgacgtggatgaagaggacgagctgttcgaggatgtaggaactatcgagtcctcgatggtggagaacgtaaaggaagcagacacggttgacctggaagcgatcgattcgccaccgtcgcctccactggagagcaccagtcaggcccagctgaagccctcgatcgatggcaacgtcgagatgcaggataacctcacgaccggtgtcatcacgaaccgaatcaaaatcaatatcacaaaggcaaagaccacaacggcggccacaaccggtagcaccactacgaacagcagctacagcacgaccggcggtggatcgagcattgccgtgctgatcagtggcggaggcggaagcggagcggtggccagttacgacaactgcaacgacgatctgctctacggtaatctcgatgacatccacggcggccaccacgacagcaacagcagcagtatgatggtaaagatgcatgaagatgaagaattagaacaagatgctaataataaaggaccggtcccgccgaccaatgaagaaacgactgatattgattatgacttgaagccgagtctgcggggcattatattcacccggcagcctcgcgtcgagaacgggttcgaaacgtccggtctctgttccattatgtaagaactttgaactcggtacttgagaaagtgtggcgaaaactaaaatgtgatattaggtcatttcccctaagaaaaaaggcatgcccaaggcaccaatcagcacgggttaatggctcattatgtgtagtaaaaagaaacaagctattagtcatctaagtcagtaaactaggaacgaattgaactggttctttttgtagaaagttcagagtactaccctgtcaaacacacaagaaagaaacggaaaaggggaatcacattttaccctacaatagaattcgctgtgagcacccatcatggcttcatagatttaagttttgtagttttgaagaaatatgagcggaaataaatggaatcatatccttctccccccatcaccgcccttcccaccggaagtctcacccgtcgaaacggcgcaatcaaactagacgagaaatttctccaacgaggaaagtgcaaagagaccatttgcaataaaaaagaaaaccatgaatttcacgtttgctttagtagtgtgtctttatctgtggttagcgaaagaaattttactgtagtttcctgcgttagagaaattgaataatccttgagggaagattttgtcatgcaacacgcttagtattactttttttttcattagaatcaaacttgagttttgtacatatttcctgtaggcaaataacaatgaattattatttctgttggagaaaaacatgatttgttttaattttcttcttagcgagtagaaaaagtgcaacatccacaaagtggtttgtggaacaggggcgacgctcatttaattggggataaatgaacgttagaatattacaaaataaatgaaaataaacaatgataattgctgttttttcttacatccaatataaacaaccaacgaaataaagtactatctgagaacaaaactataatcgtagaatgttatctgtttcgctgtctctatatgacatatgcattaagggcaaataaatcaaatacgataagaatggtttgtgtggtgttttaaagagttaacaataaatagtgggattgaaaaaa

SEQ ID NO: 327 - DNA, 1530 bp, Aedes aegypti
atgtacttttattctttcttcagattacgccgatcttcgcatgcgcctagtaccagtaaccaggagccgttgattgtggtggaagaatcagaaaactgcgagaaagaagaggaaataagtcacacctcgtcgccgcggcaaagtttagatatcgactcacccgaaaacccatatctcctctcgccatggcgtgatccccgtgaaacccgcaaacattccctgccaacaccgccatgcaccagcggtatcacggccagccaagtgcgacgcctctcggagcgtggtggagagggctccggtccatcgccccgcgaacaggcgttcctggccaccttgtacagttcacctgcaccgcaaccgggcggacggagacattctgtcgtcacaatcagcaaggtcccaccgacacttttcggccgcaaccgacgggagtcgattgctgcgcttcctgctggacagagatccgcagcaagttctcgtcgggaaagcaaaactggcccaccaccgtcaacagatcatagaggtagtatacacaatttacaattagatataatggatgatatagtacaagctagaaaggcgcgtatgaagttatggaatacgagcaatgagaaagtatgtgaagttcaaacactggatgaagctggtgctggttctagttcaccgatgcgttacacgaataggcgttattcggattttgtgggtacgacgttgccgccaattcagtcgttcagacgcgcgtccgaaatgcctatttcgccgtctgccccgctaacaccagcaacagcgtcatcatcgaaacaaattagcgcgtcaccaaaaaccaccatatcgggaatagtctgtacaaatactgacctaatatctcttctatcgtccctagcttcttcggcaactgaaataaatagatgtggtgataaagactatccaacccctcaaactcctcaatcatcatcatcatttaaatccatcactaaaatccctccagaagcaagcggtagcaatctaaagaaaaatcgatccaatagttttgacatttccctgtatcacaatatcaagcaattagcgactgggtcaagctcgagtgcaactgagcaggagaaatcttccgttgagccgggatggtttgccaaacgacatcaaccgatggcacggagaaaatccatgaaatctcctaacgctacagtatcattcgccaaggaagcaatagacaagctgcgtgacaaatcagactccaaaacaggggattcgacaaagccaaaggcgaaggagtcacggtcaccgctgagcaagttgaagtgggacggtagaagtgcgattgtggatgcgcgtatgattggacacgctatcgagaatttcatcacgggctctggctcttcaaagaaatcatccagttcgaaggattcctcggctaagtccaaaaaagcctcatcgtcgtccagctggtttggaaaggcagatgatgacgactctaacgatacttgtgactcatcgctgtgctcaacattaaaggatttgttcgtgaagtaa

SEQ ID NO: 328 - DNA, 2662 bp, Aedes aegypti
atttaacgcatttaacagttctgcttttagggcaagatcacagataatgcgagatttcccttttgttaataatacaactgaatcataaccgaaaatgattcaatctttctcactgtgcaacaaccaccatgccacagttgactgcctgttgcttcataactcttctttaccgattcacggctcgcacaagacgtgggctgacttcacgcttgtcacgcaacatcatcacatcacggttgtgtcacaccgtgcgtgggtggctttgtttttgttttgctctggtgttttgtttgcttacgactgacgcatcttcagtgcaacactgcaaagagaaccagtttgttttccgagcttgaccgtgtcagacagaagaaaaagtgcattcgccattctgttcaacttgggagaaagaacagttaacttttgttatttttgtaatagatgatatttatgcactttgttagtgatttagaagattggtaatttttgtccctgctagcgtatgatgaaactaatccgttccaagcgcagaagaaaacactctaattagtggccaaatctaattaggcgaaggagtgcgcttcctggtttggatcgatcgatttacagttagttaccaaacactgggagggaagtttcagcgatgttgagcgactactcgcttctttcgtccgatggggacgaatccagcagctacgcggaaaacactgaggacgacacggaggaggatgtgttcttccagctgagtggtgtcggagtggaagatagcgtgggaaatcgtgggaaactggttacgatcaatcagtacgcgcaggatgtggtggatttcagttcgcagtacgggagcgacacgagcatctcctacacggccttcaacgtgacggggaaaccttccaagtttccggactatggggactttccggaaacgtttgctttccgcacctacggtccttggtggaagttggccccatcggcgcagagagaattcagcccacagaatttcaccgaagcacccttggtggatgattacattctactgcgcttcgaagaggctgtctatccggaatcgatcaaagtcttcgagacgtacaacccgggaggaattgtccgcatctgggcctacaccgaggaatggatctgcttgtgggacatcagcgaagcggatgagagttgtacgttgatcgatcggaacaaagcgcgggtttttgctcctcggttgaggcactgctcggagccaactcgctacatccggctagagttcaatcatgctcatcttcagtactccacccagctggacgcggttcttctggtcggacagaagtttgtgccttgtggtgtccccagggggaaacatccgttgagtctgttgatcgagaagggtcccatccagaagaagctagagttggagaaatttcgtccggttgcaacggcgaatcgggaggagattctccaagagttcctacgaaatggattggatgagttcgtacaaggattaaaccaacggcaatcttccaacgaaggacaagatgaaagccttgcggagagtgatagtcgatgtgagacaccgaatgccgaaacgagttatacaattgccgaactgacgctagaacagctgccctatgaagtcctcttcaagataatgtcctttctggatctgaaatcgctgtaccgctgtgggcgagtttgtcgcactttcaatcagattgtggcggtgaactcgctgctctactcggaggtcaacctgaaaccatactggaattgcgtctcgacggcgctgctgaactcgctgaagaagaggtgttcctacactaagaagctggacctgtcgtggtgcggcacgttcaacaaactcaccgccaccgatttcaaagactttcttgccggttgcggcagcaacttaacccatctccggatggattcctgcaagttcctatccaccggtagctgcctcgagttgatcggctcgcactgcttcgaaaacctccgggaactgaccctccaaaactaccaccccgaagcggaagacttctccggtttgtactatttccgcaacctggaacgcctggacctgaaccgtaccaccatcaacactcaatccctcctaatagtcctcgcccggaacgaacacctgcgccacctgaatctggccttctgctccatggacgtcaacatggacgacatcgcgctgcagatctccaaatacaaccgcagcctgatctcgctggacatgtggaaatctcactcactgacctcgctcgggctggaagccctcagcaagtgcaccctgctggaagaggtcgacttcgggtggtgccttcgggaggaaccctccccgggtgaatccgtccgactgctggtcaaaagctgcccccgactgaggaaactcttcctggcggcgatccgaggtctaaccgaccgggacctggaggtgatcgcctccaacggggagaatctcgaacagctggacctgatgggcatcatgggcatttcgacggagatgtgctaccggattctgtgtcgctgccggaagttgaaactgctggatttgagcttctgtgataatttggacaacttgcagattgcgctgtggagggactgcttcgacgtggccatcaagcgcagctttgtggactttggggcgccacgtggggcggagttctga

SEQ ID NO: 329 - DNA, 2045 bp, Aedes aegypti
atcaatcagtacgcgcaggatgtggtggatttcagttcgcagtacgggagcgacacgagcatctcctacacggccttcaacgtgacggggaaaccttccaagtatcctgactatggggactttccggaaacgtttgctttccgtacttacggtccttggtggaagctggcgccatcggcacagcgagaattcagtcctcagaacttcaccgaagcgccctttgtggatgactacattctcctgcgcttcgaagaggccgtctatccggaatcgatcaaagtcttcgagacgtacaacccgggaggaattgtccgcatttgggcctacaccgaggaatggatctgcctgtgggacatcagcgaagcggacgagagttgcacgctgatcgatcggaacaaggctcgggtttttgctcctccgttaagcattgctccgtgccaactcgctacatccgtactccacccagctggacgcggttcttctggtcggacagaagtttgtgccttgtggtgtccccagggggaaacatccgttgagtctgttgatcgagaagggtcccatccagaagaagctagagttggagaaatttcgtccggttgcaacggcgaatcgggaggagattctccaagattcgtacaaggattaaaccaacggcaatcttccaacgaaggacaagatgaaagccttgcggagagtgatagtcgatgtgagacaccgaatgccgaaacgagttatacaattgccgaactgacgctagaacagctgccctatgaagtcctcttcaagataatgtcctttctggatctgaaatcgctgtaccgctgtgggcgagtttgtcgcacttttaatcagattgtggcggtgaactcgctgctctactcggaggtcaacctgaaaccatactggaattgcgtctcgacggcgctgctgaactcgctgaagaagaggtgtgcctacactaagaagctggacctgtcgtggtgcggcacgttcaacaaactcaccgccaccgatttcaaagacttccttgccgtttgcggcagcaacctaacccacctccggatggattcctgcaagttcctatccaccggtagctgcctcgagtcgatcggttcgcactgcttcgaaaacctccgggaactgaccctccaaaactaccaccccgaggcggaagacttctccggtctgtactacttccgcaacctggaacgcctggacctgaaccgtaccaccatcaacactcaatccctcctaatagtcctcgcccgaaacgaacacctgcgccacctgaatctggccttctgctccatggacgtgaacatggacgacatcgcgctgcagatctccaaatacaaccgcagcctgatctcgctggacatgtggaaatctcactcgctgacctcgctcggactggaagccctcagcaagtgcaccctgctggaagaggtcgacttcgggtggtgccttcgggaggaaccctccccgggcgaatccgtccgactgctggtcaaaagctgcccccgactgaggaaactcttcctggcggcgatccgtggcctaacggatcgggacctggaggtgatcgcctccaacggagagaatctcgaacagctggacctgatgggcatcatgggcatttcgacggagatgtgctaccggattctgtgccgctgccggaagttgaaactgctggatttgagcttctgtgataatttggacaacttgcagattgcgctgtggagggactgcttcgacgtggccatcaagcgcagctttgtggactttgggccgacgcgcggagcggagttttgaaggttggagacaagaagagaggcggttcaagcattccttagttttcgtttcattctgtgttctgtaaaaagatttttgttttacgatcttaaaattgttgtgatcccttaggaatgaaatattttaggagcacgatacgattagtaggtattttatcaatatttatgtgactgaattgtgtcgatggcgaatagatttggccaaaagagaggtttattaaacagatatcaaat

SEQ ID NO: 330 - DNA, 1689 bp, Anopheles gambiae
tcgttcttccggctgcgtcggtcgtcccacacgcccgcgtacagccagggcggccaggagccgctgatcgtggtcgaggagtcggaaaacaatgagaaggaggaggaggcaagcaatcagtcgtcccagcgccaaagcctggacatcgagtcgccggagaatccgtacttgctgtcgccctggcgcgaaacgcgcaaacactcgctgccgaccccgccctgcaccagcggcatcaccgccagccaggtgcgccgcctgtccgagcggggcggcgaagggtcgggcccgtcgccccgcgagcaagccttcctggcgacgctctacagcacgccggccccgcagccgggcggccggcgccactcggtcgtgacgatcagccgcgtgccgcccaccatgtttggccggaaccgccgggagtcgattgctgcgctaccggccggccagcgctcgaacgcaagctcccgacgcgaaagcaatatcggaccgccgccatcgacggaccaccgaggtagtatacacaatttacagttagatataatggatgatatagtacaggctagaaaagcgcgcatgaagctgtggaacacgagcaacgagcgtgtgtgcgaggtgcagacgctggacgaggccggcaccggttccagctcgccgatgcgctacaccaaccggcgctactcggactttgtcggtaccgccctgcccccgatacagtcgttccggcgcgcctccgagatgccgatatcgccgtgcggcgccccgctcgtgccgggcagctcgttcaacgcgtcggccgccaccgccaccggtgccgcagccgccacagccgccgcagctgccgccgccgccgctgccgccgcctccccgggcaccgacgccgcgtccccgaagccgaaaacgaagatgggtatcgtgtgcaccaacactgatctgatatctctcttatcgtctctagcctcgtctgcgacagagattaatcgatgtggcgagaaagagcaccctagccccctagcctcccacgcgtttccgctccggtcggcggccaggagcccgacggcgggcccgtccggtgcagccggcgccgccgccgacccgcccaagagcaatctgcagaagaatcgctccaacagttttgacatttcgctctaccagaatatcaagcagctggcgaccgggggcggcagcggtggcggcgggtcggccggtccgcccgacggcttcgtcgagtcgggctggttcgtcaagcgccaccagccgatggcgcgccgcaagtccgcgtcccggtcgccgagcgcgaccgtcacgttcgcgcgcgaaacgttcgacaagctgcgggaggccggaactgggcccgcccacaaggaggaaccgaagccgaagccgaaggagtcccgctcgccgctgaacaagctcaagtgggacggccggagcgcgatcgtggacgcgcgcatgatcgggcacgcgatcgagaacttcatcaccggctcgtcctcgtcgtccccgtccgcgtcgtcgtcgtcgtccggtggcaagaagtcgtccgccgggggcaaggagggcggggccggccggtccggcgcgaagaagtcggtcacctccagctggttcggcaaggcggacgaggacgaggactcgaacgacacgtgcgactcgtcgctctgctccacgctgaaggatctgttcgtgaagtaa

SEQ ID NO: 331 - DNA, 1689 bp, Anopheles gambiae; identical to SEQ ID NO: 330

SEQ ID NO: 332 - DNA, 1689 bp, Anopheles gambiae; identical to SEQ ID NO: 330

SEQ ID NO: 333 - DNA, 1974 bp, Anopheles gambiae
atgcgacagcgacatcgaacgaagcaggccagtggcagtagcttacgacttcccggccaccggtggcttggtgctttgttttctgttttgtgtgtgaccgcaaaaggaaggacaatcgaacgtgtcgcgcacgtcgcttcccttgccccactttccgcctagcgatgcctactaccgccagccagtggccggacgctgagcactgtggcaaagtgtgcgcgaacctccctcgctggtagctgctgaaggatgagccgagagcggccgttgctcaccccggtctgctatgtcggcgagcggaagcagttcgtggagtccatcctgatggccagcaacgagtacgggccgaacctttcctacagctcgatcaatctgattggccggccgtccaacttcccgatctacggcgaccatacggactcgtacctgttgtcctcgtacggcaagtggccccggctggcaccgtcgtaccggcccgagttcgggctggcgaggatagcgccgtgcgacaatccgccggtggacgagttcttcgtcgtcagcttcgagcaggccgtctatccggccgagatcggcgtgtacgaaacgctgcatccgggcacgatccgccgcatcagctgctacgtgctgaaggtcggctgggtctgtctctgggacggccgctccgacaagtgggagtacgtagcgggcgacaggagcgctagccccgcgcgcctgttcgtgccgaccctgcgcaccgtcccgcaccggacacgcgtgctgcgtttcgagctaaacatgcgcgaccaacggtacatcagcgggctggacggcatcatactcgtgggcggcgtgcacgacttccacgaagcgcgcgcgaagtttcaagcagtagcatcggctgccgcatctccaacaccaccaccggtggaggcgacggcagcattggaattgataggcaaggcggcgggaggcaccaaccagccaaaccttaccgatatgccgtacgaggtactgtatcacatcctctcccatctcgactggttcgcgctcgccgacgtggagaaggtgtgcgtccggtgcgccgaggtggtggccgacgcccgcctctaccgggaggtgaacctgcgcccgtactgggaccgggtggattcgcactttctgctgtggctgagcaaccgttgcaccggcatcaagaagctggacctgtccgggtgcggcatcgtcaacgagttcaacataatcgacctgcagatgtttttcaaccgccacgggcgcacgctcacgcacctgcgccttaactgcatcggcgtgcagcacgccatgtcgttcgtgctgctgctgtgtcccgagctgaccgagctgtgcatgcagaacgcgttgctggacaaccagcgctaccagctgtccgtctgcaagcggctgaccgtgctcgatctgagccgggcgcagtgtgcgtccgaaacgctgctggccctgctgcagcaaaacccgcacctgcagcacctgagcctggcgagctgcgaccagtcgagcctgaccgacatcacgcacacgatcggcgagcacaaccgcgccctgctcagcctgaagctgtggaagacgcacgcgctcggggcgcacgggctggtgccgctgcagcactgcaccaagctgcaggagctcgatctcggctacagcaaccacgaggaatgtgccgagggtacgctcgcccagctggcggcggcctgtcccgacctgcgctggctcgtgctcggcgggttccgcggcatcaccaacaacgatctgctggcgatcgcgcgccactgcccccggctgcagtacctggacctgatgtgctccgtgatgctgtccggcgaggcgatcaacgcgatcttcatcggctgcccggcgctccgcctgctcgagctgagctactgcaacggcatcgagcaggagtggatcaacatgtggcgccgcgacttcccgcacgtcgacgtgaagcaccaacgctga

SEQ ID NO: 334 - DNA, 1974 bp, Anopheles gambiae; identical to SEQ ID NO: 333

SEQ ID NO: 335 - DNA, 1974 bp, Anopheles gambiae; identical to SEQ ID NO: 333

SEQ ID NO: 336 - DNA, 2698 bp, Anopheles gambiae
acgacaaacgcgcaacaaactcattaacgatcgatagaatcatttgatttgtttatgttaatatttgtgcgaccactgaagcgtttggctaaaccttcgtctcctaccacacatcgaagtcgtcgcgccccgttcggaatcggaaacatcgcaaaaggcagccgaacacgacgggtttgtgagtgagtgtttgattgctcgtcaccgccgagggcgcaaccgatgtgtttacggacagtttatgtcaaactttttggttaacgtgtactgcagcagcgtgcgtgtctgattaacacacacacaaaaaccaacaaaaccaaaaaaaggagtcaagttgcatacataaacactctgcggcagtgagtgacatcggaagcctcgattagatttgcctggccccggttgagcggcgtttaaagtacgatgcgaaatattagccgctcgtttgcctcactaaaccaaactactagcgagcagcagtggtgttaggattcctccgcggtgggttacctttgcaatcctgcactgcgtgtgtgtgtgtctgtgagtgtgtgaaatccgcgtgtgttacgtatgagctatttaaacatgtcaagcgcagcccaggactgtttaccgccgcgcggcaacaatggcgagatgaagctgatcaaacaggaaccgcaacaatcaatcaatcagagcgacgcgggcagcggcggcgatgccgccggtagtgccggtgccgccgcccagcatttggtgggcagctccccctcctccacctatcaaaaatcgtcagcagccacctcaagcaacagccacccggctactacaccgctccgctcaaggcgcacgtcggcgtcctcgcccgtgtcctcgccatcgcccacgctgtcgaccgcgtcggcgaagctgagcaatggcgccggcaaggtggcggcttccactgcggcgaccggtgcgaccggcagcagcggcccctcctcccgcgtggctgcccttccggcggccgcgccagcaccggcagcaccgttgcaggcagccggcagcggcgcgggcgagccgagcgtgatgggcctgtccggcccgaacacggccaactatcacaacttcatcgggcggctgatcagcaaagacaacatgctgctcatcagcgaggacgtgatcgaggtcggccgcaactcgtccaaatcgcaggtggacttccacgtcggcaagaacagcttcatctcccgcaagcacttcatcatccagcacgacatgaacgacgagttcacgctgttctgtctcagcaaaaacggcgtgttcatcgataacgtgtttcaccggaaaagcggcgaaccgtacaagctaccaaaactatgcagcatccgtttccctagtacaaacatcaagatccagtttgaaaatttgatcgaccaggccaacaacggtatactggtggacctgaacgagcacacgccggtcaagatcggtaccggtccggtcggtggcatcccgctgcacgctggctccatcagcggtgcatcgatgagcggcggcatgtcgcagggcggcggcggcgtcggcggcgccagtggcaacagtagcggcggcgtcgggctagctggcagcggccagcagcaccactatcaccacaaccgtggtggaaagtcgccctcctccagtgtgatttacgcaccgctcaaaatttcaattccctccgagcacggtggtgcggtcggcacggtcggtctgctcggcgatgtatctcgcggctccgtacggggcggcggtggcggtggtggtggagctggcagtgggggaggcggcggcagttgtcggggcggtgagctgcacggcatgggcggcagcggatacccgtcccctaccgggacgatcagtgctgcgaacagttgccccaccagcccacggcagaacgtgcacgagtttgcccagtacagcagcagcaatcaccatcatcagcacaccccggccagcgtaaccggcaccaccaacaacaacaataacaactattccgaatttcaagccccggccacacaatcactggagagcgataagccaccgtacagctacgcgcagctgatcgtacaagctatctcggcctcgccggagaagcagctgactctctcggggatctattccttcatctcgaagaactatccctactaccggaccggagcaaacaaagggtggcagaactctattcggcacaatttgagcttgaaccgatacttcatcaaggtaccgcgatcgcaagacgaacctggcaagggtagcttctggcggatagatccgtccagcgagctgaagctgatcgatcaaagctaccggaagcgacgccagcgtggttcgcaatgctttcgctcgccgttcggcatgccgcgctcggcgccggtctcgcccagctacactgacaattcgcgtgagtgttcgcctatgaacgaggagctgctgatgtcggctcccggctcgcccggaccaaataacagcggctactctgccaacaaccacgacggctctcagcagtcttcgtaccagaaccagtacaccgcgtacgcgagtgcggaacaccagcaggccgaagtgtacgaggaggacgagcagctcgaatacgaaagcgacgactacgagccgggcaacaagcgccaaaagatgtaacttgctctggtatcctccgcccgcacgcaagggctctctgtgtggatacgttggt

SEQ ID NO: 337 - DNA, 2698 bp, Anopheles gambiae; identical to SEQ ID NO: 336

SEQ ID NO: 338 - DNA, 2698 bp, Anopheles gambiae; identical to SEQ ID NO: 336

SEQ ID NO: 339 - DNA, 986 bp, Anopheles gambiae
tttcggcacattcgtggtgataactggaaaacgtgttgtacagtgaaaggtcgaggagcaagccacccgtggtgtgttcggttcagtggttgatttcgtgtgaagcaagagaggaaagaagtgaataaaaaatgtcttttgcactgttgcgaagccacggccgtccggcgttggcagtgatcgagcggcaagttcgggcactgtcttccaccctggccattaccgacatttcggcaacatcatcatcgtcagcagcggtgaagccgacaaccggtgaaaacaaccgaaactacctgaagaacaataagccgtccttcgtctctacatcggtccgcaagtattcgaagaaaacggccgccccagaacgtgcctacaacagtgactcggactcggactcggatgatgagcgtgataatactccgcgccagcgtcagcgcaaggaacggggcaactccgagttctggcgacgcaagatgcgcaccctgcacggtgtgctggacgtcaacaaggacggtgtcatctcgtacgacgattttatgctgctgacggaaaagtttgcctccctgggccatctcgatgcgaaggcaaagaacgagttccgcgacattatgagaaccacctgggagcaacaatggggtgaaattacgccctacaatctagtcacggtggaacagtacctaaccgagatgcaccatgtggtgaatgataaggatctcaagaagaaggtgcatcgctttttgccctacctgtacaaggccgtcgacaaggatcgctcgggatcgatctcgctgaacgagttcaaactattcttccgctgtctggggctgacggaagagaatgcagccgtttcgtttgcggtgatcgacaaaaacggcgacggccaaatcacgctggacgagttcgttaagctgggtaaagactttttcgtcagcgagaaggaaacgcacgtgtcccggatgttctggggcccgctggtcgatcactga

SEQ ID NO: 340 - DNA, 986 bp, Anopheles gambiae; identical to SEQ ID NO: 339

SEQ ID NO: 341 - DNA, 986 bp, Anopheles gambiae; identical to SEQ ID NO: 339

SEQ ID NO: 342 - DNA, 2595 bp, Anopheles gambiae
atggtttcgaaaaccgatagcttcgggttcaacgagacgaagatgtttcaagtggcccgtgactgttcgccggatgaccataaacatacgcagaatctggtggaatcgaaggatgatatgctgtacgtttggaatgcgaagaactgttgcatcctggtgctgaactggcgagccgccgcatcccgcaagcaggacgaattgaaacatcagacgctgattccatcggcaccgcaaaacttcacggtggaaaagatacttccgtccacggacgggacctttctagcgctggccggtccgaagggtgtctccatcatcgaattgccccggcgctggggccccagcggtcagtaccagaacgggaaggagtgcatcatctgtcgtgcctacaacctcgacgagcatctatttaccgaaagtgcaacgctcgagcttctgcagatccgctggcatccggcatctccgacggattcacacttgctcgctctcctgtcggacaattcgataagggtgtacgatgtggactcgctgcggcatgtatggcgcattggaccgacaccaacaccgcaacccgtcgtcatcggtagtggcagcggcgttggaggcggcagtaaacacggttcttcggccagttttgtcggatcgccggggacggctgtcgcctcgccgggagtcacttcgaagcttgcctatcttaacagtctgggcgatacggctgttgattttgacatcgcaccgccacgtgtggtttcttccgccaccggtggaagtggctccgtcggcgccgatacaacgttctcaccgacgacgaccctgtcaacgacgtcgtcaacggtcaccgcaacgaagccggccattgctccaaaggaaggcaccctcatgaatgactcggtaatcgcgcagaagaataaaaaggcaccaccgactgccggtgccggtgggaccaaagtggagtggccaatagtgattctgcggggcgatggcaatgtctatgtactttgcgccggcatcgacaccaatcgacccaagctgcagggaccgatttcgattcagccgcaggtggacgataactatgggctggattcgtgttcgctcatcgtcatcccgacgctgcccccgacagtcatcattgccgagagcacgggcaaaacgcatcatgcacttttcctcgaggagtcctgtcccctggagcgatccctcacgtccgagcagctggcagacagcaatcttaccctgcacccgtgcgagtggtacctgcacgtgctggaaacggtcgagctggagctggggctgccgagcgtggaggaaacgaaggaggccaagtcctactcctgtccgctgcatctcaagcgcgacccgctaaatgaggcacgctactttgcctaccacaatgccggtctgcacgccgtcacactggatttcactcgtccgctgcacgagttcgtccagcaggaagggacggacgagctggtggagaagtatcccctcttcaactcacacagccgggcggaatacgtcgtttgcacgaaggcactgcaaaacgccaacaccaacgcagtgctcggctttacgctgctccagtccccttccgggttggttttgttcctcgcttccgggcaggtggtatcgctggatctgattaccgatcacagtttgattcgaaagtggcccctgtcgggctcgaccaaaaaggccggcaattccgaatcgcccatcaaaaacgtacgtattgtgcacacattatggaagcggttaggcacctcttttcagacgagtttgtgtaagattccgtctcgtctctgcctcgttcctttacagatgctgaaagactcattccagaagcgcattcaatcgatactgcggtcgggcctcacccaaccgatcctgaagctggaccaaaccactgaaccgacaccgcaggaagcgttcgaactgctgacccaagcgacacggatgctccgggagaactatttcgtacggcatgacaaggcccgccaggagattgagaagcgtgagcacgtgctaaagctgctcaaacagcagcagctcaacgacatcgaggaactgcaggcggagaagcaaaaaattcgcgccaccgccgaacgtctcgccgaaacctatgaagatttgtgcgacaagcaaaactccctcttcaagcgagctcaagaggtggtgcgtcttgcaacgttgcgactaccaaagggatcgttctctgagaagcagtttaccgaaaggatcgaaaagatccaccaatcggtaaagatgctgcagaaaaacgttgaccaagccaaacagaagatcaccacgcagcagatggagctggaaatgaagaagaaaactgccaaggagaaaacgttcactctgcccgtcaagcaggaggacatcatcaagcagatcattggagaaatgtacacacagatcgattcgaacgtgaaggacgtcaaaaagatgaacaacattcttaatctcacctgagctgattgtacatttgttttacttttcttacgtttaatgcttttcctgttttatctatgaattattcatttccgtacgaataaagcgcgattcatgtttcgcaaccgaacttttcaccacatt

SEQ ID NO: 343 - DNA, 2595 bp, Anopheles gambiae; identical to SEQ ID NO: 342

SEQ ID NO: 344 - DNA, 2595 bp, Anopheles gambiae; identical to SEQ ID NO: 342

SEQ ID NO: 345 - DNA, 6132 bp, Anopheles gambiae
atggaccaggcggcggcgaatgccgagggccgggcgaagcagatcgagaaagaatacctgtccagtctggccgacctgaacgtcaacagcaaaccgctgataaacatgctgacgatactggccgaggaaaacctcgagtatgcccaaatcatcgtgcacgcggtggaaaagcacctggcaaaggttgcaccagatgtaaaactgccaatactttacctcgttgattcaattgttaagaatgtgggcaaacagtatcagacgctcttcagtcaggtcatagtgaatatgttctgcggagtgtttcaaacggtcaatgaaaagattcgtgagaaaatgtttagcttgcgacagacgtggaacgatgtgtttcaacagtccaagctgtacacgctggatgtaaagatcaactcgatcgatccaggatggccaatcactgcacaattgaaatcaaaaacaccaaccgcaattcacgtcaatcctatgtttctcaaagcaaatggacctgagcctacgatcgcgatgcagcaacaattgagggataagcagcgtgagctgctcgagctgcaggcgcgaaagctggagctggagcttctcaccaccaagaagcggatcatggaacaggagaaacagttgagcatccaaacggagagtgtagcaaaagagccttcgctggaactggtcaaatcgttagatggagcgggaggtcatctaccagttattcccaccattccacccccgggcgtgatgccgaagagccgtattgctcccgttaccatgggcatggtaaacatggtcaagacgcgcgatcctcggttggcgaagcaacaggccgccgctcagctgggaggacctccgtcaaccgtgacagccggcatgaataatcacaacgcggcgctgggtgcaatggcgattcctccgcccgctatggcttctggcttgatggaagcttcacatcacggtgcgacctcggcgaaacaatcttccgctcttgcacgggacaatttcggtgcaaaaaatcgccggcccgaggctagtggtgtagaaagcaccagatcggaatcgtctacgcaaggtgaaggaggtagcagcagcagtgcacgtggcaagaaacatacgccatcttccacagccagcattagttctgcttcttcgcacagatcgcggcacgataacgatgcaaaggtgcgaaaggaccgcaaagaacactcttcatcctcatcgtctacaagcagtagtagatcgtcgaccaaaggcggtagcaagacgggctcttccgcacggtccggcagcaacagcgggtccgacaagcggaaacaacgcacccaaagtaacagcgacggtgggtcgccccatggtcgcaaatcacctcactcgcctggaaagaagaaatcttcatcttcggagaaatcttcatcctctggtcattcgcaaaacgacaacagcccaaaagcagccgggaagtcgcgatcggaaagcaaaagctcttcggaattgcatgccctcagtggcaaacaaccatcggctcaactagcgcgaaacaacaatgtcgaaagcaaaaagcatcagcatcctgccggcgaggcagcagccttcgaggaccgggacgttgacttgcgctacggcgttcctcagaaacggatcaagatcgatgagccggtggccgacggtctttcggtggcgaaggaggcagacgaaatggttgtgacgatggtggggcaaaaatcgtcggaagtacaaagtaagagcgacattcatattttcctattatttagcagcaccccaaccggtatgagtgtgttgatgttcgataaactatacagctcgttgcaaacggtagttgctctgttcgggaataatagtgcaacagacgacgaagaagctctttcggccatgattgctaaagatatcgatttacgagcaattcctctgcagttgctaacgccaaaactagtgccggagctggagagttctctaggcggaagcaagggcgacgcgtccggttcgagatcgtcgaagatggaatctccgtccaagcggtctgcagaactggatgatggagatgaattctcaagcggaaagaagcgaagcagtcccatcaactcggacgaaccgaacgctaagaagagcaaggcagaaatgatagatgcattgttcggcaatgaagatgtcgatcttcgacagttgccgatcggaggcactctattgatgggtgatgacgcacgagatgtagattttccaaaggacaagcttggcagacctctgttgtacaataaattgccaggtatgtatcaccgtcttcgacgacgatccatcgtctcccttaccaaaccaggggacatcgatcatcggtttccgcagcagagccttcatcatcacgacgcggcagatgaggacgataattcgatggacagtatgaacgccaacattaaaaccatcatcgcgcaggctcaggatcagatggaaaagggcgaaattacacccgagcagtataacatcctgatgaagcaggtgattcagctgaacgagacgcaaaagattcgtcaggcgcagcgcatcgagcacgtgaagcggcaggatcagtcggtgattcggatcgacgataatgggtcgatgagcggcgaagacgatgtgatcgtaacgtccgtgaccccggcgacgcccggcctgtcggcgatgcggctaaacgatccgaaggatagcagctccggcatcgtaaatgatttccgaggtaaaatacatccgattgacggaaagcctccactagtcaagcccttcgaaggagcgccgttcgccgatccacgaagaatacgtgaatcgaaatggaatcgggtagagcctggtccaggccctgcttgggcgaaccgtcccgttggtccgatcgttggtggaccgatggtggtggcacctccgttaggcggtggaattcgccccggactggcggtaccaagcccgtgggagcaggcaccgttcccagtaatggcggacggtatgtcccgattcccggccccacctggtccactgccgctgggcgtgctcggaggcttggctcccaacatgctgaatccggccctgcccaagctgaacgacagcgtgcgtacgatcaatatcgatggcatccagcgggagattcggttctacgaggaaatagccgtcatcttcatgaactgggacgagccgaaggagatcggattccagaagggtgcgcgcatggtggtggtcgatgatagggaaacgttcgagctgggttttaacgagccctacaaatcggtcagcattgagaataaagtctatcagatgcgtttgggggcgccgacgagggagctttacatcgatgactcctggtatgagtgctacttcggcgaccagcccacgacgatcatgctggacggcaagccgagagtgttcaaaatcgcgggcccggcgccgcaggtgaagatcggcgacagtcgcaaggatcttgtcgccggcaaaattaacatgatcgtcgacgcgaagtacatgataccggtgtttctcgactgcaaaccgcaagtgttcgaggtgtacggcgtgatgcatcggctacagtttgcggactttctgctgacggtgctgatcgacgagcagcccttcccggtcgactacggcgggctgccgatggtggtgcgatcgcgtgaccgcgattactacatccggttcaccgcgctgccgaacctggtggtgccggggcgggtctacatccgtgacatgatacgcacgcccctgtaccgggacctgcgcactccgccgaaagatcctagcgcgctcgagccaccggtgccacttaatccacctttcgctcctcccaccactgcaccgcccgcactgcccggagcggccggtttgggtttcggcggaatcaatacgctgccgccgggcgcaatcggccctcagcatccgggactggcgggcgcgaacgcaacctccaccgggctcgattacctcaccaatctgatgccctcgatggccatgcaaacgggggcggcggcgggcaaaaatggtcccggctataggatagaagcggacgagaaggcagccgccgctgcaggagtgggagcttcggccgcggccggctctgcgccgggctctgcgcaacagccaaacgcatccgccgccgtcggaggactgctggcgaacatcaatgtggaagaattgtacaaaaagatagttgccgccggcattatcacgaagctcggggcgggcacatcatcctcgccgacaccgccacaggctgcgggtggtgaggcgggtgccggtacgtccgctggcggcaaggacgggaaagaggacgctagcaaatccaaagacaaggataaagcacccattccagagattgagccagtgctgctggacaagccagaaacaatcaagaagcgccaagcggccgtcgtacaccagctgttctcgggcatgcagtgcagcagttgcggcgtacgcttcccgcccgagcagacgatgaagtacagccagcatctcgactggcacttccggcagaatcggcgcgatcgagactcggcccggaaggcgcactcacgcaagtggtactacgacgtgtcggactggatccagtacgaggagatcgaggacctggaggagcgcgagaagaactggttcgagacgcagcagaccgaccagggcgagcttaagaagggcggcgccggcggcggaatgggcctgggcggcaacgacggggatgacttttcgtcgcacgacgatgcgccgcagccgagctgcccggccggactggacgagagcgaccggcagtgccacatgtgccatgatgtgttcgaacacttctacaacgaggaaacggaggagtggcatctgcgcaacgcgatcctggtcgatggcagcacgtaccatccgctgtgctacgaggactacaaggcgtcgctgacgatgaccgaaacgacgctgggcaatgggacgctcggtgcgtcgttggatgagagccagaagactgatgaagccatggacacgagcggcgcggctggcgaggctggcgaggatggcgaagccgctgatggggcaggaaaagacaaatcaaaagctagcaaaaaggataatggaatggaggacgatgacgatgacgacgatgtgatcgtgttacctgccgtggagcccgtcgtggaggaaatcctcgacgatgatgagcaagcggctgaaaagaaggaaggcgatgcggaggcggccgagcaatcgtccacggtggacgaagcaaagagcgtcgccggaagtgcaaaatcgccgcggcccgagttccaggagcgtcaaatcgacgaggacctgttcatacaggagcccaacattgaggtgacggatctggacacgatcgaggacaaaccgccgggtgagtcgggcgaaggggcgtccaatggcggccaggatccgagcacgctgtcgtcgttgctgcgcgttaagatcaagcaggaaccgaaggaggaggacgatgccgacgaggaggatgcactattcgaggaggtcggcacgatcgagtccagcctggtcgaagtggcggaacgttctccggccgccaacaatgctgctgaagaggagccgtacgaagacgttatcgctgaaagcattccatcaccatcagaatcgtccaaccagatgggcattgtggcgcaaccaaaggcaacgatcgatggcaacgtcgatctgcaggatgcgccacagtcggccacggttgtgccgaacaagatcaaaatcaacatcacgaagggtaaggcccagcagcagcagcagcaggtggcagcggcatcgtccaacaacgacggtgagcctggcgatggtggaagcaacggtgtaaatacgaataattttaatgaagatagccaaggggtcgaagacgaggcgagcaatgacggtggtggcgctggcggcagtttggaagagcgggacgagaagaacggtgccgaacagtccaataataaagaatcgtcgaccgtggcgacgctgccgttggcggccgatgctgtcgctgaggtcgcgttcgaagaaaccactgatgttgcgtatgagctgaaggaaggcctactgggcatcgagttgaacaggcagccacgggtaacgagcggactcgaagcgtccgggctctgctcgatcatgtaa

SEQ ID NO: 346 - DNA, 6132 bp, Anopheles gambiae; identical to SEQ ID NO: 345

SEQ ID NO: 347 - DNA, 6132 bp, Anopheles gambiae; identical to SEQ ID NO: 345

SEQ ID NO: 348 - DNA, 501 bp, Anopheles gambiae
atgatggccgattttgacgcaatctacgaggagcaggagctgtccgaggaaaacctggaagaggcgcacgtgcagatggttccggatccgattgtaatccgtggggctggcaatatgacagtgtttggcttaagcaatcgattcaacgtgcagtttccagccggtctggtttcgcgcgttgccccggaagagttcaaagcgaccgtgctgcggatcaacgcggtgctgaaaaagacgctccccgtcaacgtaaagtggctgttctgtggttgcgtttgctgctgctgcaccttaggatgttctctatggcctgtgatatgtttaagtaagaggacgcagcacacgctaaacaaactgctcgagtgggaaaacagccacctttaccacaagctcggattgcactggcgcctcagcaaacagcagtgcgactccaactcgatgatggagtacgtgctgttaatagaattcataccgaaaacgccaatctatcggccggactag

SEQ ID NO: 349 - DNA, 501 bp, Anopheles gambiae; identical to SEQ ID NO: 348

SEQ ID NO: 350 - DNA, 501 bp, Anopheles gambiae; identical to SEQ ID NO: 348

SEQ ID NO: 351 - DNA, 3074 bp, Anopheles gambiae
atggttgacacacaaccgtacataatccgcgtcatggaggagatgggtttggccgagggtggcttcataccgattgcaaatgaggagaacaagcagctgctcgagcagatcaatcgtctgtccgcgggcaggacggactcagcgggcaaggtgcagattagtgaccagcggttgggcaatctgaaggtgcatctgaagaatgcccagctggagtttgagcaaaactccaagctgatcggtgtggacaaagggcaaatcacgaccgagcacggactgctgaaggtgtcgcaaaacgatcgctccttttaccgccagcaactgtccgatgcgaagaaagagcactcggagttggagaagcacgatgagcgagctcagggagacatgaaaaaattgaccggcaatgttgagaagtacaccgagcgcataaagtgggcaaaaggagcattggccgaatggaagcaggtgatgggcgatggcgataaaacgaacaagctgatcctgaagtactgcaagcaagatgccagcaaggccgaatcgctggaagcgaaaagaaagcagctggaaaacaaaattgccacccggcgggccgtgctggtgacgctgtacgaggagtacaaatccttggagcaggttctcgagcgaacgtcgcagcttttccgtcaggcgcactacgagcgccgccacatggtgcagacgtggaaggaggcggtgaagcatatgaaccaacgcgagggtgccatcaaatcggtggaggccgacatcgacagcgcccacgaggtgacggagatgctgcagggcgatctgcaggcgcaggtcgagtttctcgagcagcagcaacgcaacaaccaggagattgagctccgcattgccgatcttaatgtggaggtgtcgaagctgaggaacagactgacggcgctgaacgacagtgtgcagctgaagacgaacgagtatcaaataacgcgcaaagcggtgcagaacctctcgaacaagctggccacgatgcggagccggaactgccactcgctagtcgagggcaacgagaaggagcaacagatccactctaatctcagcgagctcgagctgctgcgcgacaagcttgataacttccgcagcaagagcctgtgcgcacaggaccggctgcggcagttgaacgaaattgtggagtcggaagaaaagcagatccgcgcgatggagaacgaaacggagcgtctgtccaccgcactgttccgcgcccagcagcagctgttcgcaatgcgggaggaggacaagctgctcaaggtggaggtacactcgaccgagtcggggatggccaaaatccaggctgcacttaaaaacatgaagaaggaaattgtccgccaactggagatatcgtacaccgtagactacaacatggagaaggtgcaggaaaggattgccaacatgaagggcgccggcaatacccaggaggaggccaatcgagcccatgccaagctgacgcacgctcaaaacattctgatgatgaagcggcagaatctggaggtgctgctggcgcaaacggttaagatccagcaggactaccggcagtcgagcctggtctttcagcaggacgcagccgagatcgaacggatgacgggcaagtggaaggaaaagacactgttggtggagggtggcgagaagaaggtacgccagtgcaaggccgaaaatcaggagcggctggtggagaagagcttgctcaagatgcgcatcaagcagatggagcgtcagctcgactgccagagcgacaagatgtatacgctcgagcggcaccggatggagctggaggccgcaatcaacaagcgcatggtggacataacggcccagaaggacatgctgcagctgaagcgtaagtatctcgccgaggagcgggcacagctgcgggcggacatatcggagcgttcgctaaagatcgagcagcttcgcaatcggtacgacctgtcgctggatctgctcggtaagaatgaggatgggacgattgtgacggcgacgcagataaagattcaaacggcccaggaaaagtacatgctgctgcgggaaggcagtgagctaaacgtgaagatcctgaaggccgaggaagacctgaaggcgctggagaatacgctcaaggtgatgaactacgcgaacgacaagtacaagcgcggattccagaaggtagaggacgagaatccggacatgatcgcgatggaaaacattcaggccgattactgtaaggctgtggcagcgctcaagagcgtccgatcggatctggcttcgaacacggaaaacctgcacgatctgaacgaatgtcgcgagcaaaacgataaagcgctggaacaggcccagaaggtgcggctggacagcaacgatgtgctgttgcgcattcagaaggagctgctggaccagcggacgaagatccagcgcgccgagcgggagctcaagctggcgatcaaggcggcgaaggcaaaaacgaacgatgacgatctgatgctgatattccagaaggatctcaacctgaaggagctggaggagcgcaacagtaacgcgctgcagcatctggccgatctggtggagcaaaacacggagctggctgcgtcggtcagcaagcattgctacgagcggggtttgcgcttgccgttgattaagcgcaccaagagtcagatatcctggcggagtgaaaattcccacggcacggagtacagtggacgcgtggatacgatatcttctaagcaagcctcccgactttcgatctgcactacaacatcttctcgcaatacggattcttcggaagatatcgccaagtccttcgacaatcgcatgagcgctggactgtccgtcattctgatcgacttccccggcagcaaggcggccggtggcaaatccacgaagaagtaagagaattcgattcgataatgatgataactttattttactctccatttgtgtccgagtgtagcagagttggtatggtggcctattttgaggagttttgtttgcttgcttgcttgcttgttttgctgcccttttagtagtagtgtgtattgtggcaacctgtgcgcccacttccttggaaatggggcact

SEQ ID NO: 352 - DNA, 3074 bp, Anopheles gambiae; identical to SEQ ID NO: 351

SEQ ID NO: 353 - DNA, 3074 bp, Anopheles gambiae; identical to SEQ ID NO: 351

SEQ ID NO: 354 - DNA, 908 bp, Anopheles gambiae
gcgtcgccgtcgtgtgctaacctacagagagaaaagagccatttcgcgctaaagagtgcaaacgagttaacgacgggtattcgtcttaaaagccttcaccatcaccatctagccaccgcagaacatatagcgccggaaaaatgagtgaccgcaaagccgtcatcaagaatgccgacatgggtgaggagatgcagcaggacgctgtggactgcgcaacacaggcactggaaaagtacaacatagaaaaggacattgctgcctacataaagaaagaattcgacaaaaagtacaaccccacctggcactgcattgtgggccgaaactttggatcgtacgtgacgcacgaaacgcgtcatttcatttacttttatctcggtcaggttgccatcctattatttaagagcggttaaaccacacaaccttagcttaatatcatcggaatgctgtaaaagaatgggagcgaggacgggatcggacggtgaacggcgaagcgtgtagagaaatggcaacgattgcgtatttagcggcggcatccacatatatggacacggccttcaacctgcagtcggacggcgggaggacgttggaggggcggaggagccgagccgtagatgcgaaggagtagtagaaacggaacgatggatagatagctggattgtgaggggcgcgaggaaccgttattaggagcagtggggaggaaatttgacattcttatatatttaccgagaactatactaaatcgaacgaagcagagctgtaccaattaagtaaatcaactttaccggaactcgcgagcaaaaatgtgtactgtccatgggtgtggtgtggtcgtaaaaccaagctgctcggaatcaaggaaggcaaaccatctgtccaaacatgcccctgtcagcataatatctcatgcc

SEQ ID NO: 355 - DNA, 908 bp, Anopheles gambiae; identical to SEQ ID NO: 354

SEQ ID NO: 356 - DNA, 908 bp, Anopheles gambiae; identical to SEQ ID NO: 354

SEQ ID NO: 357 - DNA, 2163 bp, Anopheles gambiae
atgggcagcttgccaaacttgagtgatctttcgaccgaaaagctggaaaggcgtctggaagagcgggaacgcatccttgcccgggaacgcatcattgagcgtgactttggccgggagaaggaatcgattcgaacgctggaacgacccgtctttatccataagcaaaacgtgcgtagttacaaccattccgaaattgcagcagcgaaaagtatctttcagcagaaatgtccgcccggctcgaggaaggtgatgcgaacgcgaagctctggacaggcgcatcacatttgggacgacccgatcatagatcaatacttaaataactactcgccggcctcgaaccgcagccatcggatctcggttgggccaacgtttcccgccacctaccagttccagtcgtcttcgctcggcaaccgacatcggcgcgactcggtcaacagttccatcggcgcgacgtccgtgcgcaagttgctgacggtgcagaaccgaagctacggctgtcggcacaagatcccgtcgcacgtccgctcgaagatgacgaagaacttcatcctggtggcggtggcgcacggtttcatgtgtaccgcgctgataccgctcatcgtgctgcagggtgccaactccacctggttccagcaggagtcgtggctggccgccggtccggacgttgggtcgggcctgctaagcctgtgctgtgccgtgacggccggcatgagcctgatgacgaccaagctggtgcagcgcttcgggtactcgattgtgctggcggccagctacggcgctctgtgtctgtttctggccgctcacatctacccggtgctgttggccctggtgcccgcctacctgctgctcggcatgtttctcggcccttccgtcatctgcaagcaagcgctgctggtgtcgatggcgggcaagctgagctgttcgcagcccgaatgtggaggaaccagcacggccggtgccaacgcggacagctacgacgatcatcggttgatatgcagccggcaggagcaggttcgtcgcctgggacgttggttccgagcggcgggagactttggcatcatagtcggcaccattgtggctgcgtttgtgctgacgtgtgcgtccggatcgaaccggattggctgttactacatcacgagtctcgctccgccgagcacaaaactcaccaaacccacaccttcgatgccgacactacgcgaaacgatgtactttctgtacaacatccggctgcccgatccgaccggcaacggtgacgaaggattccatccggcaagcacatcgaccggtccaccgggtggtgctgggggtgccgaggatccggcgggccagttgatggaccggtttccgtacagcatgttccagacgaacgactacggcgagcgcatctgtggctcccatctgtgcccggtgtgggacaggaacgtgccgatcaacagcagcgcgctggagaatcagctcaagctgcggggctacacgggtgcaacaccgctgatgggcatctatctcgtgttcggggtgcttgcgttcacggtgaccgcattcacgacggacattgagttcaacgtgaagtttgactcgatacggcgcatgtccgacacgctgctgtttgccggaccgctcgcgtacttcgtcggcaccgagcaggcgtacatgatggccgactttatgaaggcctttgttgcctgcgaactaggaccgaacagtgtggcgggcgtgctgatcggaatgggtgtgatgcagctgattgccgcctgtaccctgagcatgctgctgagacacaccaagcgcgttgtagtgatcgttgctggcttcatgtttcacgcctgtctgctgctggttctgctgcgctggaagccttccagggatgatagtgccgtgctgtacgttataccggcagcgtggggcgtttgcaatgccgtctgggagacactgctgtttgcgctgactacgctcacccatccgaacaagttcgccgaagtgacctctccgctgcaggcactgcggttcctcgggctggccgtcacgtttgccggccacggggtgctttgcgaggcgccgaaaatcatcatcctcgcgatactgctcgtcatctcggtcataccgtacaccatgctcgagctgaagctggaaaaccagcgcaaagcgctaaagctcagcttgtga

SEQ ID NO: 358 - DNA, 2163 bp, Anopheles gambiae; identical to SEQ ID NO: 357

SEQ ID NO: 359 - DNA, 2163 bp, Anopheles gambiae; identical to SEQ ID NO: 357

SEQ ID NO: 360 - DNA, 1566 bp, Anopheles gambiae
atgcgatcagaatgctacaacggcagcggtgccagcacttcctctcccaagcgacgggtcaacgtagtaggcaatgggaggtcccatcatcaccaccagcggcagcaccatgcagcaggcggcgcaaatacccaccgggacacgacgacacatgacagaggcacagactcacctcccaccctgaccgaactgccaccgtccagcggatcctttctacacatatcaatcaccaagctggccatcggaagccgcctgttcgtgatagtactccagctggttgctaaccttctcctgccagaccacgaagcaggcgtgtttgtagcaccgagcgacaagaacgcatcggagagaccactggacgcgctggtgcgactcgtgctcggcggtctgaatcggtgggatggccaatacttcctgcacattgccgagcacggctacacgtacgaaaatgcgctcgccttcttcccgctgttcccattcatcctgaaaattgtgtgcagctcgctcagcagctacgaggtgatcaccttcgtgagctatcgggagctgtcgctgctgctggcggtgctgctgaacgtggtgtgctttaccggtgcagcgaaagcgctctatcggctgagcaagcacgtgctcggcaatcagaagaaggccgagattgccgtgctgctgttttgcttcaatccggcgtccatcttcttcaccgccccgtacaccgaaagtctgtacgcgtggctgtcgttcgtcgtaatgtaccagtgcatcgaggacgtgacgtcgatcttcctgacgatcccgctcagcctgtcgatactgtgtcgctcgaacggcatgttcaacatcgggttcgtgctgtactttgccgtgcgccggatcgtcgcccagtacaacgtgcacaacgtcatctgcatctgttcgcggctcttctctatgctgatcatcgtgctgttccactacggtatcgcccaggtgtacaactactatctgttttgcttcgtgcagaagttcaactttcccgaccacgtgcgtgagtacgcggcggagcatgggctggtgctggccggcaacaaaacggacgactcatcgccctggtgcaccaacctggtgccgctgtcgtactcgtacgtacagagccactactggaacgtgggcttcctgcgctactacgagctgaaacagctgcccaactttctgctcgccctgccggtcgtgtatctcgtactgagcaactcgtaccagtatctgtgcgaacactgggagtacgccctacggttggggctgttccggctgaccaaaaagcagcacaaggtgatgcgcccctacgatcggtttgcgctcgtgtttgtcgtgcacgcgctcgtgcttacgctcttctcgctggtgtttgtgcacgtgcaggttacgacgcggctcctgtgttcggccagtcccgtgctgtactggtacacggccgaatactttaccggggagcgagcgttcatcaagcggcaacaaacgatcctggtgtacttcctcggctacaccgtcgtcgggacggtgctgtttagcaacttttacccgtggacttaa

SEQ ID NO: 361 - DNA, 1566 bp, Anopheles gambiae; identical to SEQ ID NO: 360

SEQ ID NO: 362 - DNA, 1566 bp, Anopheles gambiae; identical to SEQ ID NO: 360

SEQ ID NO: 363 - DNA, 2865 bp, Anopheles gambiae
cgaattccagctcttttgacagcagcagcagcagcagcaccatcagcagcagtagtagttcaaagttgttggggaaggtatcgcgtatcgcccggccatctactaggacctaaatactcatagccgcacggtcctgtcacgggtttggtatccggtgttgagagcactccaagacacgaaccgaactgtcccgggtcagccgagtttagtgtgaaagtgtgtccagggccagtgttttgcaaactgtttccattcggtggtggtgtgtgtatgtagtgcagtgctgtgaaaaattcaatttatcaaccgtcacgcagtgcccagagcggcggccatttcgcgtctgttacaagttgcccgaacgcttgactcagtgctcaggaagcgagcgtttcctttctttacatcacgtattcgtctgtcaccgcgacgcgacgccagagcaccacaactggacgtaccggaccgaaaaaggatgcagcgtgataaattgaactgtcacaacacgaaagattaatgaagaacagcgagagcttcgttcggcggttggtgtgcttcgctacttggtgacgctcacaaatggcactgacattcaatcgacgcgagcacgttccagcaggacagcgaacgcattcaggtgccggcgatagcatcgtccatcacattcgaccacatccgtctgcacaatcatatctcgatgagcggtggcttcaagcggccctcgcgcgtgccactgctacgtagttaggtttaacaaaaatagcttaccaccagagggcgcacgccctgggtcgcacgtttcgcgtgtactacttgccattacgctacatagatagtttatagtaacaaaaaacgataagatatatcaaacacgcagcagcattcatctcgagcattgatgcagacgcattaccgagcggtaaagcaaaaggaaccacattgtcgtcggcttacggatatcctaccatttgcaagtatgctgcgatcgtacaaactgtatctgatgctgctcgttagctcgatcttcttcatcgtgtgccagaaccagggctctatcacgagcctcgtcagcaatgctgcggccgcatcgtccggatccgttgacgatttgccggatgtggtcgctgcaccgctgcaaggcaacgatggtctggagctgctgtacggcgactcggagccggcacttggagcagagaagatccgttcgaggagcctcaattctaaggatatgctgcagaagttaaacgatcgctcatcgtcgacttcgtccgccacgagtacctcagctacgaccaccacgagcaccactacggcaaggacaacatccacaacgacaacagcgaaagtggtaccgacagcgccgagcacaaatggaatattagctggaagttcttcagatgtgccgtatcgatttccggtggacacgaagcagctgcccccgctgtacatcatcaccccgacgtaccggcggccggaacagatcccggagcttacccgcctcggttacacgctgaaacacgtacggaacgtcctgtggattgtggtcgaggactcggagaaccgaactgccagcgttacccggctgctggaggagatcggtgtgccatttgtgcagcttgccgcgcctatgcccgcccagtatcgcaagcaaaaggtcaaaccacgaggtgtgtccaatcgaaaccgagcgctacagtggatcagggcgaacgcgacagaaggaaccctatactttgccgacgatgacaacacgtacaatctgaagctattcgaacagctccgtcacgtacgcaaggtggccatgtttccggtgggtctaatctctaagtaccaggtcagctcgccggtcgtaaagaatggtacgataacgggcttctacgacggttggctgggcgggcgcaaatatccgctcgatatggccgggttcgcggtgtcggtcaagtttctccacaaacgccccaaggctcagatgccatttaagcccgggtacgaggaggacggtttcctgcgcagcctggagccgctcgagctgaaggaagtggagctgctagcatcgaactgcacggagatactgacgtggcacacgcaggcaaggaaaaatcctcccgcaccggccctggatcgcaagaagtacggcggcacgaacctggtacagctgaccagctggctcgtgtagaaagagtggaacacgaccggacattcgctgatggtgccgcgttggctaaagaaactctccgtctgggtgtttagaggagagggcccataaagagttgcgtttttccgcgtcgtataggaatcgaatcttgggaaggcatggcccttcctacgcatgtgaaatggctttgtttatttgcgatatcaattttccgatcaatgtatttgaaccccatttccgcgatacagtcactggtgctcagagagacggcatttcggacggacggtaggtgcgattggtacttaacattttggaagcaaccgtcatcaggctcagtgaccagactattccattatagatgtacatcattccgcgcaatggttcgcaccagttttacgcgaaccggactgacaagctcgaacacacacacatacagaattgcagtttattcttcacttcagctgggatcgacgatgctatcttcgcatataaatatcaagaaataaattaccattctactgagattaatggtaggttaggatatgcactaaagaagtggccaaaacagattgataccttaaacacataccacacaagcacacagacagaagcataagtgtaaggaaaaggaaagcgatgttgtacatatttattctaatgttggctgtaaccgagcgagggtcaatgatggccattaaagagatcttcat

SEQ ID NO: 364 - DNA, 2865 bp, Anopheles gambiae; identical to SEQ ID NO: 363

SEQ ID NO: 365 - DNA, 2865 bp, Anopheles gambiae; identical to SEQ ID NO: 363

SEQ ID NO: 366 - DNA, 861 bp, Anopheles gambiae
atgaacggtgttgggtcgaattttcgtgtgccgaaatgtgcacggtgccggaatcatggtgtcatctcgggattgcgtggacacaaaaagctatgctcgtaccggaactgccgatgcgcgaagtgcgaattgattctgtcacggcaaaagattatggctgcacaggttgcactaaaacgccaacaagcggtcgaagacgccatcgcattgcgattagcgtccacggagactggcacacagctggaagcgttaccacctggcaaaatttacggtatgaccgtcacggagccatgtccctcaccgtcaccctcttcctctaccgcctccgtcgatgttatctcttcaacgtcgtcggacggccttggaggattcgaaacacccgaagatgtgcggctgagcagaccgaaagccactggaaatgtgaccgtgtcacagaacgcactggacatgctagcaaagctatttccacaccgcaaacgttccgtgctagagctcatcctgaagcggtgtgattctgacctactgaaagcgatcgagcagtgcagccagacgcagaatattagcgcctttaagccgccaactccaacagcaccggccacaactgtagcagcgccaagcactagcaccacactggtatgtggccttacatgtgttttcgtaaccgaattggtattcagccaatttcttttacactttcagacccaacctccgatcagtccgaacggttactccccattcattgcgtatccaaaatggctgctaccgatgtccataccggtgtccttcagtcatattgcacccaacctggcaccgcggtgcactcttcccaactgtgtgatgtgcgttcatcatccgatgtaa

SEQ ID NO: 367 - DNA, 861 bp, Anopheles gambiae; identical to SEQ ID NO: 366

SEQ ID NO: 368 - DNA, 861 bp, Anopheles gambiae; identical to SEQ ID NO: 366

SEQ ID NO: 369 - DNA, 2075 bp, Anopheles gambiae
cactcgtaccagccagtcgcacgatggattctgcaagcggtcggaagctacttggattccggcagattgcgcaggaaaagctgcagcatgtgttctattccatcccgtcggagaaggacctgatcatcgaaccggcgctcattaaaccgctggaacatgtgtgcggtgcatcctggcttaggaagaaaggcatcgataaaatattcaagtttgattcgaaaaatcccccaccgaagcggaaacagtttgtgtacttgatcacctcgagcctgcttacgttcaagagcgtgctggatcagatcagtggctaccagagccagacgagcagcatgatggaaccggacatacgcaacaagcagtaccacgtgctggtgctcccgtcggtgctggccagcttcgagcatctgctggaggaggagggcctgcacggcatcgtcgagctgtacaactttcagtgggattttctgctgctcgacgaatcgctgctcagcctcgagctgccgaacgtgtttgcggatgtgtttgtgcgcaaggacaccacaccgctcggctcgattgcgcaaagcattcgcatcttcaatctcgtcatgggcaagcctcatctcgtgttcagcctgggggagaacgcggagaaaatactgcacatggtgcagcgcatggaagcggccaagcgaccgaatgtcggggggaaggagaatgccaccggcaaggtggaccagccggagaaagagccggagtattcggccatgctcatactcgaccgtgatcgggactatccggcctgcctgttaacaccggtcgtgtactgtgggctgctgctggagatacagcccctcaactccggctcgctggccgtcgatggtgagtgcaacaagatcaagaacggcaagctggcctttctgcaggaacagggcgccgctacggcttcgaagcagcaggaaacgactagcttgcgcatgagtggcgcacaggacatgatctatctcgagcaccggtatcgtcacttttccgaagtcatcagcctgctcagcgcacaggcgaaagcgctcggcctggagggaaaggcgtacacgcgcgagatgaagctgcacgagatgaaggagtacgttacgcacaagctgccgaaggtggccgccgccaagaaggagctgttcaagcatctccggctgtgcgaaacgatcgtggaggaaataggcgccaacttcgagaagcaccaaatgatcgaggaaagcatcctcaccaacacgaaccgcaagcaaatcatgaactacattctcgagctgctcagcagcgacgcgcatcggtacaatacgctgcggctaatctgtctgtaccacgtcacgatcgggctgacgggcgaggacatgacaaggctcatgacgggctacctgaacgcattcgggtaccggcatcttagcctctttcacagcctctttcaagcgcgcctcttccccgacacgactaatcttagcaaaacgaagattctgtcccaaatctccattcccacgctcaagacaccgttccagattgaggcgaacaagctgaaacagttgccgacggacgcgaacgacactgcgacgactgcgaccacgccaacgaccgaccgagacggtggccttacgggcggtgtgcaatcgacggggggcagtgttgctgccggtggcaaaacatgccccagctacgtcttcaacggcaattacattccactggtgacgcaattgacgaacctaatctttgctgcgtccagcttcgacaatctcaacacccggctgggtcatctggagcggctgaaggtttcgggacgcctactaacagccagtggacaaccgggtgatcatacacagtgtgcgccacgatcgatcaaggaactgtcggcgagcagtcacaaggtggccctgaatcagctgctcccgttcaaagagaaaacgatgttcatcttcatcgtgggtggaattacgtacgccgagatcgctgcctgccatctgctggagcgtacgatcggggctaagattgtcctgtcctccgatcggatcattgccgggcacgatcttatagaaagcgttgtaaactgttaa

SEQ ID NO: 370 - DNA, 2075 bp, Anopheles gambiae; identical to SEQ ID NO: 369

SEQ ID NO: 371 - DNA, 2075 bp, Anopheles gambiae; identical to SEQ ID NO: 369

SEQ ID NO: 372 - DNA, 2901 bp, Anopheles gambiae
atgaagttaacacgaatgctgcccgcgtcctgcatgctgctgagcctgatgataccgcaggccctgctcgcccagaagcccaccggcagcgaaagtccttcctactacaacattggcggtgtgctgagcaataatgagagtgaatcacacttcgcgaccgtgattgcgcatctgaactttgaccaacagtatgtgccacgaggtaccacctactacgataagacgatccggatcgataaaaatcccatcaaaacagcgctcaatgtttgtaaacacctgatatcccgaagggtttacgcggtagtggtatcgcacgaaccgacgggtgatctgtccccggcggccgttagctataccagcggattctaccaaattcccgtcatcgggatctcgtcccgcgaggctgccttctccgataagaacattcacgtgtcgttcctacgcacggtgcctccgtactaccaccaggcggacgtttggttggaaattttaagccatttcggctacactaaggttatcatcatacacagctccgatacggatggtcgtgccgtgttgggtcgctttcagacgacgtcccagacaaactatgacgatatcgatgtgcgggcgacggtggaatcgatcgtggagtttgaaccgaagctggacagcttcagctcctacctgatggacatgaaaacggcccaatcacgtgtctatctactttatgcgagccaagaggatgcgtacgtaatattccgtgacgcggccatccacaacatgaccgagtacggacacatttggatcgtgacggagcaagcgctcagcgcgaacaacactccgacgggcatcatcgggttgaagctgaacaatgcggaaaatgagacggatcacatcaaggatgcgatctacattctggcatcggcgatcaaggagatgacggtgaacgaaaccataaccgaggcgccgaaagattgtgacgactctggtgtcatctgggagtcgggcaagcgactgtttgggtacttgaagacgagaaacattcgtggcgaaacgggccaggttgcgtttgacgataacggggatcgcatgtacgccgagtacgatgttatcaatgtgcacgagaagcactcgtttgtaaaagtcggaagcttccattacgattcggaaaagcgtaagatgcgcctcaagataaacgacagcagcataacgtggccgggcaatacgggcaaaaagccggaaggtatcatgatcccgacgcacctgaaggtactgacgatcgaggagaaaccgttcgtgtacgcgcgcaagctgctggacgatgagattgactgtgcggacgatgaggtggtgtgtccgcattttaacattaccaatggaaatgagcaagaatattgctgcaaaggatattgtatcgatctgctgaaggcgcttgcccagcggatcaactttacgtacgatctggccctgtcgcccgatggccagtttggccactaccagctgaagaaccacaccaccggcatcggcacaacggtgaagaaggagtggaacgggctgatcggggagctggtggccgagcgggccgatctgatcgtggcgccgctcacgatcaaccccgagcgggcggagtttatcgagttttccaaaccgttcaagtaccagggcattaccatcctggagaagaaaccgtcccggtccagtacgctcgtgtccttcctgcagccgttcagcaacacgctctggatactggtgatggtgtcggtgcacgtggtcgcgctcgttctgtacctgttggatcggttctcgccgttcggccgcttcaagctgtcgaccaccgacggcacggaggaggacgcacttaacctcagctccgcgatatggttcgcttggggcgttctgttaaacagtggcattggggaggggacgccccgcagcttctcggcgcgcgtgttgggtatggtgtgggccggctttgccatgatcatcgtcgcgtcgtacaccgccaacctggccgctttcctcgtgctggagcgaccgaaaaccaagctgaccggcatcaacgatgcgcggttgcgcaacacgatggaaaaccttacctgcgccacggtgaagggttcctcggtggacatgtacttccgacggcaggtcgagctgtccaacatgtaccgtacgatggaggcgaacaattacgataccgccgaacaagcaattcaagacgtgaaggatggaaaattgatggcatttatttgggactcgtcgcggctcgagtacgaagcatcgaaggactgcgagctcgtgacggcgggcgagctgttcggtcgcagcgggtacggcgtggggctgcagaagggctcaccctggacggatgcggtaacattagcaatattagacttccacgagagcgggttcatggaatcgctcgacaaggaatggatcttccacgggaacgtacagcaatgcgagcagttcgagaagacgcccaacacgctcgggctgaagaatatggccggcgtgttcatcctggtcggggcgggtatcgtcggcggcatcgggctcatcatcatcgaggtggtctacaagaagcaccagataaagaagcagaaaaagatggagattgcccgccacgccgccgacaagtggcgtggcacaatagagaaacgaaaaacattacgtgcttccctggccatgcagcggcagtataatgtcgggctgaactcggtgtccaaatcggtccaaagccagaatgcggagaaatcgcgctacccgatactgccgccgctgccccgcacaccggaacgggcctggccgaaggacaaggagtacatcgtgaaccggaagaacaacagtagcggggccgggaagccgccgccgcgctacatgcccacttacgctaccgatgtgtctcacttgatagtttaa

SEQ ID NO: 373 - DNA, 2901 bp, Anopheles gambiae; identical to SEQ ID NO: 372

SEQ ID NO: 374 - DNA, 2901 bp, Anopheles gambiae; identical to SEQ ID NO: 372

SEQ ID NO: 375 - DNA, 3042 bp, Anopheles gambiae
gacgacggggtgacggaactcgattctcccgatgcttcggctggtgccaacgtgtcctcctgtgtgtggtatcttcccgaccagcgcggctgtctggtgtacccggtgcgacggataacgcttgccgattggtacaccatcccggagatagcagcaccagtccttgttcctggcccgcaaccgatcagcgatgagctcgttcagctgatcgtaacgctggaagcacaggaacggtcaagcgaccagaatcctattggcgtgaaggagcaaggggaagaagactccgtcatgttgagccgatttggacgggttttggcgtggcgaaatcgcaggagccgtagcttggacctgctgctagaaaccgatgccacacgcacattccagctgatcgtagcaaccttcggaagtggacgattcggattggatggtggccgcttgaaactggtgcaactggagagtgttgaaacgctcggcgagtcgatgcctttgcatgagccagacgacgcactgttgaaggcacaggaacgaaatcttggtacggatgcatggctgacggatttgctgacagttgctgaacgaattgagaacgaacgttgctccactaactattcgggcgttggaattcaaccggacataatcgcatccaacgacattaagatttctttagaactcttggatggcactgtagtttctagtcaaagtcgggccgatttgctttccagtggaagtaattcacgcaatcgatcgcaattggatctaactgatgggttaatgtcgacgaatgggccgaaccattcctgcccgttcgaagagcccgaaccggacggtacggtgtcacgaagcacaactgacgaattgatcggagagactgaacagaaagcctcatcaccttgccccaccgccgttgctaagggcgacgaggaagaaaagaagcatgacgctgtagccgaaccaccgatgacggtagtagaggacgtagttgccaatgccaaagaactgaaacccacaacaccaccaatcgtagaaccgtccgaaccagaagcaaaagatgcagtaatatcgaacggaacggtgaagcatcatcccgttcgcgaaccattacagccagccaaatcgaatccaccgctacccgtaccggctagtccgtcgactgccaaaccgaatgaaccgatcgcggtgccagctaaacctaaacccacgcgttcgttgcgcaaaagctcgttcccatccagtcggctacggctgggcacggatcagtcgggcgtcgttaccaaaccaccgaacattttggtccactccgacagcagctcgacgatggagtacgttattgcgacgctgaacaatctgctcgaaccgaacacgtacaccatttatccgattacggcgggacaagcgattgcggccagctggctacagagtacggtgctgataatcgtggccggatcgctcgatatggaggtgcggaagatactgctggactatttcctacacggcgggacggtgtttagcttgtgctcggatctgctcgacattatactgcccgattcgaagacggcggaaatccgtgagcgggaactggttagcttttcgtaccgcaaatggaagcaaatcaagatgctgcatcacatattctgctaccagctgtcgccggccaagaagcaattttcactagaatcggaggaaacttcgaccctgttgccagtttcatatgtggacgtgtccgatcgccaaggaaagccccactcgctagcggtggagatactggcgcaggaggaaacgtggaacacacccagcattctggaagcgcacaaccgtaaaacgggtggaagggccatcttttcgcagatacatctcgagctggacccgtcccagttccaatccaacatcgacggggcggacaattcgcttcacagctcgaaccagctgcgttacgaaatcttaagcgacctgctgggaagccgcattgggctgaagctgaaggagaaagatggtggcagtgcggacgagcagtcgattgtgtacaaaaatgcgtacttcttgggcaagcatgaggcaaaggtccagatgctggagtcactgaagagcaccatgagccgtccgaacgtgattcagatgagtgagcttgcgctacagttttgtggcaaaagcgatgctgcaccgcatccagcaaccgattcgcatctgccggtgatgatctttcactgtcccgaagatttctccaccgtggagtattttgagaacttaaccaccagcaagataggccgcatcggcatttacgcacctattatgaccagctccatgcagatcgtgtccaacttaacgctcacgcatggcttcatggtgatcgcacgctatcaaaccaaaggcaagggccgcaacaacaatcagtggctcagtcctcctgggtgtgccatgttttcgctgcagcttcacatcccgatgagtagcatgctgggacaacggttgccgatcgtgcagcatctcgtagcgattgccgtcgtttccgccatcctgtcgctgcctgggtatgagaagcttgatttgggactgaagtggccgaacgatatctacgcgtacggcgcatccaagcttggcggcagcatcttcaacacgcaggtcgactccatcgaggcgatcgtgaatctgggcgttggattcaatctaagcaacagcaagccaacgctctgcctgaacgacgttatcgcacagtacaatgcaaagcactcgaccacgctgccggcgctgtcgtacgaaaaaacgtttgcccttatcttcaacaagctggagcagctgtacgatcgagtgcagcgcgacggtatagaggtgctgcagcacgaatactaccgctactggctgcatcaggatgcggaaatcagcatggttggtacggaaggtgagtcgttgcagggcacgatcgtcggaatcgacgagtacgggtttctgctggtgaagaaacaaccgtccggcgaaaccgtgtccgtgcatccggatggaaatagcttcgacatgatgcagggattgattgttcccaagttcaattag

SEQ ID NO: 376 - DNA, 3042 bp, Anopheles gambiae; identical to SEQ ID NO: 375

SEQ ID NO: 377 - DNA, 3042 bp, Anopheles gambiae; identical to SEQ ID NO: 375

SEQ ID NO: 378 - DNA, 1515 bp, Anopheles gambiae
atggatctgttcgatactggtcatccggagcacagcaacttcaccaacaacggtaacgatgcgataccgctctacaccggatatccacgggtgctgctcaacatcgcaacggtgacgtgcatcgcgtacatggtcgtcggcgtgccgggcaatctgctgacaatagtggccttggtcaagagtaagaagacgcggaacgcaacggccgtcttcattatgaatttatcgttctccgatttgctgttctgctgcttcaacctgccgctggccgcgagcaccttctggcaccaggcctggctgtatggggatttgttctgccggctgcttccgatgatgcggtacgggctgctggcggtctcgctgtttaccatactggccatcacaattaatcgctacattatgatcggccatcagcggctgtatcaaagaatctatcgtacgaaaaatctctgtctgatggtggcgtttacctggatacttggcttcggttcgctgctgcccacgtggcacgaaaagtggggcaagtttggactcgacattaacattcactcctgctcgatactgcctgatagtcagaacaactcgccgaaacagttcctgtttttcatcgcgttcgccctgccctgtttggcgatcattgtttgttacgcacgaatattctacattgtacgatcgaccgcgctgcgaaccaaagatctgcctggcgacaatctggacgaaaacagcgtggaggacgtgtccagtgcagtgagcaaccagcagcaacaaccagccccgcatccgggccaatacgccggctcgtcagcaacgatcactccggagaaggatctgccagcaccgccgcccttgtcgtacatcaactttagtcaacacgacgccgactggcactacatcgattcaagcacggagaatgaaatattctgcagcaccacctcgtcgacggaggatgtctcacaccgagcagtggatgtgaagccgacccacaaccaccacacggtcgtcgatcgctgcgattgtagtggcaataggagtccgccagaccaaaccgaggaagaaggatatctggagaatagcaacgtgaagtcgcgcaatcagcctcggtacgcaaacgcatccgggccgggggtaaggcgcaacgcgagcaatgtaaatgcgcgaaagcgcaagaagcatctgaacacatccggcgcctcgatcatgagcgcgggcaagatgtccgccaaggacaagaagctgctgcagatgatactggtgatctttctggcgtttctcgtgtgctatctaccgatcacggtggtgaagctgttccgtcccagcgtgcaggtgctgaacgtggtgtcgtatctgctgatctacctgaccacctgcatcaatcccatcatctacgtggtaatgtcgcgcgagtaccggcaggcgtactccgacctggtgctctgccgtacgtacgagatcgctaaaagcaaatgcaagcagcataaagcggccaacgtgcttcgctttgcgtcgaagtgttaa

SEQ ID NO: 379 - DNA, 1515 bp, Anopheles gambiae; identical to SEQ ID NO: 378

SEQ ID NO: 380 - DNA, 1515 bp, Anopheles gambiae; identical to SEQ ID NO: 378

SEQ ID NO: 381 - DNA, 555 bp, Anopheles gambiae
atgtcttacctgtgccttggtccgatgagtgctggcaaaacgctcctgctgacctgcctacagaaaccggactcggtgaactttacctcccattccgttccgagcgtgggcacgaacctgtacaccatcaagataccgccgatcgttatcgacgagaaggatgtgaaccagaagattcctccaccgggaaagcgcaaagagttggtgcaggtgcgtgaagtcggcggatgtttggcgcccatctggcgcgactatttgctcaatccagtggataagcttatctatgtggtggatacttcgaatctgtgtcaaatatcggccgcaggtgtgctgctgtactccatgctagcggaaccgcggttgaaaaagacgaaatttctgctcgtcctttcgaagatggatcttgcctatcgtcagatgcgtaacgaggcgctgctcatgctgcagatggaaaagtttcaaaagcagataccgcagcacataacgatcgtgcagttcagtgccattacgaaggaaggcatcgacgaggtgtacgactggttggcaatgaattga

SEQ ID NO: 382 - DNA, 555 bp, Anopheles gambiae; identical to SEQ ID NO: 381

SEQ ID NO: 383 - DNA, 555 bp, Anopheles gambiae; identical to SEQ ID NO: 381

SEQ ID NO: 384 - DNA, 1336 bp, Anopheles gambiae
gcgaaggccaattttgatgtggtgttggtgcgtgtgacgatcccctaatttggttaaaatgaacgctaatcggccggcttccgttcggtccacgttattgtgcgcgtagtgcgaccgctcaactgtgcattttgaatggcgaaatgattagttcctattaaaaccccgtgggcagctacttgcatggagtatcgctcatctcaccccccactccacgccatcatccgtcctggaacgtgtaacgcatcgtagaattgtgcattgggtagcgtcatcacaccggcaacgtacaaccgtattacaccagcatcatgaatcaagaagttcgctttcgtcgtaagcacgtgataatattcctgtccatcgtcggaatcctgttcatctactcgctaagttccagccgggactgtgcgggaagtgagcagttctcaaggtcaaaggtggatggagctgaatcttgggaagctggtcaaggacgcgacgcctttctgcccaatcgaaagggtccaacgatctacgcggtgacgccgacctacgcgaggcccgtgcagaaggccgaactaacacgcctttcgcaagtcatccgtttggtgccgaacgtgttctgggtgatagtggaggacgcatcgcaaacgtccaccctggtcaccaatctgctccggcgaagcggtttgcaggagcgcagcgtacaactgtttgccaaaacaccgaccaattttaagctgcagggcaaagatccaaactggctcaagccacgtggcgtggagcagcgcaatgaagcgctcaagtggatacggaaccggttgaagcataatgcccttggtgagccggagtcccccagtcactcgatcgtttactttatggacgatgataatacgtacagcacggagctgtttgaagaaatgtcaacaattgaacggggcaaggttggcgtttggcccgtcggactggttggtgggctgatggtagaaaagcccgtgctgaaccgggacggtttggtgcttgggtttaacagtgcctggaaaccggaacgtccgttcccgctcgatatggccgggtttgcaatcagctccgatctgctgttggaaaacccgcaggcccagttcagctacgaagtcgaacgtggttaccaggagagtgaaatcctgcgccatctcacgatcgtacacgacatgcagccgctcgcgaaccggtgcaaggatgtgctggtatggcacacgcgtaccgaaacgccgaagctcgacgcggagaaggcactgcaaaagagtggcaagaaatcgaacgacggcatggaggtgtaagacagacagacggcgggagaaggcgccgcatgcat

SEQ ID NO: 385 - DNA, 4735 bp, Anopheles gambiae
gcgagctgaaaagggccgtgcgcgtgtgtttgtgcgaaacgtatgtgtgtgtgtgtgagtgtgtttgcgtaaatgcacatttatcagtgcagttccgcgtactcgccgcttcgcaatcgcaatctggtctttaatcgaggaggcaacatttgaccatcgctcgttggcagttgccgtttactactggggcgggtgtaacgaggcccacaacagcagcacggatcttgtgctttaacgtgtgctgggaatgagattaagatttacgtgtgcgtgtagtacttgcctggcgagcaagaagatatgagatacccgctcattcagtaacaaaattagtgtgatcgtgtgtgttttatgtgattgtgcagtgatgattgtccaattaacgtaaagatagcagatttaagaattttatcaaaaggagtgcttcaaaaatatatatttgatctcccaaaccctagcaccatcgcttcctcgaccaaccaataccgacagcccgagaacgatcgtacccgagtggaaaacacattgtattttcgcagcaaaaacaacacagaaatctttaaatattttaagataaactccatgtcccgacaaatctgcttttttgcgattacatagtaaagaaacacagtagtgaggagcttacttttgctcgtgctcgtaccaccttttaaaaaaacccggagggacaatgccgtcacgcaccacggccaacgatttgcgcgagctcgatgtagcgccggcaagtgtaacgttagatcaagcttccagatgttgagagtcggagtcacaatacgtccacaactgtcggttcgtccaatctgtacattgtgtggtcggtgtttggtgggaatgacaacggtgtgtcctcttcgaaggtgctaaaaggaagctcgctgacgaggcggtagggtgtgagagtttggccagtttgttgttgcgcttgtgtggggtgcagcagggaaagcattagccgagaggtagagacacacaagctatttgggaccgtgaaatacgccgcgcgcaacagtaataacataacgtaccgtaagccgaagcgatcgaatcgtgtaatcgaagcggtctcgtgtttttttcctcctatatcgagaggccaaccgatacatccaggtgcattcggcggcatagataacgcagcattaagagtcggaattggctctcgaacgcaacagtttgattgatatataggcaaggcgtagtcagagaggtgctgtaaacgagaagaaagtaaggctagcaggagaagcgcaagttgaggaggggtgtcgcagggttgacgtagacgtagagcttgtttggaagacatacgcggaaccacacgggcgtgtggtgcatcttgaatggtgtcacaggaccgctggacggaagcaatgtccgactccgggtacgattcgcgcacggacggcaacggtgcggccagctcgtgcaacaactcgctgaacccgcggacgccgccgaactgcgcccgttgccgcaaccacgggctgaagatcgggctgaagggccacaagcggtactgcaagtatcgcgcctgccagtgcgagaagtgctgcctgacggccgagcggcagcgcgtgatggccctgcagacggcgctgcggcgcgcccagacccaggacgagcagcgggcactgaacgagggcgaggtacctcccgagccggtagctaacattcacataccaaagctatcagagctgaaagacctgaagcataatatgattcataattctcagccgagatcgttcgattgcgactcctccaccggatcgatggcgtccgcaccggggacctccagcgtgccactgacgatacaccgacggtcgccgggcgtaccgcaccacgttcccgagccgcagcatatgggagctactcactcgtgcgtttcgccagaacctgtaaatctcctacctgacgacgagctagtgaagcgagcccaatggctgttggagaaactcggctacccgtgggagatgatgcccctgatgtacgtcatactaaagagcgccgatggcgatgtacaaaaagcacaccagcggatcgacgaagatcgattggaaattcacgtcaatcatctgcaagcccgaaagatgctacctagtcgtccccagctgttgctactggagctttgcaagagatccagctttcgttccttatcgatgcacaaaaggcgcacccggaaacaaaacaaaaatccaacccactcgtcaacggcccacatggcgggttgcactggagaaactcccaccctcgtaagtgctatctaagcgttaaattaccttcgccctttgcggtagaacaaaatagaagcaaatgaaacaaaaaaatcattgccggaggcgcaagtgaacagcggaaagggaaagaaacccctgtcgaacagaaaacatgattattgatatttttcgatcgtgcaacgaaggtctacactgtgatacaaaatgttgtgtacaggataaatattagatttttttgtttggaaaacaaaaacacagctaaacggtaggaacaaaacaaggcaaaccgaacaaaacgaaacagtacgcacacggctcgttgtatgtaaatcaatctatgtgagcgtgtgtgtgtgtgtgatcgtatgtgattatgtgtgtggcgaacggtttcccattttctgtgagtaacgccccgttacgatcattgctgttggaaaaaaagctaaaaccaaaccttcatcgaaacgaatggcgcgcgttctttacttggcgcccaatttcccaccaaaattcaaacctgtttttaatagtgtaaaacgtaatgaaaatagtaaacgggcgtgtgttgtgtgtagcatggttcgatcacttggaaccaaaatctcaaaaaaaagcaaacagaaactcattggcagaaaggcagacacaccggaattgcgaagttgggaaagcagatcactttcttgttatgtctgcgtttatttctcgtgtgcgaatggaaggcaggaaattcagaggttcatctcccatggaagatgacggaaagagattaagaaattcgaaggcaaatctgttacaacggcgagcgattgtgttatggctagtaaagaattgaattgtgatacgtgcgcagtactgcatatttgttcaatttgtagcttgtaggtagatcgccgtcctcgtgttccgtgatccgggggcgggatgatagactccgccacttggagcgatatcccatgttgctgtactctcgtttcggtgcctttttttcttgctctttcgttttacaaaaaaagtaattatattgcttttgttttatgtgcgcacccgcacacacagctgcacacgatcgtacaagttaacgaatggtttagtttgcgctaagtttgattggttctagttcgctaagttagtctgtagagagattcgtttatcgttatgttcagcagcagtgtcaggaacgagattggaagataattacaggggcagggcagatgagcaaagggggtacggttaggggctggaagtcaaaatgctttagccatcctgcagtcgaatttaaacattaaaaaacaggtccgccttgacgaaacaaatacccccgaggagttcctgcgcccggcccctcgaatgtgcacgaaatggaataggtgttgtacaggcagaagacagttgtagaagcaagggtgtaatgttccaattgaaaagcgaagagaaaacctaatgtaactacaaggcagatatacagctgagagctatattttacgcagcgaaatacaatgtaatcccattttctccactcatcaaaccttcattagtccttcacatttcacacaagcaagttgtactataatgtagaaaaaagtagaacaagcaaaccatttgatgcatcatcgtcatccagcttgaaaacaaatagatcaaattacatagaactggcaatgtctattgatacgctgttcgagagacttttttttaacacaaccgtaacatcagtggtgccgcgtgaatgtatgtttatttctgagtataaagaaaaaacaacaatgtgcatatatactggtgtgcagtcagctctttctgagagaataaaaaccttaacatttcgctttgcacaaaccatgtcttgtaaaatattactccaacaagaaggacagtcaaagaaagaaacaagaaacaaaacgttaaacttaaatcaaaagctagaaatgcacatgtaccatacattattgcccagaaattatctcaacaaaggggagaacaaaacacagttacagccaacagaaaacagttacagcaaaggtgtacatagcatagagtcacaacacaatatgtacattttacccggttcaatatcaaaataaaatgaaaaaaaaaacgtcccgtccgctgatgacggagtaatgagacgaggcgtgaaaatgaaaatgcaacatcaacagttaagaatcaaaataacaaaaaacacccttatccggctccagtacacaatctattgatgacgaaacgtgtgctgcgaataatgttttaacaaaagatgaagtaagtagaacgtgtttgatggaagcgatgggcagcaaaggtaacgaaaacacacatgctaaacgtcatgtgtagcatgtgtataatagcaagaagaaatttcagagcaagacccaaggaaaagtatctttgattcgtcaaacgccgcaaaacgctgttttactgctgtaagtttgagggaaacaacctccggtaaaagagaaataaagtggaac

SEQ ID NO: 386 - DNA, 648 bp, Anopheles gambiae
atggcaatagccaaagctaccaccatcaaagaagctctcaaacgactcgaagatcgtactaaaacaaattcatgcgatgagaaagagattgacctctgcttccagtggcctccaatagaaaaaatggataccaccttctcaacgctgacggcatgccaaaaattatcgctatccaccaatatgattgacaaaatctatggactgagcggcatgaagaacctacgggtgctttcactgggacgcaattacatcaaagcgatttccggccttgaaggagtcagtgatacgctggaagaactctggattagctacaacctaatcgaaaaactgaaaggcatcagtgtgctcaagaggttgaaggtgctgtacatgagcaacaatctggtcaaagattgggtcgagttcaaccgtctggccgatttgcccatgctggaagacttgctctttgccggcaatccactggtggagtcgatggaagagagcatttggcgggcggaggcaagcaaacggttgcttccgctgaaaaaactcgacggtgaaacggttattcgtgaggacgctgagtcgcagaaccagcagggcgttggacagccggagaaataaggagcgcattatttgtgttttattattcttcaataaaaccaccca

SEQ ID NO: 387 - DNA, 648 bp, Anopheles gambiae; identical to SEQ ID NO: 386

SEQ ID NO: 388 - DNA, 648 bp, Anopheles gambiae; identical to SEQ ID NO: 386

SEQ ID NO: 389 - DNA, 797 bp, Anopheles gambiae
cctggttaacagatcacacaacctaagtctataacctcaagcaagctccttagtgcatcagcgtagttcgtcgagaacactactccgttttggtgcttttaaagctgtaccgttctgtttgtgtccttgtgtgtgtgttcgggtattctgaattagtttaaattgttttacgaataattaacaattgaacaaatattaaataaatatacgatctgctagaaattaaaaaataatcaacaatgtcatctatctcagattttcgcaagaagaagctattgtacctgttcaacgttttcttcgatgtcaaccagagtggggaaattgatcggaaggattttgaattagctattgagaaaatctgtacattgcgtggttggcctgcaggtaatccaaagaacatagaaacgcacgactgtatgttcaagatctgggaaggcttacgctccaaggcagataaggacaacgatgggcaggtttctgttgatgaatggtgcaacatgtgggatgcttacgccaaagatcctagtacagtcatggattggcagataagatacatgaactttatgttcgacctggaagatgcctcacacgatggcactatcgatggcgatgaattctctatagtatgctcaagctacggcgtagacaaaaacgagtgccaagaggcgtttaaaaagatgtcaaagggcgctttggaggtaaaccgcgagcagtttggtgaattatggcatgagtatttttcttcagacgatacaacttctcctggcaacttcatttttggcaaaacatccttctaa

SEQ ID NO: 390 - DNA, 1298 bp, Anopheles gambiae
ccgattttgaaccgcgcttaatcaattacgttcacgcacgaaaactaggccgtcgacgcttccggagtgatcgcattgcgtttgtgaggttttgcgctgtgcagttgtgctttgttgggcatcatcttagtgcgtgagtgtgttttttgagtgaaaaagaggaatcattatgctgcagcaaatacatgagctgcctgtacaaacgttatgatacacgagcccggagagaaaatacaaatattctactgatcccgtaagacagaagtaccgaatccagttacggtgtagtgaggaccagacaaatcatgagcaactactcggccgaccatctcggccgcagccccgaagaggatggggttttctgctccagtgaaatatcgatcgtggccgcatcgagcgctacctttatcgcggtacttggaacaatcggaaatgtgaccacgctgctagcgctcggccggaaccgagccgtgcgacaacggcgccgtcaaccgaccaccgcgttcgtcatgtcgttagccaccgcggatctcctgttctgtgtcgccgtcatgccgctcatggcacttcgatacggccgccgaagatggccctttgtcagcgacagcttatggtgccgactgtttccagtggcactgtacgggacggttgccacctccgtgttgagcttggtggccctgaccgtcaaccggtatgtgctgatagtacatcccgcctggtacggggcagtctatcgaacggccggtatggtgccgcttcagctggccatttgttgggccattccgtacggtttaatggctttgccactgtttgaactgtggggtcggctagggttcgatcgtcgaacgttctcttgtacggtgttaccctcgatcacttcgaccgggaagttttctgccagcccgaagaagttcattttcatcgtgggattcgctctaccattctgtgccatcgttctctgctacacggccatcatcggtgcagtgcgcaggcagcgtcgccatatgcagcggtatgcggccaaaccagtggctgcaacatcggttgcttccacgcctggtagcattgccgcaccgagcaacgacgatgatgagcggcatctgacgcgaacaacggccgctatattcgggtgcttcatgctttgctttctgccacttacgatcgccaatgtgctgctggaggatgccgaatcggtgggtgaggcgggtgatgtgcatgtgctggcatcgattctcacttggcactcggccgtacttaatcccttcatctatgcgctggggagtcgccattaccggtaa

SEQ ID NO: 391 - DNA, 318 bp, Anopheles gambiae
atggaggaccaaccgaaggccgaaggtgaggcggacaaaaagattgttcacgtatacccactggtaaagtattccgatatgaatgacgatgtccgagccgaggcgatagaattgagcattacagcgtgtgagaaatacgcacaaaactacgaggttgccgccaaaacgatcaaagagctgatggacaaaaagtttggcaccttctggcatgtggtcgtcggcgaaggcttcggttacgaggtgtcgtacgagacgaagaacatactgtacctgtttttcggtggcaacttagcgatcgtgctgtggaagtgttcctaa

SEQ ID NO: 392 - DNA, 318 bp, Anopheles gambiae; identical to SEQ ID NO: 391

SEQ ID NO: 393 - DNA, 318 bp, Anopheles gambiae; identical to SEQ ID NO: 391

SEQ ID NO: 394 - DNA, 1504 bp, Anopheles gambiae
ctcgcggtaccggttaagattgttttagtcttcgacggaagttggtttagacaattagtttcagattaggatctaaattccaaacacaaaaccaaaatcaaaatgagctactcgtgggatcagcgcgtcgaattcatcgtccgtcacatgtatgacattgacaacaatggcttcctggacaacaacgatttccagtgcatggccctccgtgccaccgtcatcgaaggcaagggcgaaatcaacccggcccgtctgaacgaatacaagttcatcatgaagtcgctctgggatgagatctccgcccttgccgatttcgataaggatggcaaaatcaccaccgacgaattcaaacaggccgtcaagcagacctgcgttggcaagccctactccgaattcccgaaggcgatgaaggccttcattgatgcccactacaagatgatggacatcaacaacgacggtctggtcagcatagaggagtaccgttacaactgcatcacccgtctggctgttgatgacatcaagctggtcgatgattcctacaacaacctggtcagcgaggaggacaacaagaagggtggcatcaccctggagagataccaggagctgtacgcgcagttcatgggcaacgagaacgccaagtgcccggccatctacctgtacggcccaattccggaataaatttttgttccaccaacaactaatacccatcatcagctcaaaagatcaacatcagcatcttcggcacatccacccatagagtagaggcaagagaccaccaccaccaccaccattttagacatttatgcttagataagctaagacgttgtgtgtacccccgtcaggatgcaccgttgctcgatcctaccatcctgcgagcggctgtgtatcctgaacgacaacacactattacaatacaatatgaacggcaatgaacaactgaaacacaaccaggaatatagcaacggaaaatggtagcgaaggtacacgcagcaccaaaacaataacaatagcaaagccaaaaaaagcaccatccattttaagaggaaacctcaaatcgcgccgtgtctaaatcaacttctatccatctacgttccatctggtagattcgaatactaaaacatctcaccatcggacggcaggggtttacagctacgcgattttctcttgattgggagtgtgtgcccaaaactggtttgtttaagcatagatggagcagagatctgtagaatccccgcgcgaaacacgcgttccttgcaccagttgccatcgaacgccgtcgtttggccggaaggttaggcatgtgaagacttcaagttatatatgacggttaatgcatatagaccaaagaaaaaccaaataccaacaaaaacatccactatgagagagagagagagagagataaggaagaaatcaaaaccagcttttttcccccgtttacatggaaaagaaacaaaacggaatggatttttcataataaaacaattcatctaccaaccaagatcac

SEQ ID NO: 395 - DNA, 1438 bp, Anopheles gambiae
atgggtggccctagaacgtccatcttcctgcggcagaaaaagttccagttcgtgctggttgccgccgttgtcgtcttcttgatagtgctgtttcccaatctttacgattcagaagactacgaaaaggagtatcccttgctgttggaaaacgagcagctagtaatttgctacgaaagcaatgtggactcgcgaaaagcgctgtacgctgccaccacgctatctgatgtcacggacgaaccgagcactacgcaacgaaaccatcaccagcaagctcctcaacagcagccgcagcaggtcaatggtacggagccggtgatatactttgtgacgccgacctaccccaggcgcgagcagatcgcggaaataattcgcctcggccagacgctgatgcacgtgccgcggttgcactggatcgtggcggacgacacgaatagttgcagcgaagtgctaaacagtcacattaggaaattcggcataccctacacgcagctcgccagccccatgccgacgatgtaccggggacggaagaatgcaccccgcggtgtcgccaatcgccgggcggccctaaattggatccggcaaaatcagaagaaaacgggcgtcctgtactttggcgacgacgacaacacgttcgatctgaagctgttcagcgagattcggtacacgaagaaagtgtccatgtttccggtcggcctgattggggactacggtatcagttcacccatcgtgcgaaacggtcgcgtggagggtttcttcgactcgtggcccgccaagcgcaagtggccggttgatatggccggtttcgcggtcagtctcgagtacctggcactcagcccgaacgcaacgatgccgttcaaggccggctacgaggaggacgagtttctgaagagcatcgggctgaagctggaagacatcgaaccgaaggcacggaactgtacggaaatactcgtgtggcacacgcagacgaagagcagcaaatcgccaaccgtacgaatctcaatggataggcagaagctagataagctgaatcttggcgcactgctgcggcggctggaaagcatgggagtgaatcatatcagcgaatcggaaggcaccacggcgcaggccatcgtgaatggcagtgtgaagccgttttcgttctggtttagctaataagtgaaatcctgttgatggctaatagatctacaatagtacgtaaagtagtttaacataactcaccagcaactgaacaaagccgcgtcaacaacgcgacatacatctccactatttgattagttgccaacaatgtttagaattataattttaaaatgctatatgcaatcgactccggtgcaaaacaaaagcactaccgcttacaatcgtacgatttgcgggtatttccttgccgttcctcaatactaattattatcgatcgaaatcgaacgcagatcgcgcgtaa

SEQ ID NO: 396 - DNA, 534 bp, Culex quinquefasciatus
atggcggctgccaccctggaccaggctgccgtggataaacgggcccgggaaatcgagaccgagtatctgtccagcttggcggatctgaacgtcaacagcaagccgctcatcaacatgctgaccatcctggccgaggagaacctcgactacgccccgatcatcgtgaacgccgtcgagaagcatctgtcccaggtttatactcttccctctcaaataaccattatcacgtatttatcacacgaccattttgggcccaccccaaaagagccatacactctagttctagtcacgttgagcctgtcgaacaaaacggcatcaatatcaaatcaagttgtgaatacgaatgccgatgggactcaagtgattatggaactcaaggcgtctggggatgcgatgtcggcggatgttaggcaagctcaactcgttcaaggcataatgatcgaagataacggaagcttactgcaggatttttttgcattttgttgcaaaatgaatctaaaggactgttttgcatcttcgctagaggggacgtga

SEQ ID NO: 397 - DNA, 1536 bp, Culex quinquefasciatus
atgaaaagcggccctcaaccgatttggctcaacattggcacagttacttattttttacctaaagaatcgagccaggttcagccggaggtcaagctaccgatcctgtacctcatcgattcgatcgtcaagaacgtcggcaagcagtaccagtcgctgttcagtcaggtcatcgtaagcaccttctgcggggtgtttgaaacggtgaacgagcgggtccgcgagaaaatgttcagtctgcgccagacgtggaacgaggtgttccctcagtccaagctgtacgcgctggacatcaagatcaactcgatcgacccgggttggccgattacggcacagctaaagcccaagtcgccggccatccacgtgaacccgatgtttctcaagaacaaggttcccgagccaaacctggacatgcaacagcagcttcgcgacaagcagcgcgagctgttggaactacaggcccgaaagctcgagctggaactgattgccacaaagaagcgcatcgaagagcaagagaagcaactggtgctgcaaacggccagtgtttccaaagagcctgcttcagagctcaaacgaccggcaagtgcggttgttcaacctgctgccacagttcctaacccccgaggtcgtattttgcccccgaaccagggaatgatcaacctggtcaaatcgcgcgacccccgtttggcgcgccgtaacgctggccttggcgtaccatcggcggccactgccggcgtgagctcgaccgtcgtcgctggcgtacagattcctgcccagccggacagcggacgcctcggtcgcataccgaaacgggtcgatccacggctgaaggcccagcaagcggacgccgatcggaagaaagtaaccagtacaaccaccagcggtggcccctcgctgaaatcgcgggccgagtacgaccccacaaagaagcgagatcgcaaggatgacgcccgactcggaaagaccagctcgctcaaatcgtcttcgtccgagaataagaaaaagtcctcctccgagtcgtctccttcgaagagtccgtcttccaagaaaaagtcatcttcggctgagaagtcgccgtcgcgtagcgaaaagagttcgcccaagtcacgcgaaagcagcagcagcaagcacaacaagatctccagcagcagcagcagcgaaagcatcaaaagtgccacccgccgtccccgggaatcgtccaagagtcccaaccgtaatgcttcaccggcggccaacttcgaaagcctggtggtgccgatcaccaacgagtcgaaagatgtcgatctccgcgtgctgctgccggagaagaagctgaagctagaccaccaacaccaccatcaacaggcaaacttagttatgaaacccgtggccggcgatcaaagcgtgcgtggccacgtggccaggtcgatcgatctggccggcgttggtggtgcaagttgtccgctcgccgcgaacgttgctttcgtgccatttcgtgtggttgtccgaaataatgccagtattgccgagtggcggcggtcgtcgtttccacaccaatag

SEQ ID NO: 398 - DNA, 4707 bp, Culex quinquefasciatus
atgccgaaaatcgcaatgttttactcgaatcttgcagagaaagtgttgggtgagccggcgctagacgcgaagccgacgatggtcacgcaggacatcgatctgcgtgttccgccaccggcgctgctcaaagatgtggtcgtcgtcgcagttcccgacagtgtttcgcccggcatatcaacgtcggcggtcgccgagtcgctcggtggtagctccggtagtatagttgaacctacctcgtccacgacggtcgattccctgagcggtggcggcgccacctccaccatcaaaaagcgacctagcaatcacaagtacgaggaacaaccggccagcaagaagagcaagtcggagaaaatcgacgtgttgtttggcgccgaggatgtggatctgcgcaagctagctggtccgttgaatccggagtccattttgccgccaccgccgccgatcatttccacggaaccgacgaacgtcggcgctgcagcggtcgtcgagttgagtgaatctcctgagcggcagctgccttcttcgaaggccgcgctggaagcggttcgagcgaagatcgccgaagcggccaagaacaaggaccgcgacaagcttggtcggccactgctgtacaacaagctaccggatgatcccgcagaacgtcgacgctccattaatcaaccgaagccgatggatgtggacctgcggcagcagcaacaacaacagcagcagcagcagcttcaggacgaggacaactcccaggacggcatgaacgccaacattaaaaccatcatcgcccaggcccaggagcagatggaaaagggcgagataaccccagagcagtacaacatcctgatgaagcaggtcattcagctgaacgaaacgcaaaagattcgccaagcccagcgtatggaactgatgaagcgttcgcagcaagtgggcgttccacagcaggaaccggacgaagtcatccggattgacgacgaaaaagcgcgcagtcctttgccggtagcggaagagtcgacggtgccaccaccaccgcaagcggtggtgaacgacttccgtggcaaggttgcccctctggaggggccaaactttgccaattcaacggcggccgatttgaggcagcgagatccacgtcgtccgagagatgctcgtttcaatccgcaaccggtggtgcaacccgcaccggcctggccaaatcgtccagttcaaagcgtaccggcaccgtccggtttgatcatcaaccatcggccgccagctccgatgctgaacccgtgggaaaaggcgccattctcgaggatagaccagaacatgattcctccgccaccgatccggccgcactatccgccgcccattggcatgaacaacatcgtgggtggtccgatgcagacaatgctgatgccgggcgtggccaagctgaacgacagcgttcgtacgatcaacatcgacggtatccagagggaaatccggttctacgacgacattgcggtcattttcatgagctgggatgaaccgaaagagatcggtttccagaagggctctcggatggtcgttgtcgatgatcgcgactcgttcgagctgagcttcaacgaatgctacaagtccatcacgatcgagggtaaagtttaccagatgaagctgggtgcgccaacgcgtgagctatacatcgacaacagctggtacgagtgctactttggggatcccccgtcgaacatcaccctggacggcattacgcgcgtcttcaagatcagcggacctgccccgcaggtcaagattggaaacagtcgcaacgatctcgtggctggcaaaatcaacatgatcgtcaatgcggaaacgatcattcccgtgttcctggactcgcaggtgcaaatgtttgaaatacagggcacgatccacaagctgcagtttgcagactttctgttgacggtcatcttggacgatcatccgtatcctgttgagttcggtgggctgccaaaagtgttcaaactacgcggcaaggatttctacatccgattcaccgcaatcccgaagctggttgtggccggccgggtgtacatcagggacatgatccgaacgccactacatcgtgacctgcggacgccaccccgcgaccaaagtatgctgccaccgtttatgcctcaactcagcaacgtgatgccgtccatgtcgggtccaccaaatcatttgttccctgccatccaacaacaagcgccactgatagttccaccgatggtcaccgggctggactatttgacgaaccttatgccgcactcgatccccgcagccaacgtgtccaacaacttgaccggctaccagattcaatccgaggacaaaccagcggcagctcccatcatgccgacaccggccatagctgcgcctccagcaacaaactccgccgcaatcccaatcctgcaaaacatcaacatcgacgagctgtacaagaaaatcgtggctgccggaattctctccaagagcaacagcgctccggccagcacctcgacgtccgccacttcggtcgccagcaagctggacaaagccctcgaagaagagctggaggaaatcgaaccggtgttcctgaacaaagccgaccagctcaagaagcgccaatcggccatcgtttcacagctgttttgtggaatgcagtgcagcagttgcggcgttcggttcccgccggaacaaaccatgaagtacagccagcatctggattggcacttccggcagaaccgtcgcgatcgtgactccgcccggaaggcacactcgcgcaagtggtactacgacgtgtccgattggatccagtacgaggagatcgaagacctggaggagcgcgagaagaactggttcgagacgcaacaaaccgagcagaccgagttcaatggcgatggcgatacgggtgggcgcaacgtggagtctcccgtgccgagctgtccggctggttcggacgaggcggacaagcggtgccacatgtgccacgacgagtttgagcagttttactgcgaagacaccgaagaatggcacctgcggaacgccacccgggtggaggagaacacgtaccatccgttgtgctacgaggactacaaggcatcgctgacgctcgacgagaccgccatgaacgctactaccgacgatgcggacaagagcaagatcgatgacgacgtcgaggaggtgaagatcaagcaagaggtgatcagcgatgctgacgacaccgccagggaaatcatcatggatgatgacgacgatgtcattgtgttgcctccgtcgaaggaagtcgtgaccgaaattcccgacgacgacgacattgaaacgctggactcgcactctacaggcgaggacggccgaacgcaatcagcggcgggcggtgaagacggtggtgccagcaaatcggcggaaccgcagataatcgagacgcgcattgatgacgaccttgccatacaggagcccacgatagagaacattaccgtgaacgatctggacgaaagcgaagagttccgcagcggtggtccagacgacgagggctcccaaactagtcaaccgataaaggtgaaggaggaaccgaaggatgaggacgagatcgacgaagaggatgcccagttcgaggacgtgggtacgctcgagcagtcggttatggtggaagatgtttccaaagacacagacaccgttgacgtggaagcggttccgtcgccaacgcccgcactggaaagcaccagccagagtcagctcaagccatcgctcgacggaaacatcgagctgcaggacgcacccgcgaccagcatcattacgaaccgcatcaaaatcaatatcacaaaggcaaaaactacaaacacctcagcctcagcagccagcagcaatagcgtaagttctcacggaggtggttctagcattgcggttctggtcagcggtggaggcggcagcggcggcggcaacaacaattacatcgacagtcactgcgatgacctgctgtactcgaacctggacgacgtgcacggcggcggggacaacagccagaacagcagcaaccagttgataatgatgatgcatgaagaagaactagaagaatctaataaaggcccggtcacggcgaccgaagaagaaccgactgatcttgcgtatgatttgaagccgagtctgcacggtattgaattcatccggcagcctcgcgtcgagaacggattggaacaatccgggctctgctctataataactgcggaatacggaataaattccgaatccgtcggaagtgtctcggggaccacatcgtcgaaaagttgtcggtactgtttggggttcagctgggccccgagctggctccggtgcgtcccgaagaggtcggccaatttgcgacgtttcatgtgtacagtgagcagttatccggaagtgttgttggaggcgattcgcagcttggcgatgtccgaggtggggtggcaggaggtacgacacgtgggtaaatcccggaaccagtgtcaaaaatggcgcgaccaacgaaactctggccccaaaaagaaagtgcatgcaagacggacggacaaagttgatgacgaaacagcggtgcgcggacttcgccgccaaagaaagaaggagaagaaaagaaagcatgtgacggaatttccctgccggcgtcgtccgtttgctggatcgcgcggcggtcgccgtatcgccatgatcataattcataacttggaacgacgacgccgatcgctggtcaccacctcattggactgttggttttga

SEQ ID NO: 399 - DNA, 984 bp, Culex quinquefasciatus
ttcgacgggagttggtttagacaattagttcaagtagaaactaaattaaatacccaaaatcaaaatgagctactcgtgggataagcgcgtcgaattcatcgtcggtcacatgtacgatcttgacaacaacggcttcctggacaacaatgacttccagtgcatggctctgcgtgccaccgtcatcgagggcaagggaaccatcaacccagctcgcctgaatgagtaccgcaccatcatgaaggctctgtgggacgagatctccgcccttgccgatttcgataaggatggcaagatcaccaccgatgagttcaagcaggccgtccgaacgacctgcctgggcaagccctatgccgatttccccaaggccatgaaggctttcattgatgcccactaccagatgatggacatcaacaacgacggcctggtcagcatagaggagtaccgttacaactgcatcaccagaatcgctctggatgacatcaagcaggtcgatgattcctacaacaacctcgtcagcgacgaagacaacaagaagggaggaatcaccctgcagagataccaggagctgtacgcccagttcatgggtaacgagagcgacaagtgcccagccatctacctgtacggcccaatccccgaataagctgctcaaaccaacattcgaagattcaccatctatagtcgaacaaaacaaaaatcaccaccaacaaccgtataacgtaaccgcttctgcttaacacacgcgtaagctaacaccagcaagtttcatgtattaagcagttatagcgtcgtaaaatcagagaatgatgctagaaggtgcgaaagaggaaaagatctaaatcaacttctcgatcaaacaccatcctgattcgaatactaaaacatcccaactatactgactactgactgtaaaaaaacatccaagcagaaaaagtcaatgttaattatgaaaaaatattaataataaacaacaaaaaaaacaaaaaa

SEQ ID NO: 400 - DNA, 1011 bp, Culex quinquefasciatus
atgcccgctataactggtacgtacgtacgtacgttggatgtgtcgttcaccacaatccagatcaccatcaccagagaccagagtccaaccagtctggacgcgaaacgagaaccgcgaaacctcctcacagtaatagccctcctcaaatatcacaagctgaggaaacatccgacgacagcgttcgtgctctcgcttagcatatcagatctctttttctgtgccgtaaatatgccgctgacggcaatcagatttcatcatcagcaatggacacttggcgagggcctgtgcaaggttttcccggtgtttttctacggcaacgtggcggtctcagtgctcagcatggttggcctcactttaaaccggtttacgttaattctacaccctagtcgataccctaagatttacacaccaatcagtctggccctgcaactgtttggcatttgggccttttcgtttggcattatgctacttcccttgttcgaaatctggggtcggctcggcctggacgaggaaaccttctcgtgcaccattctcaagaaggacgacagctcaccaaagaaattcatcttcctgtttggagtcctggtgccctgcatagtcatttctatctcctactcgtgcatattctatacagtgcacaagcagcgcgccaaagtgaaggcacacagtgccagcggttcgggccggatcgagtccttttttcggaacaaggaggactgccggcttacggtgacgctgctgacgatctatctgtgcttcctgatttgcttcatgccgctgatgttggcgaacgtaatcgacgacgacggttcccacgcaaatttgcacgtgtttgctagcgtgcttgcgtggatgtcggcggtcataaatccctttatttacgcaatcggtagtcagaattacaggcacgcgtacacaaagcttctgtcggaaatgtgtttctggaagaccagcgtcgagctgcgatcgttcgacgagatcaacaaatcccggacggtggaccatttatag

SEQ ID NO: 401 - DNA, 2034 bp, Culex quinquefasciatus
atgtccagcggaacgacgacgaccaccaccaagtttcatatgccacagcccatcgccaccgccaaggagatcgtcgtcggaatccacaagccggagcaccagtcggcgaccgtcggaagcacgaccggttccagcagctcgtccttgaagtacaaggctggtggagagaacaatggcacgttgaaggccggaagtgattatgtgtctagcagtggtggtagcagcagcagcaaaaagagcaacaacggaacttccgagatgatgtccgaggacgtgaaggtggtcatcaagtccggagtgtccgacgtggtcagttccgtcgaacaggactcgatcgagcagcaagagcaaagtattatcgccgccctgtaccagcagcagcagcagaacctgtccaacaagaatggccagcagcagaaccagaaccagcggttatcctcgcagaggtcatccccggtttcgtccccttcgccgcccctcccacctgcctcgacgacgacgacgaccaagcagcagctgagcaacggcggcggcggcaagatgggtgccccggcggtcgtaacggcgtcctccgccgcagcctcagccgccgccaacacggccaactttcacaactttatcggccggctcatcagcaaggacaacatgctgctcatcagcgaggacatcatcgaggtcggccggaactcgtccaagtcgcaggtggactttcacgtcggcaagaacagcttcgtgtcgcggaagcactttatcatccagcacgacatgaacgacgacttcaatctgttctgtctgagcaagaacggcgtcttcatcgacaacgtgttccaccggaagtgcgccgagccgtacaagttgccaaaggtctgtagcatccgctttcccagtacaaatatcaagatccagttcgagaacctgatcgaccaggccaacaacgggggcatctcgatcgacctgaaccagcacacgcccatcaaggtgggcaccggcacggtgggcagcgtggcggcagcagccgcggccatcgccgcagccggaggcaatctcagttccgcaggaggaggaggaggcggcggtcaaaagtcacctccgtcgccgaatgtggtctactcgccgctcaagatctccatcccggaacaggcgacgtccggcggcaatccgaatttggccgtggaaatccggggtcaccatccgggtgccctgcgggatgtgcacgtgggcggtagcgggtatccgtcgccgacggggaccatcagtgcggccaacagctgtccgacgagtccccggcagaacacgacccacgagttcccgcagtatagtcacaatagtcatagtagcaacaacaataactactccgaattccaagcacccgcatctcagtcgacggccggcggcgccgacggtgacaaaccgccgtacagctacgcccagctgatcgtgcaagccatctcggcctcaccggaaaagcaactcacgctgtccggcatctactcgttcatatcgaagaactatccctactaccggaccggtgccaacaagggctggcagaactcgatccgccacaatctcagcttgaaccgatactttatcaaggtgccgcggtcccaggacgagccgggcaagggcagcttctggcggatagatccgtccagcgagctgaagctgatcgaccagagctaccggaagcgacgccagcggggttcgcagtgcttccggacgccctttgggatgccccggtcggcgccggtttcgcccagctacatggacaactcgcgcgagggttcaccgatcaacgatgagctgttgctgtcggcgccgggttcgcctggatcgcaacagcaccagcagcagaaccagagcgcaaacaatagcggcgtgaacgtgagctacggttcgagtaatcatgatgcgtcctaccagcaccagtacagctcgtacgcgggcggggaagtgtacgaggaggacgaccaggtcgagtacgacagcgacgagtacgaaaccgtgccgacgccggtcaagcgccaaaagatctaa

SEQ ID NO: 402 - DNA, 1023 bp, Culex quinquefasciatus
atggtttcgcaagatacctggatggagacgatgtcagaatcgggatacgaaggccggccggacggggccagcggtgcatccagcagtaactcgctgaacccgcggacgcccccaaactgtgcccgctgccgaaaccacgggctcaagattggcctgaagggacacaagcgttactgcaagtatcgcagctgcaactgcgagaaatgctgcctgacggccgaacggcagcgggtcatggccctgcagacggccctgcggcgggcccaaactcaggacgagcaacgagccctcaacgatggcgaagtggcccccgaaccggtacataacattcacatacccaagctatccgaactgaaagagatgaaacataatttgatgcataattctcagcagcaacgctcgttgatcgactgcgattcgtcgaccggatcgatgaactccacaccgggcacctcgtccatggcactaccactacatcgaagatcaccgacgggtccggtacatcccggcgaggcgcaacatcttggagcatccaatttatgggacgcactaatgccaccgcccggaatctataatcagtcgggaccaattcgcatatttatggtaatcttcactttggctcccaagacgatgatgattgggattgagatgtgcgtgcgtacgcgtttcttaggcggatgtttgtccaaagttttaccagtgattggccagcaaaacgatacggaaaactattgtccgtcgatcaagtgctgcaccgccgagcggtgcccactgacgaggtcgcttcggcgcccccaagccattcggtgcgctgaggacctaacctcctgccgcgccgtcgtcgcgctgaggatattacctcctgcgacgcgcccaagttcgagcactcctgcccaaagcctgccacaagcatcccgcgagcgttcgcggccgaagacgagccagaggccggcgtacccgtcgctgcatgatttgcgacatcgcccggcacgagagaaaccacgcgcatccacccccgcatga

SEQ ID NO: 403 - DNA, 1023 bp, Culex quinquefasciatus
atgcaaaacgatgaactggtgaaacgatctcagtatctgctggagaagctcaactacccgtgggagatgatgcccctgatgtacgtgatactgaagggtgccgacggggacgtccaaacggcgcaccggcggatcgacgaagctcaggctgttgttctgcttcatagcagaatcggtcgggatgacatcgacgacgagaacatctcggtgacgggccgtaccaactcgacgtccctgtcgcggtgtagctccacgtaccggtcgcggtcccgctcgccaccccatcccgacgaggaaggcgtgctcaatctggacaccaagtcggcgaaaaatgcagcatccgacgattcgtcggcgttcaacgacgtcaagccaaagcagccaagcgaacaccagtcccggctggaggagacgtaccagagcagtgtcgatcagcaccacagtgccaagtccaagagtaaaaagcatagcgttgctgacgatgctgaaccagtgtcgcaagtggcacctcacgaaacgaacggcttcgagaagggtctgaagctgttcaacaataccaaagccagcagacgaagcacgcacaaagatgactccgtgaacgaatctttcgcagcccgtgacaaaccattatccttatttccgaggcatctgcatctagcggaaaatctagagctgctcaaaaccccgctgtccttgccatcggcggcaaacttcccacttccgttcacaattccgcttaccaacatggaagcgatccggtcatatccgcagtttttctatccctatcaaacgcactccggtagtgatccaccccatccgctgatctccagtcccttcatgaactacccgcaccatccgctgctcttccccgacggctaccgaaaggaactacccaagttcccgtgccccacgtctccgtccagaacgtcttctccgccgaaggtgggcgcccagcctttttcgggatcgcgggttgaacccgtactgcagcctaaccaaccgtccgtggcaccgattcattaa

SEQ ID NO: 404 - DNA, 963 bp, Culex quinquefasciatus
atgaatcaggaaatacgcatcaagacgaagcacttttacgcggtgctagtgatattgggctttttgttgatctatagtttaagctcgaataatggctgtgatagtgacggacagtcgtcgccgaattctgaatttgcggctgccggcggacgagaagcattcttgctaaaccaaaagggaccaaccatctacgccataacgccgacgtacgcgcggcccgtacagaaagctgaactaaccagactatcccaggtcattcgcctctccccgaacgtattctgggtgttagttgaagatgcggaccacggctccgaactggtcgcgaacctgctccggcggagtggcctcgaagagcgaagcgttcagttgtttgcgaaaacgcccaccaactttaagctccagggcaaagatcccaactggcttaagccacgcggcgtcgagcagcgcaacaaagcactggactgggtacgtcgcgagctggcggcaaacggtggccgtgaacggcacagtgtcgtctacttcatggacgacgacaacacgtacagctcggagctgttcggcgaaatgtccaagatcgagcggaacaaggtcggcgtctggcccgttgggctcgtgggtgggctaatggtggagaaaccggtgctaaaccgggacggaatcgtgctcgggttcaacagtgcctggcgcccggaacgtcccttcccgctcgacatggccggcttcgccatcagttccgacttgctgctggacaacccgcaggcccagttcagctacgaggtcgagcgtggctaccaggagagtgaaatcctgcgccatttgacgatcgtgcacgagatgcaaccgctggccaacaagtgcacggacgtgctggtgtggcacactcgcaccgaaaatcctaagctggacgcggaaaagccgttggtgaaggcgggaaaacgatcggacgcggggttggaggtgtaa

SEQ ID NO: 405 - DNA, 558 bp, Culex quinquefasciatus
atggccgccatctcggaattccgcaagaagaagctgctgtacgtgttccacgtgttctttgacatcaaccagagcggagaaattgaccgcaaggacttcgagcttgcaatcatgaaaatctgcgaactgcgcggctggccggtgggaaacgccaagaacaaggaaacccacgactcgatgttcaaaatttgggacggcctgcggacgaaggccgactccgataacgacggtcagatttcggttgacgagtggtgcaacatgtgggacgcgtacgccaagaaccccaactccgtccttgactggcaagtgagatacatgaactttatgttcgatctggaggacgcctcgaacgacggcaccatcgacgcggacgagttctcgacggtctactcgagctacggcgtcgacaagaacgagtgccaggtggccttcaagaagatgtccaagggtgccaccgaggtcaaccgggaccagtttgccgtgctgtggcgcgagtacttctcgtcggacgatccggccgcgcccggaaacttcatctttggcaagaccaccttctaa

SEQ ID NO: 406 - DNA, 513 bp, Culex quinquefasciatus
atgtcgatctccgagttccgcaagaagaagctgctgtacgtgttcaacgtgtttttcgacgtaaaccagagtggcgaaattgaccgtaaggatttcgagatggcagtggagaaaatctgcgaactgcgaggctggcccgtgggcaacagccgaaacacggaaacccacgagtccatgttcaaaatctgggaagggctgcgggccaaggccgacaaggataacgacggtcaggtctcggtcgaggagtggtgcaaaatgtgggacgaatacatgaactttatgttcgacctcgaggacgcctccaacgacggcggcatcgacgccgaggagttctcgatcgtgtgctccagctacggcctggaccagcaggagtgccgggatgcgttcggcaagatggcgcagggttccgaggaggttgaccgggagcaattttccaagttgtggcgcgagtacttctcgtcggacgatcccgcctcgcccggtaacttcatctttggcaagacgtcgttttaa

SEQ ID NO: 407 - DNA, 1122 bp, Culex quinquefasciatus
atcgagtttgtcccatacgaagacaacaagcagaacctggggatcttcaagcatgtgttaagctcagaacttggaataaagttcaagacatcacacgatcatgaagcttcctgctatcaaagtgccttcctaattggttcagaagaagttaagcgtagtttcctgagcgacctaagtattcccaacgagctcaaggtcagcgatctaacgctacagttctgctccaaatcagacctcatcccagcggcgtccgaatctcatctcccagttctcacagaccaacccccggaagacttctccacccaattcttcaacgatcacctcaaaacaaacaaaatcggccgccttaccctgtacctccccctcgtcaccagctccatgatcatcgtatcgaacgcgaccctgccgcacggcttcgtcgccatcccacgccgtcaatcgcgcggaaccggccgaaaccgcaaccagtggctcagcccggacggttgtgccatgttctccctccaactgcacgtcccgctggacagtccgctcggccagcgactcccaatggttcagcacctggtcgcactgggcatcgtgctcgggattcggaaccaacccgggtacggcgagctggacgtgcggctcaagtggccaaacgacgtgtacgccaacggaaggagcaaactgggtgggatcatcgtcaactcgcagttggagggatcgcgggccgtcgtgaacgttggttgcggggtaaatttgagtaactcgacgccgacgacgtgcgtgaacgatgtgatcggcgagtttaatcgggagaggagggagcgattgagggcgttggggtacgagcagctgttggcgcagatattcaacgagattgagcggatctttgaagaggttcagcgagggaaggtggaagtgttgtacgatttgtacaggaggtattggttgcacgaaggacagagtgtaacgattcgggatagagatgggctggacgttaccggaacggttgccggtatcgacgagtacggatatttgctggtgaaggtggatggagctgggcagccaatttgtgtgcatccggacgggaatagtttcgacatgatgaagggattgatcattccaaagtactgctag

SEQ ID NO: 408 - DNA, 1713 bp, Culex quinquefasciatus
atgttcaactgtatggtaatgtacgaattatccgccagaaccctagtatccgcgaacctccaccggaagcagctgttccagtaccaactcaacacgttccgatgccaactgggtcgccggattgaccacaacaactccacaaccaccatgtccagcaaacctcccaacattctcgtctactccgaggtggagcccgtacgcctcgaactgatagcaactcttcagcgaactctggaaccggatcgctacacggtgtacccgttgagtgcggagcaggtccgcggtcgagcctggcccgatagtacggcggcgctgattgtccacggcaggttggagacgtcgctggcggaggtgtttgcggattactttttgaacgggggcaagttgctgggcgtttgttcggatgttgtggggctgtttgattgtggtgaggttgggggcgtaacacgggtcatgaagcatttaagagatctgaggggtgaggatcatgaagttcaggttgaggtgatcgctcgtggagacacgagtcggactgtgagaataattgcggtagatgaactgaagacctgcggaagagcgatctcaacgcagatcgagtttgtcccatacgaagacaacaagcagaacctggagatcttcaagcatgtgttaagctcagaacttggaataaagttcaagacatcacacgatcatgaagcttcctgctatcaaagtgccttcctaataggttcagaagaagttaagcgtagtttcctgagcgacctaagtattcccaacgacctcaaggtcagcgatctaacgctacagttctgctccaaatcagacctcatcccagcggcgtccgaatctcatctcccagttctcacagaccaacccccggaagacttctccacccaactcttcaacgatcacctcaagaccaccaacatcggccgccttaccctgtacctccccctcgtcaccagctccatgatcatcgtatcgaacgcgaccctgccgcacggcttcgtcgccatcccacgccgtcaatcgcgcggaaccggccgaaaccgcaaccagtggctcagcccggacggctgtgccatgttctccctccaactgcacgtcccgctggacagtccgctcggccagcgactcccaatggttcagcacctggtcgcactgggcatcgtgctcgggattcggaaccaacccgggtacggcgagctggacgtgcggctcaagtggccaaacgacgtgtacgccaacggaaggagcaaactgggtgggatcatcgtcaactcgcagttggagggatcgcgggccgtcgtgaacgttggttgcggggtaaatttgagtaactcgacgccgacgacgtgcgtgaacgatgtgatcggcgagtttaatcgggagaggagggagcgattgagggcgttggggtacgagcagctgttggcgcagatattcaacgagattgagcggatctttgaagaggttcagcgagggaaggtggaagtgttgtacgatttgtacaggaggtattggttgcacgaaggacagagtgtaacgattcgggatagagatgggctggacgttaccggaacggttgccggtatcgacgagtacggatatttgctggtgaaggtggatggagctgggcagccaatttgtgtgcatccggacgggaatagtttcgacatgatgaagggattgatcattccaaagtactgctag

SEQ ID NO: 409 - DNA, 828 bp, Culex quinquefasciatus
atggccgtcctagtcggagtcatcaagcgttccgaacccctaaaagggaagatcccggcgcggttccccgcggacaccaaacagctgcccccgctgtacattatcacgccgacgtaccggcggcccgaacagctggcggaaatcacccggctcggctacaccctcaagcacgtgccgaacctgttctggctgattgtggaggacgccgaaagccgaacggagtccgtaacgcgactgctgcgccagatcgatgtgccgttcgtgcatcttacggctccgatgccggccaaataccgcaagctcaaggtgaagccacgtggcgtgtccaaccggaaccggggtcttcagtggatccgcgcgaacgccaccgaaggagtgctgtactttgcggacgacgacaacacgtacaatttgcagatatttgagcagatgcgccacattcgcaaggtcggcatgtggcccgtcgggctcatctccaagtacggcgtcagcagtccgatcgtggccaacggaaccatcagcgggttctacgacgggtggatcggcggccgcaagtacccgatcgacatggccgggtttgcggtgagtgtgaaattcctgctatcccggccaaaggcggagatgcccttcaaggcgggctacgaagaggacggctttctgcggagtcttgacccgctggacatgaaggagattgacctgctggcgtccaactgcaccgagattctcacgtggcacacgcagtccaagaaaaacccggcggcacttccgctgaacctgaccaagtacggcacgacaaacttggtgaagctgacgaagattcttgtttga

SEQ ID NO: 410 - DNA, 2346 bp, Culex quinquefasciatus
atgaccgacaacaacaacttccacatcccgcagcatgtcatcaagcaagagccgtcggcggcgccgggttcgtcaccctcgcagcaccagttccaggtgtactactcccaccagcagcagccactgtcccagaagggcccgccgacgacgacgttgaaggtgatcgaatcgatggactcgccaacgtcttcgtcgtccgtgtcggtggcggggttggactacagcacgcaccatcaccacccgcagcagatcatcgagtacgatccgacaagcgatccgaaccatccggtgaacgttatcatcgagcaccagcaggtggtggaaactcagccatcgatcgagcagcaggaacagagcgtgattgaggcgctctgccagcaggctcaccagaatcggctccagcggaagcggttgcggttggacaatcaacagccgcagcagcatgagaacaacggttccggctatccgagcgacgaggacgacgaggaggaccctcgccggaaggtggttcaccacggcgctggcgctgcggcgggtcaagagtccatcgaagagcaggagcaaagtattatcgaggcactctaccaacagcagcagcagaaccagttgcgaaaacagttgatccatgaacccgccagcaaccaccagcagccgcagcagcacaacccgccactccaccatccggtgttggccggcttccagcatcggcactcgtccacgccaccgtcgcggtcgatttcgccctcccagtcgccgaccgtttccggcacgaccgactcggtcagctcacgcatctcatccggaccggcgtcggctgctcagttgcagtcgcaccaccaacttccggcggcggctgccctctcgctggccaacatcaaccagaacaattttattgcgcgactcatcagcaaggacaacattctgctgatatcggaggatctgatcgagatcggacgcaactcgtcccgggcccaggtggactttcacgtcggtcggaacagcttcgtgtcgcggaaacatctgctgctgcaccacgaccacaccgacggcgagttctacctgtcctgcttgagcaaaaacggcgtctttatcgacaacgtgttccaccggaaaggtgccgaaccgttcctgctgccgagagtgtgcagcatccggtttcccagtacaaacatcaagattcagttcgagaacctgtaccacaaaaatgccaccgacggcccgcgggacctgttggaaaccatcggtggaccatttgcggcgagcagtagcagcaacctgggacttggtggtcccgcgagtggtggcaacaacgccggaaacatccaccaggcaccttcgtcgaacagcaacaacagcagcatgtacgctccgctgaagatctctatcccgccggaaccgcccagttcgtcgtcttcgatggaacacatcgagatgagcgggcgcatccgggacaacggcaagagtccgtacccgtcgccaacgggaacgatcagcgcggccaacagctgtccgacgagcccccgtcagggttatcacgatttctccgcgtacagcatggtcggcgtcggcggcggtggaccgggtgtgctcggtcacgacggtggcgggggcggcatggggatgctcagcgctggcaactccagcttcaacgacttccaaccacccgccacgtcccagtcgctcgaaaacgagaagccaccgtacagctacgcccagctgattgtgcaatcgatctcggcctcgcccgagaagcagctcacgctatccggaatctactcgttcatctcgaagaactacccgtactaccgaaacggcgcaaacaagggctggcagaactcgatccggcacaacctcagcctgaaccgctacttcatcaaggtgccccggttgcaggacgaaccgggcaagggcagcttctggcggatcgacccgaacagcgagctgaagctgatcgaccaaagctaccgcaagcggcgccagcggggcagccagtgcttccggacgccgtacggcatgcccaagtcggcgcccgtttcgcccacgccgatggacccgatggccgagagccgcgaggggtcgcccatcgacgaggagctgctgctgcagtcggcgcccggttcgcccggccagatggtggcggcgaacgcgtacgtgcacagcagcaccggcaccagcgtggccggccatcccgggcaggaggggaacttcggaggcgcattatcaccgcgcggcgtctatccggagtcggccaacaatggcggcgccggcggtggcaacaggtccatcaaacaacaaccgcaaccgtcaacagcccaggtggtggcctcatcgacagcaaatctgtag

SEQ ID NO: 411 - DNA, 990 bp, Culex quinquefasciatus
atgtggaaaaacattccgccttccagccgtttccggtcgaatcgttccagaagcagcactagcaaacggacactaagtgatccaacagcaaatgtaaacgttgcctcaacccgcgtgctccaaaattgtgaaaccaagccgaaaacagatatcacaaaatttaatcaaatccgacagtcaaaagttttaaaccgcgcgtgcaagtgtccacacaaacaactatttacaatgagtaacaaagcgaccaaaaaccagcagcctcccgccggcaacaccagcacaaaacagcaccaaaaccaccaacatcagcacaatcacagctcaagcagtcctaaaaagaccaaaaccccatcgacgccctcctcctccagcacgtggcacatatcgataacgtccctggcgctactcagccggctcagcgtaatcaccctgcaagtaatatcgaaccacctcgtcccggaccacgatgccggagtgttcgtagccccgcgtgacccggaagcggcccccgccaaactggacggcgcggtcaacttcttcctcggcgggctgcaccgctgggacggccagtactttttgcacatctccgagtacggctactcgtacgaaaacacgctcgcgttcttcccgctgttcccctttctcatcaagatcgcaaccagctcgctcgggggaagcaccccgatgatcacgtaccgcgaactctcgctcgtcctggccgtgctgctcaacctggtgtgcttcgtgctggccgccaaagccctttacaagctgagcaatctggtgctggggaacaagaaaaagagcgaactggccgtcatactgttctgcttcaatccggcgtcgatcttcttcacggcgccgtacaccgaggcgctgttctcgtggctgtcgttcagcgtaatggcccagtgcatcgacgatatcaactcggtgttcatcacgatcccgctgagcttgagcatcctgtgccggtcgaatggtgagtag

SEQ ID NO: 412 - DNA, 552 bp, Culex quinquefasciatus
atgtcctacctgtgccttggaccgattagcgcgggcaaaaccctgctgctgacctgtctgcaaaatccggattcggtcaacttcacctcccactcggtgcccagcgtcggaacgaacctcttcaccatcaagatccccccggtcgtcatcgacgagaaggacatcaacgtgaagcctgcgccaccgccgcggaagcgtgacctggtgcaggtccgcgaggtcggtggctgcctggccccgctgtggcgcgactatctggccaaacccgtggacaaggtgatatacgtggtggacacgtccaacctgtgccagatttcggccgccggcgtcctgctgtactcgatgctggctgaaccgcgactccagaagaccaagtttctgctggtgctgtccaagatggacctggcctatcgccagatgcggaacgaggcgttgctgatgctgcagatggaaaagttccagaagcagatcccgcaagctatcacgattgtgcagtttagcgcgatcgacaaggagggcatcgacgaaatctacgattggttggcgacctag

SEQ ID NO: 413 - DNA, 606 bp, Culex quinquefasciatus
atggttacaaaagcgacaacgatcaaggaagccctgaagaggctcgaggatcgcaccaagacgaactcctgcgacgataaggagatcgatctttgtttccagtggccgccgatcgaaaaaatggacgcaactttgggaaccttggtcgcttgcgagaagctttctctttcgacgaacatgatcgataaaatcttcggtctgaatggtatgaaaaatttacgcatactttcggtcggaagaaactacatcaaggccatttccggactggaaagtgtgagcgataccctcgaggagctgtggttgagctacaatctgatcgaaaagctcaaaggaatcaacgtgctcaaaaagctcaaagtgctctacatgagcaacaacctggtaaaggactgggtcgagtttaaccgactggcggatttgcccatgctggaggatctgctgtttgccgggaacccgctggtggaatcgatggaggaaagcgtttggcgtgcggaggccagcaaaaggttgctctcgctgaagaagctggatggcgaaacggttattcgggaagagaccgagaaccaacagcagccagctccggctggacaggcggaaaaggcttaa

SEQ ID NO: 414 - DNA, 1893 bp, Culex quinquefasciatus
atgttgagcgactactcgctgctgtcgtccgacggggacgaaacgagcagctacgcggaaaccaccgacgacgaggaggccgtgttcctgcagctcagcgcggccgtccaacagggcgaagccggagcggacgccgatggcggtggcaaattggtgtccatcaaccagtacgcgcaggacgtggtcgatttcagcacgcagtatggtagtgacacgagtatttcgtacacggcgtacaacgtgacggggaaaccgtccaagtatccggactatggggactttccggagacgtttgcttttagaacttacggaacctggtggaagcatgctccatccgcttgcgaagagtttggtgatgagcaacccgcggttgacgattacatactggttcggttcgaggaaccggttctgcccgaacagatcaaggtcttcgagacgtacaacccgggtgcgattgtccgcatttgggcgtacacgcaagcggaacagtggtttctgctgtgggacgtggaatcgggcaacgagaatctacctccggttgagcggaaccacgcccggatattctgtcctccactaaaccccgcacccagcccaactcgcttcattaggttcgagttcaaccacgccaagctggagtactcaacgcagctggacgcgatcttgatgttgggacaaaagttcgtcccgaacgtggtgccctcgaagaagcagaaaatcctccccaaagtaacggtcaaccaagaggtgattctgcaaaactactcgccagacttggaatgcacgagtcaatcgagcagtcggagcacaactccgacggaatccgggctctcgctggaccagatgccgtacgatgtgctgttcaacattatggcacatttggacctgcgatcgttgtaccgctgcgggcaggtttgtcgcacgctgcaccacattgtggccgtggattcgctgctgtacgcggagctgaacttgaagccgtactgggcgtgtgcctcgtcggcgctgctgcagtcgctgaagaagaggtgtgcctttacaaagaagctgaacctgtcctggtgtggactgttcaacaagatatctgtaaacgagtttaaagacttcatcgccaagtgcggcccccacctgacccacctccggctggactcgtgcaagttcatgaccaccggctcctgcctcgagaccatcggtcgctactgcccggacaacctgaccgacctctctctgcaaaactaccagccccagacgcgtgacttcaccgccctcgcaagcctccaccacctcgagcgcctcaaccttaaccgcaccagcatcgacacccaatccctgctcatcgtactcgcccggaatcccgccctccgccacctcaacctagcgttcctccccctcgacgtcagcatggacgacgtggcgctccaaatcgccaagtgcaaccgcggcgcgctcgtttcggtcgacatgtggaagtcccactcgctgacctcggtcgggctcgaagcgctcgccgcgcactgtcccaagctggaggaggtcgactttgggtggtgtcttcgggaggaagcgtcccccggagaggcgatccgggcgctggtgcggtcctgtccgcggctgaagaaactctttctggcggccatccgagggcttacggatcgtgatctggacgtaattgccacgcactgcccagggttgcagcagctggacctgatgggcagtatgggaatctcgacggagatgtgctaccggctgttgacgcgctgccgcaagctgaagctgctggatttgagcttttgtgataacttggacaatatgcagattatgctgtggcgcgagtgcttcgatgtggcgatcaagaggagctttgttgattttgggccgccgaggggcgagttttag

SEQ ID NO: 415 - DNA, 1137 bp, Culex quinquefasciatus
atgttcgttcagagcgcttttgataagctgttgttgcaccgggaaatcgtaatcatcggcgattacgctcagttacagatggagattgctacacttgaaaaacatattattcgcattctatttgctaagccaaaatatttctctgctttgcttcccccagacgatgccagccaggactttgcgatgatcccggtgaacgactcgatggcggtgtgcttcgagagtttcgacgacacccgcaggctgctgtacggtgaggtcaccgcggacagcagcaccccggaaccggcggcgccgatcatctacttcgtgacgccgacgtacccgcggcgggagcagattgccgaaataacgcggctcgggcaaacgctgatgcacgtgccctatttgcactggatcgttgcggacgacacggacggctgtaaccgggtgctgaacagtttgctgaagagattcggtattccctacactcacatcgccagcccgatgccggcgttctaccgcaccaagaagctggtcccgcggggtgtcgccaaccggcgggccgccctcgcctggatccgcaacaacaacaaaaagtccggcgtgctctactttggcgacgacgataacaccttcgatctgaagctgttcagcgagatacgaaccaccaagaaggtttcgatgttccccgttgggctgattggcgattacgccgtcagcaccccggtcgtcaagaatggcaaagtcgagggtttcttcgactcgtggccggcgaagcgcaagtggcccgtcgacatggccggattcgccgtcagcctggagtacatggcggccagcccgaacgtgacgatgccgttcaaggccggctacgaggaggacgagttcctgaagagtatcggcctccggatgcaggacatcgaaccgaaggccagcaactgcaccgaggtgctcgtgtggcacacgcaaaccaaaaacaacaaaccgcccaaggtgcgcatcagcgccggaacactgcagaacgataaggtcaacctgggggttctcctgaagcagcttggcgcgatgggcgtgagtcatatcagccagtcggaaggtaccgtggcgcaaatcaccaaggacggaaagtccaagtcgctgctttcctggttcagttaa

SEQ ID NO: 416 - DNA, 1791 bp, Culex quinquefasciatus
atgggttgctcctacaacctggacgagcaccttttcaacgagaacgccaatctggagatcctgcagattcggtggcatccggcctcgcccaccgactcccacatcctggccctgctttcggacaactcgattcgggtgtacgacgtggacgcgctgcgccatgtgtggcgtgttggtccttcgccgtcgctggtcaacggtggcgccgtcgccaccacctcaaccaaggcgcccctcagcacgtcctcgccgacgaccaggtctaccgcgaagctggcctatctgagcagcctcggcgatacggccgttgattttgacatcgcaccgccacgtgtggtcagcggtgaagctgacctgacgacgacgaccacgctggaggacacttcttattccacgacaggcggtgggcattccttcgcgcaacccaaaaagtcaaaaggcggcaaaatcgagtggccaatcgtaatcctgcgcggcgacggcaacgtgtacattctttgcgccggcatcgacaccgaccgcccaaagctgcagggcccaatctcgatcctgccccaagtggacgacaactacgggctggattcgtgctcgctggtcgtagtgccatcgctaccacccaccatcatcatcgcggaaagttccggaaagacgcaccacgcgctcctgctggaggaggaatctcccgccgagcggtccctcaccgagctggactccagtctggtgctgtacccgtgcgagtggtacctgcaggtgctggaaacggtggagctggagctgggacttgccggcgtggacgaggcccggacgtactcgtgtccgattcatttgaagcgggatttgctcaacgagtcgcggtattttgcttatcacaacgctggactgcacgccgttacgatggactttacgaggcagctggtgcattttgtcgagaacgatgacgatttgaacgaaaagtatccgctgtttaactcgcagagccgagccgagtacgtagtttgtaccaaagcgctgccaaactcgagcacgaattctgtgctgggattcgcgctgctttcttcgccaccgggaattctgttgcaattggcttccgggcaggtcgtcacgttggatctgatcagcgatcacagcaagattcgggactggagtgttactcccggtgggaagtcatcgctggcgacggattcgacgctgaagaagatgatgaaggattcgtttcaggatcgcattcaaacaatactgaaatccggcacgactcagccaatcctcaagctggaccaaaccgctgaaccaacgcctcaggaatcgtttgaactgctcacgcaagccactaaaatgctccgcgagcactactttgtcaagcacgagaaagcaaggcaggaaatcgaacgacgagtgcacgttctgaagttgctcaagcagcaacaattatccgaaatcgaccagctccagcaggagaagcagcaaattcgcgataccgccgaacggttggccgaaaactacgaggacatctgcgacaagcagagtgcgctgttcaagagagcccaagaggtggtccggctggcgacgttgcgccttcccaaaggttccttctcggagaacaagttcgccgacatgatcgagaagatcggaagcgccacccggcagctggagcggaacgtggaccaggccaagcagaagatcaccgcccagcaggtgcaggtcgagcagaagcagaaggctcaaaaggagcggatcgtggcgctgcccaccaagcaggaggacatcatcaagcagatcatcggggagatgtga

SEQ ID NO: 417 - DNA, 804 bp, Culex quinquefasciatus
atggctttcgcgttgctgagaaactgtgcacgttcggcggttccgctgctggaacgcaattcatcatcgcttgctgtgattgctgggtctggtccccaaaccagcgccattctaacggagaagatcaactttgtcagtaccaatgtgcgaaagtactcaaagaagagcagcaaaccggagcgagcctacgccagtgattccgattcggattcggacgatgagcggacggagcccaagaacagacggccgcagcgaaaggaacggggcaacacggaattctggcgccgcaagatgcgcaccctgcacggtctgctggacgtgaacaaggacggcgtgatctcgtacgacgatttccagctgctgacgcaaaagttcaaatcgctgggccacctgaacgaccaggcgaaggcggaattccgtgacattatgaagcgcacctggacggaacagtggggcgagattacgccgtacaacctggtgacggtcgagcagtatctggccgatatgcaccacgtggtgaatgataaggatctgcggaagaaggtgcatcgatttttgccgtatttgtacaaggccgtggacaaggaccactccgggtcgatctcgctggcggagtttaagctgtttttccgctgtctggggctgacggaagagaatgcggccgtttcgtttgctgtgattgataaaaacggggacgggcagatcacgttggatgagtttatcaagctggggcgtgattttttgctgacggagaacgaggataatgtgtccaagctgttctggggaccgctggtggagcattga

SEQ ID NO: 418 - DNA, 1994 bp, Culex quinquefasciatus
atggactcaacgctggacaagaagctgctcggctttcgccagatcgcacaggaaaagcttcgcaacatcctgtactcgattccgctggaaaaggacctggtgatcgaaccggccctcatcaaacccctggaacatgtggtgggtgcttcgtggctgaggaagaatggcatcgacaagatctacaagtttgacccgaagaacccaccgcccaagcggaagcagtttctgtactttctgagcgcgaatctgttgcagttcaagagtgcgctggaccagatcagcagcttccagagtcaaacgtcgagcagtttgatggtggcggaagcggatcgtaccggccacgggcagtaccacgtggtggtgtttccgctggtgttggccagctttgagcagctgttggaggaggaaggcttgtacgggtcggttcagctgtacagcttccagtgggactttatcgcgctggaccagggactgttgagtttggagctgccgaatgtgtttggcgatgtgttcgtgcgggaggatcggtcgatgttgggctcgatcgcgcagagtttgagggtgtttaatatggtggcgggtaggccgaatatggtttttaccttgggggagaactcggagaaggtgtttcagatgatgcagaggattgacgcggggaagaaggtgaagagtggggcggggaaggatgtgcctgattttagtacgatgctgatagtggacagggatcgggattatccgtcgtgtttgctgactccggtggtttactcggggttgctgctggaaattcacaaatttgtgtctgggtcgttgacgattgagtcgtctgggaataagattaagagtgggaagctagcgattcttcagaaggatgagccgcagaagtcaaaacaggagagtacgaaccttcggatgaatgccacgcaggacgtgatctaccaggagaacagatatcgacacttttcggaggtgatcggattgttgagttcacaggcgaaggcactcggactggagggaaaaatgtactctaaggatatgaagctgtccgaaatgaaggactacgtaacgaacaagttgccaaaggtggcggctcagaagaaggaattgtttaaacatctgctgctttgcgaaaccatcgtcgatgagattggcggaaactttgagaagcatcaattgattgaggaaagtattttgaccaacacgaaccgcaagcaaatcatgtcctacattgacgaactgatggcggccgatgcccacaagtacaacaccttaaggctgatttgtctgtaccacgtgacgttgggactgacgagcgaagacatgaccaaactgatgaccgcctatctgaacgcgttcggatatcaccacctgactgtgttcaacagtttgacgaccgctcgactattccccgacacgaccaacctgaccaaggcgaaaattctctcccagatttcaataccgatcctcaaatctccctttcaaatcgaagccaacaagctgaagcttctccccaccgattcgaacgactcgaacaccccggtcagctctcccaccagtccaaccggatcgggcaagaagcagcaatgcccaagctacgtcttcaacggcaactacattccactggtggcccagctgagtcagatgatcctgagtgcgaccagcttcgacgagctgaacaaccgcttcggccatctggaacgactcaagctcggcggcaagaactttgtcccgaaaacgattcgcgagctgtccatcacgagcgccaaagcggaagtcaaccaactgctgccgctcaaggcgaagacgatcttcgtgtttgtggttgggggtgttagctacgctgaagtggcagcctgccacgtggttgagaagtggaccggcgggaagatcatcctcgcgtcggatacggttctttcggggtgcgatctgattgagagcgtggttggttgttgagttatgaataaaggacagtttctttcctggaaaattaatcgcgc

SEQ ID NO: 419 - DNA, 2874 bp, Culex quinquefasciatus
atggcccaaccgtacgtgatccgggtgatggaggagatgggatggggcgcggacggtggcttcatcccgatcgccaacgaagccaaccggaagctgctcgagtacgtgaacaagctggcggaacggaagggcaccgtggcgggccgggttcaggccagcgatacgcggttcgggaacctgcaggtgcacctgaagagtgcccagctggagttcgatcagaacctgaagctgctggcggaggacaagtgccagatcgacgccgagcacgggcggctgaagctgaccgagaacgagggagggaggatgcggaagatggcgcgggaggtgcagtacgagcgcggggacctggagcagcacgaccagcgggcgcagaaggacatgaagaagctggcctcgaacatggagcgcttcaccgaacgcatcaagtgggccaaagcggccctggtcgagtggaaacaggtcatgggaaacggcgaagagacgaacaagctgatcgagaagtactgcaagctggacgccggtaaggccgaatcgctggaggcaaagcgcaagatactcgaggacaaggtgtcgaagcgtcgcaccacgctggtggcgctggccgaagagtaccgttcgctggagcaggtgctggagcgcacgtcgcagctgtacagacaggcgcacacggaacggcggcatctggtgctgacgtggaaggaagcggtcaagcacatgaaccagagggaggaggatataaaggaggtcgagggtgaaattgagcgtgcaagggagtttagcgatttgctgggtgaggatttgaaggcgcaggatgagttcttggaggaacagcagaggaacaatagggagattgagttggggattgctgagttgaatgtggaggtttctaagttgaggaatcgtttgagtgcgttgacggataatgtgcagctgaagactaatgagtatcagataacgcgtaaggcggtgcagaatgtgtcgaataagctgacgagcatgcgtaacaagaatcggcaggcgttgatggaggaagcggagaaggaacgacagattcatacgaatctgagtcagctggaggagttgagggaaaagtttgaaaattttagaagtaagacgttgtgcgcgcaggagcgtttgaggcagctgaacgagattgttgagcaggaagagcgtcagatgaaggtgctgagcgatgagacggctcgactgtcgacggcgctgtatcgtgctcagtcgcagcttgtggcgatgaaggacgaggagaagctgctgcgaatcgaggttctatcgacggagtctggcatcgggaagatcaaggcggcgatgaagatccaggagcgggagataattcgccagacggagatttcgtacaatgtagattacaacattgagaagctggaggaacggattgcaaacatgaaaggggagaacaagcaggaaggagcgaatcgtgcgcacgcgaagctggttcaagcggaagcgatctacctggcgaggaagcagaactactcgctgctacaggcgcagattgccaaggttcagatcgattttcgtaatttgaactcgatttatcagcaagattacgcggagattgagcggatggttgggaagctgaaggagaagacactgattgtggagggtggcgagaagaagctgcgacagtgcactaccgagaatcaggaacggttggttgagaggagcttgctgaagatgcggatcaagcagatggaatcgcgtgtagataagcagaacgacaagatgtacacgttggagcggcaccggatggagctagagacggccattacggagcggttgattgatatcaactcgcagaaggatatgctactgttgaagaagaaatatctgcatgatgaacgggcgacgctgaaggcggacataagcgagagggcgctgaagattgagcagttgaagaaccgctacgatctgtcgctggacctgttgggcaagaacgacgacgggacgattgtgacggcaacgcagatcaaaattcagaacgctcaggagaagtacatattgcttcgagagggcagcgaactgaacgtaaagatcctcaaagcggaggaagatttgaaggcgctggagaacacgttgaaggttatgaacttttccaatgagagctataagcgcgggtttcagaaggtggacgaagacaatccggacattcagcagttgaatcaaatccagaacgattactgtaaggcggtgaccgctctgaagagcgttcgtacggatttggctttcaacactgagaacctgcacaacctgaacgaagagcgggaggaaagtgacaaaggactggaagctgcgcagaaggctcgtctcgatagcaacgacatcttgctcaagatccagaaggaactgctcgaccaaaagacgaaaatccaacgcgccgagcgagaacttcgcctagcgatcaaagccgccaaagccaaaaccaacgacgaagaactgctgctcacgttccagaaggatctgaacctgaaagaactcgaggagcgcaacagcatggcgatgcatcagatcgccgacctggtcgattttgccccagacctaaacccgacggtcagcaagtacttttacgacaagggactccgcctgccggtgattcgtcgcaccaagagtcagatctcgtggcgcagcgaaaactcacccggctcggacctgagcggacgcggcgacacggcgtcgtccaaaccgatgtccaaaatgtcggcctgctcgacgtcgacacgctcgtccgattccgacattgccaaatcgttcgacaaccggatgagcgcgggtctgtcggtgattctgattgactttcccggggccagcagcaagaaaacgcagggaacgatgaagaagtag

SEQ ID NO: 420 - DNA, 501 bp, Culex quinquefasciatus
atggcagacttcgatgcgatctacgaggagcaagaactggccgagccggaggacctggacgaggcccacgtccagatggtgccggatccgattgtgatacggggcgccggaaacatgacagtcttcggcctgagcaaccgcttcaacgcgcagttcccagccggtctggtgtcgcgcgtcgcccccgaggagtttaaggccaccatccagcgcatcaacgccgtcctcaagaagacgctccccgttaacgtcaagtggctgttttgcgggtgcgtgtgctgctgctgcaccctcggctgctccctgtggcccgtgatatgtctgagcaagaggacacaacacacgatgaacaaactgctcgagtgggagaatagtcatctgtaccacaagctgggcctgcactggcggttaagtaaacagcagtgcgactccaactcgatgatggagtacgtgctgctgatagagtttatacccaagacgccgatctaccggccggattag

SEQ ID NO: 421 - DNA, 2190 bp, Culex quinquefasciatus
atgggaagcttgccaaatttgaacgagctgacgacggagcggttggagcgccggttggaggagcgggaacggatgcaggcccgtgaaaggatcatcgagcgggactttgcccgggaccaacgggacggtggcggagcaggactgcgcgggctggaccgaccggtctttgtgcaccagcaacagatcgccgccgccaaaaccttcttccagcagaaatgccctccctcggcccggaaggtgatgcgcacgcgaagttccggccaggcccaccacatctgggacgatccgttgatcgagcaattcatcaccaactactcacctgcctcgtcacgtagccatcgcctggcggtggcccctcccctggcctacggatacccgtttcagagttcaaccctgggcaaccggaggcgcgactcggtcaacagttcgattggggcgacttcggtgcgccgactgctgaccgtgaacaaccgcagctatgggtgccggcacaagattccaacgcacgtgcggaccaaggtcacgaagaactttattctgctcacgatcgcccacgggttgttgtgtatggtgttggttccgatgctgggactgcaggcttcgaattccacctggttcgtgcaggaagcgtggctgccgatgggaccggacgtcggttcgggactgctcagtttggcctgcatcgtgacggcactgatgtgcctggtgacgaccaagatcctgcggagatttggctactcgatcgtgctggcactggtgtatggtgggctgtgtgtgttcttggcggcgcacatttatccggttctggtttcgctggttcctgggtatttgattctggggcttgttcttggaccttctgtgatctgcaagcaaacgctggtggtgtcgatggctggcaagttgagctgttcacagccggaatgtgggggaaacagcatggccggcatcaacgcggacagtttcgatgatcacaagttattgtgcggcaaggacgaaactattcgaaggttgggacgatggtacaaagctgccggggatttcgggatcatcctgggaaccgtcatagcgtccttcatcctgacgtgcgcttcgtcgaacggtactggatgctattacatgtcgccgctgccctcttcaaatacctcaacgacgcagcagcaactcaacactagtgccggaatcgccttcaaccacgtggacattgccccaacctcagccagtagcgtcgcaaacctacccgaaccgaacccaaccaccaaagtgaccactccgggaatgcccagtttcaaagaaacgctcttcttcctgtacaacatccggctccagcatcacagcaaagacgaagaagaggacggtttccagctggaccggtttccgtacagcacgttccagaccaacgaccacggcgaacggatctgcgggtcacacctctgccccgtttgggatcggaacatcccgatcaacagcagtgcaatcaactcgctgggcatgcaaacctacacggggacactgccgctgatgggactgtacttgatcggtggggtgattgcgctgaccgtgaccgttttcaccacgcacatcgagcacaacgtaaagttcgattcgatccgaaagatgaccgatacgatgctgtttgcgggaccgatggcgtactttatcgggaccgagcaggggtatatgctggcggatttcatgaaggccttcgtatcctgcgagctcggcccgaacagcgtcgccggcgccatgatcggaatgggggtgatgcagctgattgcagcctgcaccctgagcatgctcctgcgccacaccaagcgggtcgtcgtgataattgccggtttcatattccacgcctgcctgctgctagttctgctccggtggaagccctcgcgcgacgacagtgccgtcctgtacgtcattccggcggcctggggcgtctgcaacgcggtctgggaaaccctgaccggagcgctcgtaaccgtgagccactcgaccaaggtggccgaagtgatgtccccgctgcaggcgcttcgattcctcgggctcggaatcaccttcggtgtgcacggactgctctgcgaagcgccaaagatcatcattctggccatcctgctggtcatctcggtgattccgtacaccatgctggaactgaagctcgaaagccaacggaaagccgccaaagtgaacttatga

SEQ ID NO: 422 - DNA, 237 bp, Culex quinquefasciatus
atgccgcacaaagtgaacaaaagtaagccgtcagtctgggttcagaagtcggcaatttcacccgagaaaaagcaggacatcgccgcgtatatcaagaaggagtttgacaaaaagtacaaccccacctggcactgcatcgtcggccggaactttggctcgtacgtcacgcacgaaacgcgtcactttatctacttctacctgggacaggtggccatccttttatttaagagcggttaa

SEQ ID NO: 423 - DNA, 585 bp, Culex quinquefasciatus
atggagaatttgacctgcgccacagttaaaggttctgctgtggacatgtactttcgccgtcaggtggagctttcgaacatgtacagaaccatggaggctaacaactatgagaccgcggaaaaggctattcaagatgttaaagatggaaaactaatggcattcatttgggactcttcacgattagagcatgaagctgccaaagactgtgaacttgttacagcaggtgaactttttggcaggagcggatatggaataggactgcaaaagggctcaccatggacagatgcagttacgttggcaattctggacttccacgaaagtggtttcatggagtcattggacaaagactggattttccatggaaacattcaacaatgtgaacagtttgaaaaaactccaaataccttgggtttgaaaaatatggcaggcgtgttcattttggttggagctggaatagttggaggaataggattgatcataattgaagttatttacaagaaacaccaaataaaaaagcaaaaaaagatggatattgctcgcaatgccgctgacaagtggagaggaacgatagagtacattgcgtga

SEQ ID NO: 424 - DNA, 876 bp, Culex quinquefasciatus
atggccaccctgctattagtaggaatgctcaacatcggctttctgctgtacttcaccgcgcgccgcatcctgtcgcagagctcgttccacaccatcatctgtatgggctcgaagctgttctcgatcctgatgatcatcatcttccactacggaatcgcgcaggtctacaactactatctgttttgcttcgagcaaaagttcagctttccggcgcacgtcaagcagtacgcgctggaccgcgggctggtcctggccgggaacaagacggcggagtcgtcaccctggtgctcaaactatttgcctttatcttactcttacgtacaaagccactattgggatgtaggatttatgaactactacgagctgaagcagttaccgaacttcttactggccttacccgcgatttatctggtgctgagcaacgcgtacaagtacatccacgacaattgggacttttgtgcggggctcggtctgttccgggtgcagaagaagcagctgaagagcatgcggaactacgaccgggtcgcgttcgcgttcgtcgcccacgcgctgtttttgacgctgttcagcgtactgtttgtgcacgtccaggtgacgacgcgaatgctggcctcgtcgagtccgctgctgtactggtttgccgccgagtactttaccggtgataaggccttcatccggcggcaggtcatccggaagctgtcgaaacaggtccgtgacggaacagagccgtgcacgcacgtcgaaaactacgtcgagctgagcgatattctcgactttagacagatgaactggaagcagaaggcgatcctggtgtactttgctgggtacgccaccgtcgggacgatcctgttcagcaactttctgccgtggacctaa

SEQ ID NO: 425 - DNA, 324 bp, Culex quinquefasciatus
atggaatctttctttcgaatgcgccgatcatcccatgctccaagcgccaaccaagaaccactcatcgtagtcgaagaatcggaaaatctcgaaaaagaagaagaaataagccatacctcatctcctcgccaaagtttggatattgattctccggaaaatccgtacctgctgtcaccatggcgcgatccgcgagaaacccgtaagcactcgttgccaacgcctccatgcacgagtggcatcacagctagccaggtacttatgatacgaaacaagaccctcctacccagtcaaatcaatccgaattctgaaacggaatctatttag

SEQ ID NO: 426 - DNA, 309 bp, Culex quinquefasciatus
atggaatctttctttcgaatgcgccgatcatcccatgctccaagcgccaaccaagaaccactcatcgtagtcgaagaatcggaaaatctcgaaaaagaagaagaaataagccatacctcatctcctcgccaaagtttggatattgattctccggaaaatccgtacctgctgtcaccatggcgcgatccgcgagaaacccgtaagcactcgttgccaacgcctccatgcacgagtggcatcacagctagccagaattatctactgatttttatgtttgctaagaaacaactaattatacctgcagcataa

SEQ ID NO: 427 - DNA, 315 bp, Drosophila grimshawi
atgggtgatgaggagaacgtcaaggagggtgacaagaaaatcgtacacatctatccgctagtcaagcactctgatatgaaggaagaaatgcgtcatgaggttgtcgagttgagcgttagtatgtgcgagaaattttcttcaaattatgagttagttgcaaaaatgataaaggagagcatggacaaaaaatttggcatctattggcatgtagttgtcggtgagggattcggctttgaggtgtcctatgagactgagaatatactctatctattctttggtggcaacttggccattgtgctgtggaaatgctcctaa

SEQ ID NO: 428 - RNA, 9 nt, Artificial Sequence
  oligonucleotide sequences that can be used to form the SiRNA loop
uucaagaga

SEQ ID NO: 429 - RNA, 9 nt, Artificial Sequence
  oligonucleotide sequences that can be used to form the SiRNA loop
uuuguguag

SEQ ID NO: 430 - DNA, 1305 bp, Aedes aegypti
atgcccggcaactttggccgaaacgacagacatgtgattctcgttcgctccaaggtgggcgactcttcttcgttcgaaagggaattttaccgccaacgacaggtcaatctggaccaagaaggaagctacctggcggtgttccgaccggtgatcatacttgggcaggtgtttgccattttcccggtggttggatatggagtcgccttggccgaacgtatccagttcaagtggtgttcccttcggatgctgtacacgatgatgtttcaattaggtggggcgatcatgtctgggttttcactggccactttctggacgacgggagttgaattttcgaaaattttatcttggatgttctttacgatcaacctatcgattacgatcggattcacggtgttggcccgccgatggtccgccatgatgaccgaatgggaaaacaccgaacagagtctaccgtttcgtcctcagctgacggccagtaatagacgggttcgccgcaaagtgataaccataatggttacgctcatgttgagtgccttattcgagcatgctttggccaagccttccggactctaccgggcgtacaaatgtggcatcaaagatcttctggaggctcacctgatgcaagcgtttccggaaatgttctccttcatcccgtacgacatctacgtgggattcgtggcccaggttgtgacctcggtgttgaccttctactggaactacgtggatctgtttttgattgtactcagtatcggattgcggcaaagcgtccgccacgtcaacgagataatactgaactcgaaggcacaataccattcggacacgttttggcatgactaccgcaagcatcaccagagagtgtgcaatttggtgcacattgttggtcaaaatgtagcctatctggtggtaatttcctttgcgaacaatatgttcttcatctgcattcaactgattggagttttgaagccctatcctggtatcatagtcgcgatatatgtgtggtattcgctagctcacctgatgactcgaatggtaatggtggctgtatacgcagcagccattcacgacgaatcgagaaggattctgccaacttttaggacacttcctacgcaatattacagcaaagaagtacaacgctttcatcaacagatggagaacgaaacggtagctttatctggattcagatttttccatctcacgcggaagctgatattgaagatatcgggtacgattgtgacgtatgaattggttctacttcaagtgaacgacgccgaagagaaaaacggagaccagaatccctgcacctag

SEQ ID NO: 431 - DNA, 2892 bp, Aedes aegypti
cattgttgtgttaaaatttgatctttcttttcgcgttcagcgtaattcatccagtattctctaatttattgctaaattgtagccccaattctataaatttccatcaacttattcgtacaatgtgtgactctgataacgaggaattcgaaagtgctgatgaagatttcgaggatgtgaaaaaaacgcagaaggtcgacaaattgaatccccttcctccggctccaaagtctgacgtggagcctgcaaaaattgatagcgatagcgctagcgggaagctgaccatagatgacgatgttggtgctgaccttgaccggctcgacaagtccgcagaagaacctaagaaaagtgcagttagaaaaattattagacccgataaagagcggctgaaggaagccaaactggttgtggccaaggctggaggagaaccgaaaactgcagtgaagcagctggagcctacaacaactggcgatggctgggatgacttcgatgacgattggggagatttcagcgtggattcgagttcgggctctaagaaaaccaaggaagtggaccaaaagatagcgggaacgtacgccagctacaaggatgtggacattgatgaggtagaaaacaagctgaaagattttatgaaaggacaggacgatcctccggtgagttccgtgctggatcgtttgtctaatcagcaggatccgagcaagtcggcagcggcaggacaatcttggagtgggtggaaacccagctggggtggtgctgctgtatcgtttctttcgtcagcgtcgaaaagtgtcgcctcaattacgaccaacatttctcaggcgattgaatcaggaattggtgtccctacgccggaagagatggctaagcgccaagcggaggaaaaagctaagctcaaagctgatggttacgtaccggaagagagtcaaccgagaatcgaacctggaccaacgactgatcgctttggatttgatcagatcgtttcgggtgtgacccagataagcagtaaagtcattaccggtggattggatactttggaagggatcggtaagaaaacgatgacgattctgcaagagaacgatcctggattgctgagtaaacgaatgaacgatggcgtcgttttgagtcaggtactgcgtgaagccaaggaaaaaactgaagagcgcgaaaagaacttgaagcaggtacaaaagcatctttacaaaaagaagctacactttgaaacccttttcgatgattatcacggtttggtgcacttagaagctctggaaatgctttccaagcaagcttctctaaaactggattctttaatggtaccacttactggaaatgccctcgaagagttacaagaaaccatgaacgaagtcaaggagctttgtgaacttccggattcggaaaacgacgacgctgacggtacccatagcgttgaagagttggaacaaaaactcaaggaagccgttacggatctggatgaggtgaaagtcgacttacaagatctactaaaatgttggcaagagaacctcgaatggatcgaaaatacttcaaccgtacgatcatcacaacagatcttcgaaaaggccttgcatgcactcgcccaaacaacagctctgtgcgttttgcggatgcacaaattggccgaaattctgctaatattggatcatcacagtacagccaacgaggccgacgccttggtccagctcactaccgtgttttgttggcacttgagcggagtggcagcacgcttttcagcggagttgagtaaactgaaagcggaccatcaaacgcgccggtcggcgggagaggatagcgataacgcactgataacgaacattttcttagagggttccaacagtacttcttatgtgcagaatgctttccaattgttcatcccaatactgcaaatcggagcagcgtagtttgcattcttctagcatgaacgcttataaacgcgagtgtttctaatctaaattcacggtgttttatcggtttaaatatatgaaagtttattactcttctcgtaatacctatttaattattctgaaagaaaacaactatttaactgaagtgaattccctctgaattgaacgcatgtaggactgccataaagtcatcgatatccatggtccgagctcgtttggcacctgcatcgatcttcgccaggatgccttccaccttttccttgatgctgaatccctctggcaaatcttgattcttgagtgaacattgcattttgaagttctgctccagtgctgtcatgaccgaggtttgcttgaatgctgccgccaacgttttattcttgcgcaggaaagctatcctcgtaagaccatcccactcggtgtagtttatgggaggtgatggatttctcggctcgattcgcaccacactgctctccacttttggcgggggtcggaaattgttctttcccaccttcatcagcatatcgacgcgagccagaagttgtgtgttaacgctcaatctacagtacaatttgtcccctggtttggccaccaggcgttgagcgaattctaactggaacatgagcaccgcgcagcggaagaacggtctgtgcagtaaaagcttaaacacgaacggtgaactgatttggtagggcatgttagcaacacaacagtcgaaaaacggcaaatctgctttcagaacgtccccgataaggatctgtagcttcgattgcattggagtgccctgaacacgcttctggagttctgccaccaatcgaggatcgatttcacaagcaacgacttttttgaccttttccaacagcttcaccgtcatgttaccggtaccgggaccgatttccaggaccacatccgttggccgcaggccggccttgtccagcatcgatgtgacgatgaggggattctttaggatgtgctggccaaa

SEQ ID NO: 432 - DNA, 1268 bp, Aedes aegypti
gcaaacagcaacaaaaggcgtgcggtgcgaagaaactttgcgagtccgaaaccgatacagtaattttgtggttttcccgtggaaaattttgccgtggtgatacaatctcactgtttggttggttctcgtggaaaacttgttcgcaaccgtctcgtgcacttgggacgatcacttgccctcgaaaatctgccagtcctgccaactacgcctccaagacgccttcaatttcataatggaatgctgcgataacagcgtgttgctcgaatcgtttaaaagggaagccctcgagcatttcttcagagcaaatcggatagaggtgaaggaactgctgaacgacgacgatgaggggtccgaactgggagaatctcacagcactctgcaatcgaacgcggtcggaggaggtgccaaagaaatacttcaaatcgaacgtctggaaacgccgaacgataacttcatgatattcgaaatcggcgaagactttgaaatgcaacagcagcagcaaatgaaagtcgagccaccggaagagctcgtaacgacacatgatgaatcgactggtgaagagattgaaaccaatgccgtggacttcattctgaacaacctgaagccgagggagagaaaacgaaacagcgctacgggatcaaaacgaaaagctgcatcggataaggcctacaagtgcgaggtgtgcggcaaaaggttccaacgcaagtccaacttggtcgaccatctacgattgcatgccaacgtgaagcttttctcgtgcagctactgcagtgcatccttcgttcaggccggtaacttgaagagtcacatccgtcgacacaccatggagaaaccttacaagtgcgagtattgtggaaagtgctacactcagtcgagtgccctcaaaactcatgtcagatctcacacaaacgagcggcactatgtgtgcgacgtatgccagaaagggttcactaacagctccgatatgaacaagcacaaaatgacccattcggatgtgcgcttctaccagtgcgttgtgtgcgtcaagcggtacttcacgcagaaggtacacctgaagaagcatctaagcacgtaccatcaggatggtgattttgacgagctactgcagcagggcaccctgaaggaaggcgtgaatgttgcggttaaacctaaaaagcaggtcgtatcgcaagctatcgatgcgtgaagtgtatgcacaagataatcttaagatgaaggctctttttgtacagaaatataaccactgaagtactgtgaactgaactacg

SEQ ID NO: 433 - DNA, 1663 bp, Aedes aegypti
gtgtttctgagtgcacgtttctcaaagctccccttcccatcactaagagctacgtaatttatgaatgagcccaccacacaaagcaaccagatcgacgtataatcacctctatctttctaacctgctgcatatatttttgataccgtctgatggctactattttggaagttacgtccgtgtgatactaaacgcgatagttttattttggttttcaaatttaaaaattttaattcaaatgtcagtacggtccatacgctatacgcgtacgcttcatcgtccattttagcttatcaagctcgtaatcttggttatcttcgttatcgaatgaacgagtgatcaataaattgcatcgttctcttgtacttacaggtgcgagagcagtttgcaagttaatcagtgctcattaaagcgattaattcgctgcttacggttgcagtaatgtagttcactgcactctgtaagcacacaagcaacaaacttctcccttcgtgtaaaagatggctagtcagctgggatcgttcgtgttcttcgatttggaaacgacggatctaatcggaataaaaactccgaaaataaccgagatttcgctgatagcatgttccagaaaacacttgttggatacaaagcgaggcgaacttccaagagtgcttcataagcagacgttttgccttaacccgcagcgaatgattcatcccagagcatcggaaactactggactttacaatgacttgctcgaagacgaaagtaaattcgacgagaatacagcccagctgatagtgctgtttctgcggcgcctccaagctccgacgtgtctggtagcgcataatggcaaccggttcgatttcgtgatactaaaaaaggaactagagtcattgaatgcacaactaccggatgatacgtactgcgtcgattcattgcccttgtttcaagctttagaacaagccagagaacagaaagcaaaagctgcccaggaaaatgcggataatgaacttgctgatctcgagttgtgcgctctcacggccatggaggagctagagggcagtccgagcacactgtcactgatgcaaaaacgtaatgaaaccactcctcaaagaggtaaaattacggaaaattacaaaagagcattacgatcatacttggacataactccatctcaggacggaacgtcctctcagcgaagaagcccgccacgatccaaacgacaacttttccccgatgataaatcagtaatggatccgtcgtctggtgcagacacgccaacgacatccagccagaaatcagcgaagaaacgatttcggctttgcgacgttcacgaaagattacttggccaggcgcccaaaatttctcattatgctgaatgtgatgtgaaggctttgctaaagtgtgcaatcgccgagggaccggattttgtggcttacgccgacgagcatggcgtaaaatttaaagacttctccggataacatctatcgttctatgtagttgtatattttggatgcttttactttcaatttattttgtattattagttgtcattcccgtagatagtgcatgcacaatttttacgtattttttggtctaaattttacttccaaatttaaaaaaaaaaacacgtgatacatatttcaggttaagaacaataaaatatggcaattttatatataaa

SEQ ID NO: 434 - DNA, 3538 bp, Aedes aegypti
gtgagaatctgccaacactgttagaattgcattttgatttacgctgtcagttgacattgcaatcagcgagcaagtgcaacagtaaaacgaaaacagagcgcctgcagtccagcagctgtggaaagtgcataccaaaggatataacggaacaccaaatcaacagaaaaccagcgcagaaagcatcagaacgtaaaagaatcggaaaggatcggacttaacttcttgcggaggcgtttaaaagtatgtatttatccatagctggtcgatgtgtgccgtgaagcaatttgattagaatgttcttatcagcaagattggagcataatagaaagaagtgcaactagtgggcgaatgtttttctgacgcgtgaaagcaaaagtgaatcgctgctgcagtcaaaagtctgaccacagtttcggaggaattaactaaagaacgtgaagaaaaggagagcagtggtgtttacgttttgctgagctttcagtttttgttggtttaaaagcgaaaagcagtacgcaaaaataaactaaagaagattgtttgtcgtcgtgtagtagagttaaaatggagtttgccgaactgatcagaactcccaagctggacggcgttcaattgtacgagcagccgcggcgggagtccatcgatgggacgctctgcattaccggccatcatctgatcctgagcacccggaaggaaggcgcccgggaactttggttgctgcaccaaaatgtggacatagtcgaacggaaaccgtgtatcgttaataatgtgctcgaaggtggaaccattacgctcaagtgtaaggaccttcggatcatccagctcaggataaactcgccgcaggaatatttcaacatttccaattcgatcgagcagctttcgaatttggaggaaacgaaaaagctgtacccgttcttctacattccgatgtacaacgtgatgcaggacggccacaccgagtataccatcgagactgagtatgcaaagctgctggccaccgatgagtggcgtctgacgacggtcaaccaggatttcaaagtgtgcccatcgtatggagcacgattgctagttcagaaatcaattagtgacgaacagatagtacaatccgccgcatttcgcgatggtggacgattcccactgctggcctataagcataccaatggagccgtgctgctccgatgctctcaacccctggcagggcccggagtaaaacgatgtcgtgcggatgaggccattctgaattccctggtcgagcccggtgggaagaaaggttgcattttcgacacctggggcaaaaccaagaacaccaataccgaaatcgaaccgcactatccgcagtggcgtgtgcttagtagacccatcggatcactttcgtccatctccagtctgctagatagtttcgtcaagttgatggaagcttgcaacgatgtggcctctagttcggatcggtggctgtcccgattggagagctcgagctggctgagcttcgtgctcaacgcgatgaacgtctcctgtgtggttgcgcagtgtttggccctggagggagttcccgttgtggtgcacggtggcaaaggattggacacgccactcattgtcacatcggtggcgcaaatcatcctaaatcccgactgcaggacaataaaagggttacaagctttaatcgagcgggagtggctgcaagcaggatacccgttttcgactcgccacaaacattcctgctacactccgtcgggtcagcgacacaaaacgtccagtgcgacgttcgtcctctttctggactgtgtattccagttgtatcaccagtttccgtgcagtttcgagttcgactcgcgctatctgatagtgttgttcgaacatagctacagcagtcagtatggaacatttctcggcgattcggagcgcgaacgagcggaattgagggtccgcgaaaggaccaccagtctgtggagctacatcaaccgaccggaagtgatcgacacgttgctcaatccgatgtacatcccgaatgcggccatcatttggccatcggtggccccgctcagcatagttctatggtcggaggcctacacgcggtgggtgatcgaccaaaccgtactgcgaacaaaccgcgatcgcatgctgggaatcgtcagcgaagagcgcgaactggagaagaaagtcaaaaagcttcgccgggagctggcggatttgcagcaggagtgtacccggctgaagttggaggagatgctgctgtccgacgagggcggcaccgaggaggacgacgtggacgccagttacagtaagtagaaactacaccatcgtacccaggagataagcctctctctttaagtgaacgtgaaaccgtgacattcccttgtccgcccttttacccggtattaatggatcgccttcataacatttagtgtatacatagcgttaagctgtaaaccaacctccttcgaaaaaggggggcaatatttgactaacgtttgtagtgaatggatctgtaggcagatccagcggtttagttttaggtgctttattttcgaaggcaatctcttacaacttgtttcaatctagtcagttaccaaccttcaagacaaactttagcggaaggtttaagaaacctgccgaggaaagacaaataattatgatttcgaatcgcgcatgaccagtgcctaacaagaagtagtagcagcagaggacatcgtccgggatatccgttgaagtgatctttttcaagtgagtaatgcggcatgacgaatcttgacgaaataattgtttgataaaaacggtttaatttggaataaaatctaccaatctgatccctaatctcatattgtttgtcgggctgtccttgttagtggcaacattttgtgaaatttactctatttatacctagcagatagtcagagactctgagtttgtcaattccgagattaccgcgaaacatggacatcagtcatcaattctaactctacaaagactgtcaaatacaggtaattcaaggactcacgtgaatgctggttgctaaacaaattttatggcttgattcggttttgctgctagtacaaaaccgcttttttacttttgtttttctgggactaatctaaaggcgaaacaaggatgagactagagttccgttgcatggtcaaacatcaacggtagcgatctggttcctcagaaatcaaatcactgatgcttgataaggggcgaataaaaaataaatgtttttggcaaaatacctacagagtcagattaactcactgcattctgaatgaaccatagagagttacaaatagatgtgtaatcacagatttatggacgaaacacttgtatgtttctaggggtgaacccaaactgttgcacgaaatccattgaaaattcctgacatatttgataacagttttgaataatctgttgtaccggtgtttggtcaatggctatctgacaaaactatcgaagagttcctagtgaaattttgaaagatattttttccacggcccacgttttagatattttagcaaatcagcagtgttttttcataagggcctatctgcat

SEQ ID NO: 435 - DNA, 2145 bp, Aedes aegypti
gtcaaattttatgctcgcatgttgcaaacatcacaaaacagttgccgctacttgtttctttccgctgttttcaatgtaatttgttgtttcaatagttgaacagaaccgcaaactgaaccatggaagtgctgtctagcgagaagtatttgattgcacgcgccaaggaaaccacagatccgtacacagccaaagcatggatcatcgctgcgaaaacgctctttccgaatgattttggcgttcagtttgaggcgtacgaaatcgagaagaatgctaacaattttgaagaagccgctaaatgcttgagctacataatcatgaccttccaaaatgcgcatcaaacgccggccagtttgttgaacgaaatctcgctgatgacgtcggctttgagggttccggaaggcacgaccactcccgagcaggagttctacgtcaaaatgttccagtatatttcgtacgaggtgcagcacaagattctactgctgacggctgcccattccaataataacctggaccattgccgtctgattttgttgctgctgaaccgctttccacaagcgatatctactcatgctcctcgactgctggaaaccttagtccaaaacataacgattcctagcttcaaggatatgctggtacaggaagcgattccccttgtgtacaacagaccaccggagctaccgagcaaactggtccatcaaatcatggcggtgtgcttcgagtactacctcaatcaaatgctgaccgaaactgaggataaagcacgtactattatggattgttggcgaaagatatttgaaatactggagttttgtgggaccattctcaagtgggaaccattcgtaccgtacaagaaaggatggagcaaagatatctactggcagaaaatcattcaaatagtgcagtcagcaccgccgaggccttcagagaacaagcaaattctgttctgcgccacgatcgtgttcgtgctgtcacttcaagagtacattaatttctcccgattgaaaggcaaggatagcgaggttgaggtaattttggttgaaggattgaaggatttgaaaatagacgtaaaacgtcggcagatggaatctgttctggaaattccgcaagtcgttgtaaacggtccggtcaatcccgatgcgccaaattgtttggtaacgtcgtacaactgttggcagttgttgcactcgaatgaaatcttgaaggccgatttcactcaactcattattcgcataccggctttgtcaatgtggattcaaaaattcctaatcgatttatcggtttatgtcggtcagcacgaggaaacacactcgttgcttcaatctcaaaacgcacgaaacatgtctcagttggaaaagaacgttcgcctatttgggcttgccttggtacaaggaagcatcaatgtgcatttattcgaactaataaacaacataattcagaaccttcccaccaccaatggacactatctgcaaaatgttgcactataccctgcaccgcgggtcttgatgttgatgccgttgaccaagcgtgctatccttcactacatagtccaaacgctcatcacgctgctcaaagccaagctaagcgatccggattgttccaacgccgtaatcgggaatcttttggtgctgtgccagctgaactggccccacgagtcaactatcgtggaggttattttcgaaatcatcaaatcccgccgccagtttagctaccccatttggacaaattatgtggtgaatgtggaaattgttgaagagtttatgtacttgtggcaaaattgtccggatataaaactggagcttgcgttgccttcgagcagtagcagtttggcagctgccggttctagacgaatcggaacacgtggagtggataaaggcgtgaaggaggattttaaacaggcgatcaagcaacagatcacacgtagcaatgaggacctggacgagcttgtggtgcagtttttgcaacagcagcacttgacgttgttgcagaatattttcgaaaaataattgttctgacggagtcttagcaagtaggattatacatttagaaatattattattgattaaaattttccacgatgtttttttttgtccgaaatgccattatagtgtatgtagagcctgttttcgcatttttatcgtgataaag

SEQ ID NO: 436 - DNA, 1005 bp, Aedes aegypti
aatactaacgcttaaactgtcatttgcgttgttttggtttcaaatgcgtgtgttgctttcggcatgtgttctcaaaaaataaagtgcacttttttataaatccttaacaattgtttctccggtttttgactgtaaaaatgaaacgcaaatccgaaagcggcaacaaacccgccttcgttaagcggaaaaccgaacttgtgtttgatcccaacaagcgaaaggaattcctcactggtttccacaaacgaaaagaacaccggaagaaactggcacagggcgatctccaacgcaaacttaaggaagaagtacgccgcattcgacacgaggcaaaggacaatgtaaaaaagctctaccactcatacaagccgattccggagttgagcgctgcggatcgcgaggaagacgaatacgataccgagaatgtgacggtgaaggttgttgaattatccaccacggatttggctaaacagaacaactggattggggagaacagtgccgttgtccgcgatgaggaggaaactgacgaggagcaagaggaagatcaatcctctagtgacggggaagacatcgatactgttccaggcatggaactggaaggagagaagccgaaaaagaagaaatccaagcaaagcaacgattccgaagatgatcaagatgaaccggaagacaaagtgacaccagccgccagcggaaaggagaaacgccacggaccggttctcaacttggacggtgttcgctccaagaaagagctgaacaaaaagcttaaacggcacgcacagaagtcgatgcagaagagcaaagccttccagaggtcggtgcgggtgcagcagcagaagcagctaaaggattcccgcagggtgcgccacttcaagaccaaacacctgaagcgaaggggtaaactgcaagacggggtcaaacagggaaagaagcgaggtggtggaagggattagtttatagagtttaatgttaaaaataaagaataaaaataatccacgtcgtttattt

SEQ ID NO: 437 - DNA, 9568 bp, Aedes aegypti
gacaaacggttcatcctaccgaaacgaagtgctcattctagtcgtgtgatcaaacccaacaaacggttcctggatgaattcgagttggaaattaaaaggaagaataaggcggcagctgcggctgccgctgccagtgtgccccaatcctctggggatagtagtggtacaaatacgctctcgtccaccagttcatcatctagtcctttgtccaacgcagaatcgtccaatctcgcgtcggcatcgtccatcttcggtaaaagtattctccgtcagcccaggcttcaattcactacttcgctgctgaactccaatccattggcattggccgcagcagcagctagcagtggaagtagtctagcgtccacgccaaagctatcttcgtcccttgtgccatctgccgtttcggaagcagcaccttcttcaccggttacaccaacctcttctgtacctaattgcagtatttgtggcattgcatccaacacacggtattaccaacaggcttcgaaaaagttcggaatcggttgttgcgacgtctgtcgcaaattcatctccaagatgatcaaaaaacttgccagctcatcgagtcccaccagcagtaatgcgacgatgaagtgcaaaaacgaaggtaaatgttcgataggccctccgcagaccacccgaacagaccacgttaagacgaggcacattttcaaagagaggtgccatgcatgctggttaaagaaatgtttgagcagttttcaattacctcctgtcctaaaagttagattgacgcaaacgcttcctgtgagcatgcgacaagttgatgcgactaatggaaactccaacagccactctgctaaaaaggaacacgtggagaataacattttttcgaacagtttggtcagtggccaaaatccggctggttctcggatactgtggcatacggcgaacatggacaaacctgaattcgcaaaatctaattcattcctatcgctggcaaaccccttggcgcaaaataattctacttttggcagtcccatcagactgaacacttctgataaaccatcgattctggccccaagtgctcttgccagtcccaagggtaataaaagtccttcagttcaaaaagaggaagttgtgtcaacaactaaagaaacgaaagatgaagcgctatcgaaaacagacgatacgccaacaaaaactgtcaagactaggagtaagcctgaaacgacggttgttaccaatgcttcgtctgtcccaccagatactactgttacaatgcaatcaacgaccaccacaaccaccgttacaacccccactacaaccaccaacagcagtagcaccactaccccgacggtagccacaactccaacaaacggccaagataaacgacaacgaatagatctgaaagggcctcgcgtgaaacatgtctgtcgtagcgcttccatcgtactgggtcaaccattggccaccttcccggatgacgcaacggcactcgagaacattgaaacacctcccaaactggcgttatcaccaccagccactccggctgacatggacactagcggatcaacggagaaggaattggtcattgatgaggatcaacttccggaatccaattccagcactcccactaaggaagtggaagttgccaagccaccaacaccgcctccgacagtgacgaacgtcgagacggaagtcagtagagaaaaggaagttgccattattcggaaaatcgaagaaatcgaacgaccaaccactagaaaagcaacgtcctcaattcgaccgcaaatcctcaaacagaacatcaacgctatcactaagagtttcaatacgaacattcggacaggtgcaggacagcaagcgccgccagaaattccaagcgtgccattgatttcgattgatttctgggagaactacgacccagctgaagttagccgcacggggtttggtttgatcctttcggaggaaatacccatcaaagcgttgtgttttctctgcgggagttctggtttagacgaattactgttttgtgtttgttgctgtgagccataccatcagtattgtgtgaaagacgaatacaacattcggcaggtatcgttggatgataccaatgtgagtttgttggagttgactagcaccacgatgaatgctgggagttctccccagcagcaagcattgaatcggttcaattggatgtgtccgcgatgcacggtatgttatacgtgtaatatggcgactggcagtaaggttaagtgtcaaaaatgtggtaaaaactatcatacgacctgtttggggacgagtaagcgattgttgggagcagatcggccgttgatttgtgccgcttgtcttaagtgtaaaagctgctcgacgactaatgtgaccaagttcattggtaatttgccgatgtgtaccccgtgttttcgtctaagacagaaaggtaacttttgtccgctatgtcaacgatgctacgaagataatgatttcgatttgaagatgatggaatgcggggattgtaagcgttgggtccatgccaagtgtgaaggactgaccgacgaacaatacaacatgttgagtgcgctaccggaaaatatagaattcatctgcaagaaatgtggtaagaataatgaatgtgcaaatgtttggagggatgcagttgctgcggagttcaaagccggtcttctcagtgtggtaaagttacttagcaaaagtaggcaagcatgtgccctgcttaaactaagtcctcgaaagaaaaccaacaactgtacgtgttccataagcacgggtaaaagtatatcattctatgggtttggtaacaaggatgaaggaaacgtgattacaaaaaaggcaaaactagatgaagattcgatttacgatttcaacagtgagaatagtagcagtaactcgagtttcccactgactacgaagtgttattgttccgtgagaccttccaggccatccgatatcagtctggttgagatcaagcagaagatcaatgccaacgaatactattcgttacaggatttcaactatgacatgaactctctcgtcaactcgatcgggtcggaagaactatcgacggcctataaagaatttttgagcgaaacatttccttggtttcaaaacgaaactaaagcctgcacggatgctttggaagaagccatgtgcggagaggaaatgggcgattataatcacgtcgctggtatggtcgtagaacccgatcaacgagttccgagcattgatattccattggatgaaatagatgactacttctatgagtcacccgatatcaaagataatcgaatatgcatgttttgtaaacaattgggcgaaggacttcccttacacgaatcacggttgttgtactgtgggcagaataattgggcccatactaactgtgctctgtggtccgcagaggtttttgaagaaatcgatggatcattgcagaacgttcattcggctgcttcaaggggcaggcttatcaaatgtagccattgtaacgttaaaggtgccacagttgggtgtaacgttaagaactgtggagaacattaccactttccgtgtgcgaagcaaacagattgtacctttatgcaagataagaccgtctactgcccgcagcatgcttcggaagcgagcaagaaaaagtgtcagttagagaaaaatttcgaaatcaaccgatcagtttatgtagagctggacaggcggaaaaagaaattcgtcgagccgtccaaggtacaatttatgattggatcattaagcgttaagaaactgggccacattgttccgatgttcagcgatcattctgatgcaataattcccacggattttgaatgcactcggttgtactggagctcgaaagaaccgtggaaaattgtcgagtacaagattaagacgaccatccagaacaacaattattgccatggaacagatttcggtaggaattttacggttgatcatacgcttaatagcagttcggtgtcgtggggtttgactcaaatttccaagtggcacagtagcttgaacaacgatgatcaagaaacggaacctatgccaagtacatctgggattcacagggataaaactatgaagcaattgttggaggccgttggtggacctggtgatgacaccaacgatgaagagccacagaataacaacgatcttctaccccaggaaatcaaggatgctatttttgaggacattccgcacgatattttggacggaatcagcatgttggatatactgccaaagcttatgacgtacgatgatttgatcgcgatggatcttaagaatgagaacaatttcaatgctgagatcttgaaagaagtcggtggagttagcagcagtggcagtagtagcaacagcaatgatatcaacgatataatgaagtgcagtggcgagttaagcaacgatagctggattaagagtatatctcagccaggaatcgaggatgcgttattgagtgccaccaagcaaccgtcattgagtcgcgatctaaagcgaagcaaaacagatattttgtcacgtgctgtcgttggaggacgcgtttctggacagcgatcgggaagtttctcatggaattcaaagctggagacgacggcagcagtagtagccaaacgaaggaagataagcaaacttgctgatgtactttcgcttggtagaatcaaagatgattcttctggaagtgctctggagcgaagaagatcgcttccaaatgaggaattcacttggagcgcaagtaagagaagcactggagaaaatctgagcgaaggaatgaacgttttcgagaaactaaaaatatctcaattagatggcatggatgacttttgtgatgctggagatatgaaaatatattcttcgaacatgattgaagctccagtcaaatgcgatcgttgtcacgcaacgtatcgtaatcaggaatcataccaaagacatttgaattcttgtgaagttctttcaacaagtgaaagtgattctgaaacacgatcaccaagactgctgagccctgaacagcagcaagcacagaccattaatttgaataatctaaataaccaagcaattctctcgaatatacctgcttcgatgccgatcactatcaaccagctccaatccggcatcccaattcaaacctcagctggaactcaacaaatcccgattcagggaaccctttctaacctgggcggaaatatgatcatttcaaatcaaggccaattatttgctcaaccaccggctccttcgaaccaacttccacaaaccatttcaattgggaataacttggtcaacacaggcaacacgataaatatgcttccccaacagcaacaaatcatctctattggacccaacggtcaaccgcaaatcgtgactgtaaccacgccacaacatcaacagcaacaggcttccctgattcaaaatacccagaaaaagcaaatgatgtttccgacagtttcacctaaaaagcaagtcatttccaaaatgtctcatggtccaacacccatcaaagctaagaaagcaaacccaacctcaacggtcacatcttcgaaaaattctattcatataaaaaagcaggagccgattgcaatccagcaagctccaacgcctcagcctcaacccatccaaacaattgcgcaaccgatctcggctcaacagcaacaacaaatacagcttatcaacacatcctatcctctaataagacctgctaatgccgcgacaccacaacaagctacaacaacatcggggaatcctatcatcttccaacaacctaatcaaccaatcattgtccaacaagttggtggaaatcagatttcctacgtagccgatcagaaccctgttcagtatttgacacctacaaatgtgctaactcaaaacggtttcgcaatgactacggccggagatggaactcttacggcagcaacgaacaacattcttatccccaatggagccggtggatactcgatgattcctgcaagtgctttgcaaatagcggctcctcaaccacaagtcattggtaccattatccaaccacaggctaccactattcagtgtgggatgatgtcaaccgaacaaatggttctgggagctgcggcaactcctacactggaaatggtgactgacccaacctccggttgcatgtacttgaccagtccaccggtatactatggtctggagacgatagttcagaacactgtaatgtcttcgcagcagtttgtctcaaccgctatgcaaggtgttttgagccaaaattctagtttttcggctacaacgactcaggttttccaagcaagtaagatagaaccgatcgtcgaagttcctacaggatatgttgtcttgaacaatgatggcacaactacacagcaaggattggccccaatgcaactgcagacttcgtcgggtataattcaacaagcacaaattcaaccttcgcccgtgactacattagcacctcaaactcaacaacttcaagcaaccgtcacatcgagccaaccaacgccaatacaagcgtggaaaatcgaaccccaaacttcagttgtccagcagcaacagcatccatctcaagttaacgtcatgaacccaatgaaaagtacaactacagttaagaatatcatcccaaaggctcagccacagttggtgaataaagtaatgcccaacacgctgatcaaatcctcgccagatcatataaatacttcgatgggacatcacaaaattaatttgcaatctgcggcatccgcagctgtgtacacaacgacaacaaccatggccactactaccaaggtctccaacgtaattaagcccattaccaagaccatcaatcaaaacaagccgaaaatcgtagcgaaacctgtaaaacaaaagtccttgctgctgtcacctccgcacacaccttcgcaacaatcactgcaactgaaccaacagcaaacagttcaacatgttgcccagtacaatctaccagtaagcgctagctctcaaccccaaatgcaatccatccagatcaatgctatttcaaacaccactttcaatcacgacatccaacaacaacagaaatctctactaccacagatcgagagcaaaaagaaaccatcacaaattacgatgtcgattgcaacgactagctcttcatcggtgccctccgttcctgggtccctctcgatgagcaactcatccatcacaatcactccaacgcaaaccgcaagtatcacccttccgacggcaccctatccgatgccactttactcaaacattcccaccaatgttgtgaacccaattcaacagtccgtcaacaacaacagctgtaacacaaactccagctccggcactgttcaaaatcgtccgacaaatcgtgtcctcccaatgcaggctacagcaatcctaccaaaatcaccggaagttccgcaaactcccccacccttgaaaatacccaactccattccggacaagatcgaggaaatatcgatcatccctagtcacacgttcagtccggaacctccaacgctgaatcaatctccgggcattaaagtaggtgccgaaaaaacattcaaggacactcgactcgaaattgaaatcaaaccaattgagatcagtccagttcttccgccgcaagtaccaaccacacccatcgaggatcgtagtttcagtgctctcaacactccaccaccaccaccgcaatcatcagttcaacaagaagaacaacccaccttccagttgagtctgaacatcgaccagaacggttcactgatcccaatatcaaccatggagatggatgccaaatgtgaacagttgttaacggaaacggaagaaatgcttgccgaaactatgcaggaagatccgttggacgtccgaagtgtggattcatcaagcatgaatgacgaatccgagtcgccggaaatccagaacaaaatctccgaaattctagataatcttgaacagcaaacaaacgaagaggacggattcagtgaatgtaaggaatccgatagttccgaattgttgctgaaaatcgaggagaacaatggtctggatgtatcttccagttcgctgaaaagccaagaggaacagcaactagtggacgaactcaatcaggagttgcaggctagtgcacatgcatcgccagctgcttctacgcatgtttcagagctgataattcctcccatctttgaaagcgatcctaagaaagacgatgattcgggttacgacgtggaccagaaggagaacctggatccggtttcaaacttgtcgagtcgtcctccaagctcccacagcaatcttcctccgaaaaccaacagccctaaactgctgtacgagattcagtcgcaagatggtttcacgtacaaatcgacatccatcgtcgaaatctgggacaaactattcgaagcagttcaaaccgcacgaaaggcgcatggtttacagcccctccccgagggccaactggaagaaatggccggcgtgcagatgttgggcttgaagaccaacgccatccggtacctgctggaacagttgccgggcgtcgagaaatgctcgcagtacaaacctcaatatcacaagaaattctccgccgacggaagcacaaacggtaccaccgcggtagcgtccatctacgcggattattacgacgacatcaaggagaacccgtacggtgccgcccggtgcgagccgtacagctctcgatcggagtacgacatgttcagctggctggcgtcacgacaccggaagcaaccgatgccagtggtagctcagagcatcgacgatacggtgataccaagacgaggcagtggcagtaatctccccatggcgatgcgctatcgaacgctgaaagaaacgtccaaggaatcggtgggagtctatcggtcgcacatccatggccgcggtttgttctgcaaccgtgacatcgaagctggcgaaatggtaatcgaatacgccggtgagctgattcgttctaccctgacggacaaacgcgaacggtactacgacagccggggcatcgggtgctacatgttcaaaatcgatgaacatttcgtcgtggacgcaacgatgcggggcaatgcagcacgtttcattaaccattcgtgtgagccaaactgctactcgaaggtcgttgacatactgggccacaagcacatcatcatctttgcactccggcggatcgtccagggagaggagctaacgtacgactacaagtttcccttcgaggacgtcaaaatcccctgctcgtgtgggtcgaagaagtgtcgcaaatatttgaactagagcagaactggattcgcattaagcaatggagcaaggttttagaacgagaggcgtagcagaagaagcaataggtgtaaccgaccatcggatacaggttgatttaaggatttttgcatggaaaaaataccaaaggtgctgttttgagaaagggaaaacgggaggcgatctttttttttgcgtaaacgatagttgaaaacgtgtgatatttagaatgcatcacagtgtggacgaaacgcaacatgttgcgttactcgcgacagccatatgtttaaggtgaaatgtttccttttttatcgaaacctaagcgtacacttgtgtgtttgtagatttgaatagtagtgtctccaaagtacgtgta

SEQ ID NO: 438 - DNA, 2141 bp, Aedes aegypti
atgttacactttctggatcaatacatcctggcgcataatgaggccgagtatcgaagttcgtcgaagtatttcctaattgtgatacattctactgatgggagtcaggcagaaatcctcagaagcattcaaaatcatcccgttactgacgaagtcccaaacatgctggtcgtagttcagaagaatgccagttttgaacttcttactctcaaattcgtgggaaacggtccgacttcatcggaataccagcttttggacaggtacgatgcagcaaatcattcgtttatttacgggaacgaactttttccggacaaactcgacaatctagagggtaaaacatcaagagtcgcttcattcgatgtagttccctgggttatgctgctgcaagaagacgaaggaaatgtacggtacaacaatcaatcatacacattagatggcatggatggatatttgctaactcagttttgtttacgttataattgcacctgggagcttcaagtagatcaaaagaatctatacggaaaagtgtttaacgatggcactggaaatggtatatttggagctttgttggatcgcaaagtggactttgctataggagccgtcggtgcttactacagcactttcaaatacttcagcataacccagccgttacagtgggtcggcgtgacttgtcttgtcccgagacccagattggtgccgtactggaaattagtatttttaattttcaccaaatcagtttggcttatccttggagtcactttcatgacactgtcggtttgcatatacatcttcaacaagccgacagcagatgctcaattgaatggattcatgtggatattcttcaaggttctcaaaagttttgtgttgacgtcctcggatcttcctagaaataacacgccgttagcaattacggttgcatcgcttctcatgttcaccatcattgttggaaatacttacatcggaaaaattcacagcaccttggcgtttccgccataccaaaatccgatttccacagtatgggatctcgctcgaagcggaatcaagttgaatggggaacatgcatcttggatgtactcattggacttatctgagaatgtattggattatactactcctttcgatatcctgtttatcctatctcttcatccatttcagcaacgagataaaatcattttgtcaaatttccacgtgccaccggcaggccagctggccgcattgatcaacaaaggacaagaagctaccatgatagcagtgcttcaaaacggtcactccatggttggcagttggatcaacgcatggaacgtggaactttaccgtatcatgagtgaaccattgtatttcgagtttgaagcaggctatgcaaccaaaacgtggcccttgctggaccggttcagctatttttcctcgtggatcagggacgcctgcctgttcaagtatatcgagttgatcgaggtcgatcgttacatggaccattcggtgcaggtatcgatagagcattcccgagacaggccgcatagtcagctgaagaatatgaaggtggaagaaatttccggtgctctgctgattcttgggataggagctgtggtttcagcgatggttttctgtttggaagtcaacatgcacagtttttgattttaataaacacttttagtaacgttcaatcccaagcccgttcctttcctcgtactttgtaaagttatatctttcacttgcttctatcttccacttttaatctatcacactcacacactattcattcatagcatttgctagaaccagagacggacaagaaaccgtttccctacaccaccattctctcatcattatagcacgcctttccttacgcctgatacataggcagtctgctaaccacaaaggcaaatcctctctgccatgcctttccccctatccatacactcccgcatgaactggcgtagatgcagtcgcactccacggtctacagtgggccagtataagtgcaacatcatttcctcccccttcctcattggtctgcattctgacgtggcaggcgccatttttgcctaaaactagaagatcaccagcacttatacactaagggtatctgttagttccaagcagtcattcagttggttccttgtgtaagtgcagctgatctggcgata

SEQ ID NO: 439 - DNA, 1578 bp, Aedes aegypti
catcatcgccgtcattcaatcctttttcgcagtcacttcgctgtttttgcttcgtcgtatctcgttgcgttctccgcgaacaacgaatagaagcagtatagagtgtgtaattttgataaggcttttgttgttggccaaagtgttgttatctcgtttgaaaagtgcggctcgtttggggggtggattcagcggaagatgttatcgataggaggaagactccagcatacggtgctcggatatcttctgttggtgctggtggcttttgctggcgttgcattatgttcttcggacaagtctagtgacatcgaacgaaagctaacggcgcggttgaatcccgattgtccggaggacgtttgcgcgagcgaaggcaatgctttgacgttgatccacatccgggccgattcggatctggatacgatccactacgtgtgggattttaccgggaagccgacgattttggtggccttgaccaggaagaatgcctccttgaagatcaattggtacgactttctagacgcaaagccatcctccgtccagttcagcgagacgcccatttatacgttcatgacggtcattaaccggatattccaatttgatgatccagaggacaagggaatgctaggggaaaatgccactctgttcgtttatgacccgcatgagttcagctacaatcgtacgttgctgtggttcaacgagaaggatgttattgctgcgttaaatgccaataacgattttctattcaagctgaatgctttctcaacgcgagaccacggaatggatttcccgcacctgttacacacgtccaactccactcaggtcgatatcgtcttcaacaacgtcagcaccaagtttgaccggccacgctttgcgatggagttgctgtttgtcgtatcggaacaagccgtgagcgggaccgatttccagatcaccaagcggagaagcttggacgacgagcacacgccgggaattttcgaaatcattgacgtgttgtcgccgggggccttcaagttctcgaccggaggctacatcgagtatcggcctgtatcctacacgcacccggaacgtgatgtctcaacctcaaccgaaacccaccaaagcgaaccgaaagccgtggaatatcctgccgatgcgttgaatgccaccctggcctatgccatttacggacaaaagctggacacgctgttggtgcaaggcatgaacatttcgtttgggtttagcggcgacgggttctacaccaagtccaattacaccacattgacgttccaggtcgggttcggaatgcctccgccagaacgactgtctgcctttgtactgatagtggctggaatagggataggtctgccgcttgcaatgctcgttttcggaggattctacatttgcaccagaaagttgagaaatcggccgggaactcgcgtgtaggaagaagtaatctccaatgtttagccataccgaaacctctataataagtattgacacattttctctgtctaggatttaagaggtacatataataattcaaatgtgatagcaaattattgaatgaatgttgcaagggtaataaagtttagttttgtagga

SEQ ID NO: 440 - DNA, 576 bp, Aedes aegypti
atgcacacatatagccgatgtacggcagcattattggttcagtcagtagatgtaacttcgtcggaaacggtcatggcaaagacaacacacggcacggcagtttcgctaatcgtaatatggactttgttgcaagtacgaagtgccttgtcgaaagcagacaaagaatacgagatcccaagcttcagagcaaactggtttaaagcgagcgagttctgtagctcgatcggtatgcaactggtgacgattacaagccgcgatgagaatgacgctgtggcccgatttgtccaaggatcggacaaattcagcgatgtggcgtcatcgttctggatcggcggcaatgatctggcagaggaaggtacattcagctggatgccgaacggtcgactggtcaggtatgccaattggtcccccggagaaccgaacaacacggaagacaaggagcactgtatgcaactagtttacataccccgattcgagcagagatggacttggaatgataacgagtgtcgaacaaatcatatgtactttatttgtgagagtaaaccgcgcgattgcgtggaacagctcaaaggatga

SEQ ID NO: 441 - DNA, 2897 bp, Aedes aegypti
cctgtatgccaatttccagttttctctttcatctgcgaaccagcagttttgttttgctccgctgtttcgcattccacgtcaaaagccaaaatctgtcacggattgcatcgatcggagcggcggctgcttttcgtaaacaatcctttctcgtcgtctatcgtcggtcactggacgagtttgcttctaggaggacttccggaggaaattcaagaaaaatcaatacttacgtgaatgtgcgatgtgttgtgcttgatgtgaaaatcaaagagaaatatttcgcaatgttttgcatgtgcagtttgatctacgtggcgctcttcatcggctcttttctgctgattggtttgctaacggtgttcttattgctacgccagataatcagaagccagaagaataagcgccgttccaacaacgataacgataaatatgtggcactgttccatccttactgtaatgctgggggaggaggagaacgtgtcctctggtgtgcggtaaaagccctccagaacaaatacgatggcatcaaattgttcatctatacgggtgatttggaggcgacgccaaaggagattctgggtaaagcggagagaaccttcaacatcagtttggacagcaagagaatcaagtttgtgttcttgaagaagcgcacttgggtggaagcaaatcggtatccatactttaccttgctaggtcagagtttgggatctatggtattgggaatggaagctttgttaaaactccagccggacgttttcatcgatacgatggggtatgctttcacatatcctatattctcatacatcggaggatgtaaaattggatgctacactcattatccaacgattagcactgatatgctgcgaagggttcagaatcaggtcaacactttcaacaaccgcgcctatgtggccaagaacccgtttgcgacttggattaaaattgtctactacaggattttctccaaaatttacggaatggttggccggtgtgctgatacagtgatggtgaattccagttggaccgagaatcacataatttctctttgggatgttccatacaaaactcatcgggtgtatcccccgtgtgaggtatcgcatttgaagaaacttcaatcgttggcaagcgcccacgacaagatcgtaatcctatcggttggacaattccgcccggagaaggaccatcctttgcagctgcaagccatgtacgaattgagaaccctcctgaataaggacgaggcgctatggaatcgacttcggttggtcatcgttggctcgtgtcgcggcgaggaagatcgggaacgtgtgaagaatatgcaagactttgccaagcacctgtcgttggagaactcggttgaattcagggtgaacgtatcctaccaggagctgatccagtgctatcaggtggcaacgattggtctgcacgcaatgtggaacgaacactttggaatcagtgtggtcgaatgtatggctgctgggctgatcatggtcgcgaacagatctggcggcccgctgatggacatcgtggaaacctcggaaggcagccaaaacggttacctggctatcgatgcctacgactacgcccggtgcatcgccacaattctgtacaacggccggaactacaacaacaagattcgtgaagcagcgcgcgcctcagtggaccgtttctcggagaaggagtttgaaaacggattcctgcgggcaatttctcccataattgacgataaagattttcgctaggtgacaaagatttggaagtagttttgtaaatattatcaaatgttagtagattttagcgtgtcccacgctttccaaggtctctcaattgtaacgaatagatttttgttaggacgtctcttataatcaatcaggttacatttagcgctaagcccaattaccctacaatttaccactgtagaaactcaatgtgagaaggaaacaagatcgaataaacttctctcgaaacagtttgaatcatttaccgtaatacaattagtgtaacggaagtttttgcgctactctcattcaaactaaccctctgttgccaacagtccctcagtcccttcccgaaatcaatggcagcggacggtcacaagtaactgtcaatatcggtggaattagggggaaaaggtaccgtcaaaaacttttacgctgcatgcagcgagtgcagaaatgcaattaaaagcgaaccggaagcttacagcgaagagaggttatcgatagttgttcgcgatagttcattgctgtagtggcagtggcaaggcagtgccaagcacaggtaaacggtaaagttgttagattcatttgctgaatgaattcaatctattgttatccctcacatccacctactactagtccgggaagggattggcttgaccagccccgaatcctccaattggaatgaagggcgatggaaaaagtttcgatcccgaatcgcgtgtaccattttcggatggaatattgaatttaattaagcaacttaatgttgtactttggctgtaaaactactatgtattgctgttgagtgaattcaaactgggtaaagtttgaaactgcaattattatacgattaggtagttgtttggtgctctcgaattgagtgaaaaaaaaaatcgaaaggttgctcgaactaattaaccatgcgtctccatgattgttccgtgatgtttcggtcgtttcggtacactgtctttcctactgttgttgttagtcatatcatcattggtactcgtgaacagtctgttggtgagaagtgtataaatatatgaaaaaaataagaatcagaagcaaaatcaaaccaacatatttttacaagctttgaatcgaaagaatgtgtgaagttatccatcttattttctgtctttagattaaaaggcttcagtgaagtttaactcttcaaga

SEQ ID NO: 442 - DNA, 1545 bp, Aedes aegypti
ctccagttgttcgtggatgacccccgattcagtcctgtgccttcaaaggactcctgccccagggccccacatttttaaatccggccctggttggaaggcagttgttgtccaattaacgaatctctgtgttaacaattttaagtattttgagtcaacgaaacgccttcgattttgagaaaattagatgtaatcctataaactttaaaaaatttggatgctttttttttcactatgcatctggcatctctgacatgcgcataccttctttcgtcagtttcaacttttcaaacgtcaaattattgccgtttctcttttgttctagttttttttgtatctctgttatcgctcatcatatttatttttgttccatttaaacgaatcgaaaagaacaaaaaaaacccttctttcttcgcgaactgattaaatcacggtgcaaaaattcgagttaaaacaccccctgatagtgggtcaatcgattgataccgcaagaggacaagctctcccacggggtcgacagccatgaacgattgttttcgcgttttggtagattacgctaccagatgcttcagctgccatgaagattcttccgcacagggcaatgaaccgaacgagcgaacacatctgctggacaatccggtaagcaatagtcccgccgtccggaggtcggacagcgaagacctcacacaggagtacccaaactcggtaccgaagaaggacgacgtttcggcgctgaacaagatcattcaggatacggcggcgaatgtgatcgacgttgcagcaatggacattcacaacatcgaaccacacgaatacaacgatcgggtgaaaatctattcacagcgactggcacaacagtggaatacggtgcagcatccgaatcatgtacaccatgttgggctcttaaaggacattgcgaatccggagtcggtattagcgtcagcagccatcgcgccagcagatttgagcatgatccgtgacatggttcagaaggcgaacgtggcagtcggggagatcaaagtgaatcacacagagaatctggtggtgccttttaggattccataatatcacgccataaggcggcatctgtaaaaaaaaaaatgaaaatcttgaaggataacacccgcgaaaaactagggttggatgccgcagcaatttgtttcttctttttcaattccctatccctgcaatgatatgcgttgaaaagtttaaatttatgttactttcgcatagtgcaaaagcatagtttattctacattttatccgtgtcgaaagtttagttacgttttctatttttctgttaagttaactggctactcttcagtgtagtagatagatcaagattcaacagtgtaaaaatgtttccatagagctttcttcttcgggcaaacggaaatccttcgcggtctggaatttaagtgtcgtgtgctcgagaaagtgtcctgtagcttccccgaaacaaaacgcaaaatgtacgagcaaaagtgctggcctgtaattataaaaggatgattattcgtaaaaatatataagctttgtatgaaagtg

SEQ ID NO: 443 - DNA, 991 bp, Aedes aegypti
acagtcgttaatcctaaatcatctaaaatcttatatatttacgtcgatcgtttctagtggtcagcgaatcaattggatcgaaatcagcgctgtccagaaaatgatcaagttgttagcgtcgttgttgcttttggtgcctttcgcgctctgcagcggaatagtggtacaaacggctccgaagtttgccttcgttccggagggtcatcagaatctgaatctgttgtgcgaaatacctggaagtaatccgatcgatttctgcatcgtgaaggttccgggagtagcagctccctttgcggccagtgaacgacttccgactccggtgcagggagttacttactttggcaggggttggagcaaaggatcttgtggagtgacgttggccaaggtggaaccgaagaacgagggcacttttgaatgtgttctgtctgttgcaggacagacttataagggcacaatcgatatcgcgttcaaagtcgctcctgagccaccggtgatcgaggtgtccagcaatgtggacgacagcaatggagagttcgattacggaaaacctttgattgccaagtgtgcttcccgcaatggatggccagcagctaagctttcgtggtacttggatggaaaacccgttgtcaacgagttgggagctgctttcactgaagtggttgataagaaggcaaccgttgagcagttctaccggaaagcggtggctgtagaagacaaccggaagaagttggtttgtcgtgctgaacatgaatcctatccgaatgggttcatggaggctgcgctgccagttaagttgcgaaaatacgatcaactggtctacgagggactgtcgacgccatttttgacgcagaactcccggggagcattcaccacgcaacaagtgcttcagcgggttgtgaaagccagcgacaatggcaagacgttggtttgcaaggcgcgacatccgagcgggacgagcgaaacgcgactcacgctgaaaacgtacagttga

SEQ ID NO: 444 - DNA, 291 bp, Aedes aegypti
atgtatggaaacagcaacggtggaagcatcgatggcgactactcgtcctcgtcaggctgtgtcaagtgctggagcatctgccggttttgcggtggctggcggttgtcctttccctacgtggccttaggcatcgcgctcatcatgtggcctcaccggttatggctcagtcacgtggccggcggtcaactgatagggctggctgtgctgcggttgctcaccctgtgccagttccgacagggcggcaaggacgaacaactgctcaatcaatttgatgagaacgttgacaagtga

SEQ ID NO: 445 - DNA, 1538 bp, Aedes aegypti
gaaagaaaagccaacaaatcaaaagtcgtttgaagaaatcgattttccggagttagtaccagcataaatcgcgtctaatagtgtttattcagttcaggaatgtgcaaagcactcggaaacagttttatgcagtgatttaatgatgaggacaactgcattgacagcatgacaaccttcacctgtcgggtttgtgggaacgttccgctagtggtgccgaatgacccgaaaccgtttgccgaggtggccgctgtttactacaagatcacggaacttcagaacgttgacgaatcatcgctgcccaagaatgtctgtcaattttgctatggaaaattggtagaaatagattggttcggaaagaattgcatggcgtcgtatggccgaatgacaacaacgtattcgtacggagcagatcatgaacagcacaacaggacagcattcaatatgtatccggatgaacaaagaaacagttattcaacaaatactatcgaacaactacagccgcttggacatattatgaactatccaaacccacaagcacatgccgaaatggttgcacccaactccgttttgggtacggaaaatgtagaattttcacagtctccaccaaaacccagtggtgcatcacattctaaaagtcatctggaaaagtctcgatctactcctagttccgatttgactgccatacataatcggttggatcaactaggagctaagttggatggccacagtgcaatactacatcggattgagatgtttatgctgaattcctcttattccaaaccagcagaaccgcagcagcctcataatcgggacgattttcgactgcgcagtggcgaaaattttgatgaattcgaacgaatgcctaaaattgtaactaaagaacagcttactgagctggatgcgaagctagcaaaccctgaatatgaggctaaattcttccgatatattcaatcagtttataagctcactggaaagcgcgagggctttccgttctttaagaccgtcatcagaagattgatggccccaactgtgctggtctgctattcctggaaggggaacagtcgtacgaagaaaggcgatcaaacagccgttgtgaatgatcaaaattatagcttcaagaatatgttcccgaatatcgtcagattcatctatcgcgtggtgagtgcagcagatttcgagtacaccagcgaggataacgagaaagccttcagcgattatctgcgacagaagacgacggaaataaaacgatttctacattcgaacggcgttcaacgagaggcttgtacccggaaacgaagaaggaaaatgcagccaccgacagcaaccgacgatggtggcagcagtgccggacaagatcagggccaggatcaggaaatttacggcgtaaacgacactaccgatggtgacttcagctacgacgaagaaacagtttccgataatggtgatgacggtgtggatataaagcaggaggcatatgggtctaatgatgtggtttagacaaaacatgagtgaataaagagtaatttaatccaaaagtg

SEQ ID NO: 446 - DNA, 2342 bp, Aedes aegypti
atggctacagttttaagttgtgggagatacaaataaaacatatctatctaactaaatagaactcctttgagaattctattatgatacacccttctgatgcaaaaccagttttccgtccaccatctgagtacaagggcatttatgttgttattgacttaatggcaactttgtgcgacgaagtgtgtgcaaaattcccaaaaaaagccggtcactgtctttgaatgtgttgttttcgagcgattcgagtttcttcacctatcttagctcgttcgttagtcggttttataacgcgtagaagtgaagatgttgtctcgcggtgtactccacttgagcagggtttcgcaaaagacaatcaacaaacgaatagtgcctcagcaacagctaagatggttcaaagttaacagagtaacgagccacgacgaatatggctcaagatcacaggaaggatcgcacgataccagtggaagtctactatccaccacggccgcactagtaggaggttcactcctaacatactggattgttaaaaagctcaaggatgattcagcgaaggtatacgccaaggcggctagctccgatcaacaggacatcagcaaggcccacacagagctacgcaaggacctaccggtgtactcgatggatcaagttggagaacacaattcccctaagacgggcatttgggtgacgtacggcattggggtatacgatattaccacgttcgtgcccaaacatccgggcagtgataaggtgatgctcgctgcaggcagcgccatcgatcccttctggcacatcttccagcagcacaacaccaaggaagtcctcacgctgctggaaacattccgaatcgggaacctcagggaagacgacgtgatctcaacccaagatcaggacaacccatgggccgcagaacccaaacggcacgccatcctgaaaccgactgcccaaaggcctttcaatgccgaaccaccggcttcgattctggtggatgcgttcctcacgccgaacgagttcttctacgtgcggaaccatttgccagtgccggaagtggatatcaaagactatgagttggagatcgacgtcgaactttcggacaagacgaagagcaaaaagctcaagtacgacgatctgcgaaagcttccgaagcacaaggtcgttgcgacgatcatgtgcggaggcaaccgtcgaggggagatgatggagatcaaaccaatcaaggggctatcctggggtccttcggccgttgggaacgccgagtgggctggtccacggttgtcggatgtcctcaaagcgatgggagtcgagtcggatgaaaccagtcacgtgcatttcgagggcctggacgtagacccgacgtccactccgtacgcagcttcaatacctctatccaaggccatggacccacgtggagacgtgatcctagcgtacgaaatgaacggagaacccctaagtcgcgatcacggctaccctgtgcgcgtcatcgtccccggagttgtcggatcgcggaatgtgaaatgggtgggacgtattgtggtgtccaaggaggaatctggatcgcattggcagcagaatgactacaagtcattcagccccagcaccgattgggacacggtggattttaagtccgctcctgctattcagtacatgccggtgacctctgccatctgcagtccggcgaatggggatcaactcaaggcggacaatgggttcatcactgtgaagggctatgcttggtccggtggaggtcaagaagttattcgagtggatttaacggctgacggtggcaatacttggatagtggccgatctggatcagatggagaagggcaccggcaggggacgtcactggtcttggtccctgtggacggcgaagattcctgccaagccgggacagaagctggaaatttggtccagagcggtggatgacaactacaactcccagccggagacgttcaagaatatttggaacttgagaggagtggttggcaatgcgtatagtcgcattaaagttgaagttaagtgaaggacatgatagttttacatggaaattcaaaagtgcattaaattcaattgtttattgttctattatctaatgattcgggtttagaattgaattgatgacctcctcagatcgataaataagaggtagcaatctacaactataggtgtcccagaaaaagtggtcaaatatgcgaacaaccacaatccagtaatgcaacacattaactcgatcaattcccgtttgtttcgattatttgatggaatggtgatcgaataccccttatgctccacattcaattgcgtagtttcaaaaagaatatctgtcagaatgaataaatactggaa

SEQ ID NO: 447 - DNA, 1703 bp, Aedes aegypti
ggtagtttgtgtgataattttcattcgagtgcaattttcgtgaatattcgtgctaaagtgaacattttgctgctgaaaaatatttcggaaacatccgatcgagtgtcgaccatcaccaaaaggcgttagagaatggatgccaccctcgaaaagtcttgcatcgaggaaattagccacaccgttcttgatgctcaacaaaagatttccgttcgctccatttcgaacaactacggcctgaacttcctggatgcggtgaaagtgcttcagaaatggatcgacaacaacagtggtaaggcaaacctgctgaaggaattcatcgtccggggaatcgatgccaaacgagggggagcgttcatcacggtggccagcgaaaagaagcttaaaacgatccaggataaagccagtcagatttcgagtgtcttgtacgccgtggaagtgcagtcggagtcctctcggcctttgcatattcccgaggagcaggaattcaaagtgatcaatttgcctctcgcatcggacaaacgggatgtgaaggttttcatccctgcagagccaacccctgcttcaacgagcgtcaagcaggaatctaagccgaagatcaattccatgtttgcagctagtgcttcaaaaccgaaacaggaaaccccgaaaccgacttcagttccagtcaaggaagaaaaaacgagtcctcctgccaagcaggaagccgccaagacatcgcctccgcaaaaatccccgaccaagggatccccgagcaagaagaaagacgccaagaaacccgtcagcggaaaagcttccattgcttcgttcttctccaataagccaaccgcttccaaaccggcaccttccactccggctaattcatcaaaacccgcggatgtgaaaaaggaaaagccatcccccaaggaagatcaaccttcaaagaaggagaaagttcacgaggatacgccccggtggaagcgcatgatttccgatgagtccgacggagatgacgtggttccgaatacgccccaggagaccaaggaaccgaagaagagaggcggcaaaaaatcgttggccttcaagaagggagccgatgccaaggggagaaacccaagcaaacggtccagaattctgcaggttgaggattccagcgaggaagaagaggatgaggataggaacatgcgggaaaaggaggagaaaactattgagttcgatacggaggaagagcaggatgttcaaatggaagagaagaagcagctgactccggaaaaacccgttgagaatgattccaacagcttgaaccggaagggacgtgcgaaggtgaagaaactggtcacacggaatttcatggatgaggaaggatatatgacaactatcaaggaatatgtcatggtgtccgcttcggaagatgaagctgaggaagagtctcgtactaaaagttcgtcggatgagaagaaaaagacggacgtaaaagattccgcaccgagtggtaagaaaaaagcggaaacgaagacggcggacaagaaggcggagaaagtgacgccgccagccgccaaaaccaagcagggttcgataatgagcttcttctccaagaagtaggcagctgcacctagaaggtgagtgtcttggaagttattacagtttagcgtcgtagcgcttacctaatcgcattaaaatcagttcgttgttcattaaaattgcaattttccttgctagagaaatcc

SEQ ID NO: 448 - DNA, 904 bp, Aedes aegypti
aatttggacaacaacggcgaaggaagcagtggtagaggaccagtaaaaagtagattagggttcaggccgtcagagagatggcaacaaacaaataaaggtagacgagaaatggacacagggaacttccggattcaaacaggacgatatggtggacagcggcaatggcagcgaccggactactcccaaatgatatgcaatttttgcggagtaaaaggccatattaaaaagaagtgctttaagttgaaaaatttgaatcgtgatgcggtaaatctcgttgaatcatataggccaggaccatcagcagaccgccacatcgtcgaattactagagagaatgcataccagggatgatgatgaggtcgaggacagtgattcagatatgcattggaaacgtggacgcaatggcccacaggacgcagatcagagtctgtaaaaagtcaacaacctggcaaaggcccaacatcatgatcatgagagagcaaccaagtgacataatacaagacgaccagatgataacccccggcgatgggccgctcaatggcgaggaagagatacaggctccgaagggaagcagaaaaagaagacttcaggagtctgactcgaatcaggtggagcttcggaggtctaaacgcccgagaaaagtgaatcgtagtgcagattatcattataactaattgcgtttttcggatttgcttaagtagaatttgttctgaattcaagattgttttttgtatagttacttaatgtgagtttatcttcactttcgaattatagtacaaacattataaaaggggaagaattgttgcatcctacttgcgcacccctagcgcaatcgaaacgttatttgacgttctgcttcgtaagacgaactaatcagttagccgaagggctcgaacgaatctgaa

SEQ ID NO: 449 - DNA, 912 bp, Aedes aegypti
atggcttccctcaaaagcagttttattgtcaacaacaaactacttttgccgccattggtcgttcaggtgtgccacttcagctacaaaacggtttacttggatctgaaaagcttctgctcacaggtcgaccacaccgtcgggaaagtgtggaattcggttcaaccgagtgataatgtaggcggcatattggaaaaccaatcgccatcgctcacgccgcctccgtcgcatcaatccaagacacctccgccgcatcctgcatttatgggaagtggcctgggtggaggaagtgcgggtcgttcaggcggcggtggaggaagtgtcatcaatacgcacggtgccatcggaggtgctcataatgggctcggctctggtggaagtagcctgggaggaggcagtggcagcaccggcggcgatgattgcgaatcggatgacgacggccaggaaattatcgaggaggacgaggacggtagcgataggccgtcggattcggcgtcgcccaattcgaacggtgcaatgcaatcgaagcggaaaaagaagacgcgaaccgtgttttcgagggcacaagttttccagctggagtcgacgtttgatatgaaaaggtacctcagctcgtcggagcgcgccggtctggcagcatcccttcggctaacggagacgcaggtgaaaatctggttccagaaccgtagaaacaaatggaaacggcaactggcagccgaactggaggcagccaatatggcgaacatggcgcatgcggcccaaagactggtccgcgtgcccgttctgtaccatgagggggccgccggtgggtttgtcccaccccctccacatccccactcccaacagctgtactacacggcggcggcggcgcgtggcggaagccctccacgaccaccactctcatccttggtgtaa

SEQ ID NO: 450 - DNA, 1015 bp, Aedes aegypti
atgcaaaaatctaggcccattagcaaacacgtgaaggcatgtacctcgtctagccaaccatcgttgaagcacgtttcctgcgataagccgccagcacagtttgctttccatataaaatcggttcgcagccttcaagcaggcaacattcaatcgaaaactgtaggtcaaacaacggcaatcatgaacggtttgaagtacgcttttctggtcctggcaatcgccagtgttgcttgggcagttccagcaagtcaaaacaatcgccaagactccactgctgcacccaagccaccaaaggatgacgctccggaagttccagccgtagttaaggaagcctctcagccaccagccaatgtcactgtcggcaaagctccggaagcaccaaagaaccagagcagcgaagcccccgctcctgcagctgccaaggatgcgaaagaccagaaggctcaaccacaagtagacctttcggttgcatcggctgagagtgcttcggaagtgaagtctggcaaggctatcgaactggaaagtgcccaagccgaagatctggtcggttctccattctcggttgaattcgatggaatgcaaggcgatcaaccggcctcgattgaatctggagaattcgtcccctcatcggctgctggagctgttcgcgtagtggacgctaaggaacagtccgctctgccggttgttgttgttgaggacaagccagccgctgctgatgccaagcctgattccggtcgggatgcatggggatcgatgatcgatggaattatcggtcagctgcaggacctcaagaggaaaacccgtgccctggaagaccttgcccacaggaagtgaattcggtttgactcactgtgttttgaagagtttggctagcaaaatatcccagcaaaattatatacctcattgatgtcaaaagatattttccacatagaaagcagcgagtgtgcgtctgttaaccattatttacagttcaagatttgaatgacgatgatgtttcaatagatgcaccaaacaa

SEQ ID NO: 451 - DNA, 1443 bp, Aedes aegypti
aagatagtgtctcagttgtcgagtctcgatcaccatgtccgaccacagtacagctcctgcgtggctaaacgatcattttttcacagaaatattgaaagaatctgaaaatgatccctcccttaagctggtgggtgaatgcatactacgtccggcaaccctcggggaccactatggcagcgtaatgttccgcactgcaattcgttatcaatcggaacggttacccgaggagcaggaaataagcctgatcatcaaaactcaaccgacagcagaaggatacaagaaggaagtatccaaggatagtaagatattttccaaggaaatactaatgtacagggaaattcttcctgccatggcgaaggtgctaaaagaagccggtgaagaattcgaagttgctcgtttgatttatgcatcgatccagccgaataccgttatcgtgttggaagatatgacaccgaaggattggttgccgaatcgtgtctgcatcggaagtatcgaagaagtgatgcatactttgagaaacattgcaaattttcacgcagcttcgctttatctcaatcagcataagatcatggacctatcgacgaacagcataaaggagattctgtgcgaaggcatggtgctcactcagttcagcacgagattcgaagagttttgtgacgctgttggaaagtgggatgactgcaaaacattcactggaaagctgagaaccctactcaaatcggtgggtccgaaatacgcaaacgtgtacactcccaatccgcaaaccgtaggatacaatgtgcttaaccatggggacatgaattggaaaaacattttggtcaagaagaactccgacgggcgaatcgtggattccatgctgattgattaccagtgctgtcattggggaacgccggcaattgatgtcctgtacttgttggacttgatagtcgataatgataccaagaaggcgcataggaatcgtatcgtgtacgaatatcatcatcattttgcaacggttttggctaaactagggtacatggggaagattcctagtctagtggacctgcaaatggaactgcttcggatgggattccttgaggtcatgcacgtggttgtattcgaaaagttcaaattcgaagagcttaccgacacaacgttcgacaacttcgatcagggtaatccggatgatccatgctatcaaaccgagccgttcagcagtatcattcgatcggaactaccagcgctgatgtacaggggcttgttggatgaatgatgcggaggatggagtaaaccagagactgattccgattgataattttaggattttaaatactgtagattgtccaaattatactattgttcgaatcattcacttcattctatcatgtatacatttcattgatgtttcagatgttcaaatgtttcattgtatcgaaatatatccaagaagatccgttatataca

SEQ ID NO: 452 - DNA, 2163 bp, Aedes aegypti
ttgttctacgaaacacaccgtgtacctagtttagaaaataagcgagctgcactgagattgagtagtaagcgcactgcactgcgctattgacattcaccgtgatttctcaccaaagcaagtacggagattccactctctgggtctctctttcagtcagtgttcacatgcgtctcctcaagtgagctaagcttaaaacccaactccagagcagcgcaattgcatttccgaagaaagtgcgtgatacgccacacagtgggactgagtgcgagaaaaactgtgccacaccacatcgaacaataataataaaaaagtgcttcctaggcagtttcgttcaataataggctgaggcagtcagcgcagctcagccagcgcgtgtattgtcgtcgttttgggtcagtaggaaaggcgacgtgttgtcgtcgtcgtcagtcagtcagtgtttttcgtcgtcatcatatgatagctgctggaattttttaaagcgcatcgcatcagattagagcggggcgtgtgcctcagcagtagtggaacactttcagaaaaatggctttcttcttcaatttcgtggccatctgtacgattctctactttctggtgcggctcgttctgtggttggtactcgacgcggacattgaactcttcgtgctatccaaattgggcaaacccatatcctcgctgaagggaaaagtggtatggatcaccggagcgtcgagtggcattggacgggatttggccatagcgcttgcgaaaaacggcgtccgattgtgtttatcggctcgaaacatttccgaactgcttaaggtgaagcaagactgcatagcgcaatccaatggcactctcggcccgaacgatgtatacgttcttcaaatggacatgctggacgtgaaccatcacaatgactacttcaacatggtgatagaccacttcaagaccctggacatcctggtgaacaacgcagggcgttcgcaacgcgcagaatggaacaacatcaacgtgaaagtcgatcgcgaactgtttgagctggatgtattcgccgtggtgcatctgtcgcgaattgctctgaactttttcatacgcaactcgattaagggtcacctggctgttacgagcagcacggccggtttaataggggcgcccaactcggcgagttacaccggcgcaaaacatgcactacatggttacttcgagacgctaagaaacgaaccgtttgaagtgaacataacgatattttgtccagggccaacggctactaattttctacaagaagccttcaccgatacacctggtgcgaaatacaaccaatccgtccggccagaagacaaacgcatgactagcgaaaggtgcggttatctgtacgctgtcgccttggcaaacaaaacatatctcagttgggtagggactttccccataaatttcatattatacattggatgttactattcgaacgtgaagaaattgttgctgaatatcgttggcatgcgacgtctccggcaggtgcgagacagtcgatagataagatgcatccaatgcgagtccagccatttcacagtgttcatcatgtatttatgtatccagatgcatattgcactcagatctgcttgcaccgctggctgctgcgcttaagttggttaagcgcaaaaatcgtaattagatgctaatcatctcacagtaggcgaagttcgatgaaaaatgtgtgaaaggcgaaggcacgtggaaggagttcgtttattagcgataattagcaagcttaatttaatagtagtcaatcacagtgttgcctaatttattttttgttttaaaaggcatgccattttttgcatttctctgcttagtttgtcttcgcaaaacgatgtttgttatttatggtaaattgcctacttttaatacaatctaaaatatcatagaaaagaaggaatcctattcttggcacttttgattcacttcggcaagggattttttgaaagctactcagcccattctttgcagcaaaaaaaattgcgacaatttagaaggaaaaactgcgaagccaaaataaatcatagagatgcctaagtagtttttacccttttgaaaagcaagtatgtaaattaccatcaaatcaatgaacattttttgcttgttaaaaaaatatgttgcatgtaataaaatcttgctttagaaata

SEQ ID NO: 453 - DNA, 2164 bp, Aedes aegypti
atggcaaaaatagcagcaggagatgcgctggccccagtggaaggttttggggaagcacctcgaagtcgagtgtcgactggtgccagctctcggttacgagctgagcaaagtgatagtgatgacggtggaattaaattgaagaaggagcttgggctgatggatggagttgctatcattgtgggtgtgattgttggagcgggaattttcgtgtcacccaaaggagttctgctctattccggatccattggtcaggcgatcatcgtatggattctatccggagttctcagcatggtgggagccctatgctacgcagaattaggcaccatgatacccaaatccggcggtgattatgcgtacattggtgaggcattcggtccactgccagcgttcctgtatctatgggtggcactgttgattttggtcccagccggcaacgccatcactgccattacgttcgcccagtacctgctgcagcctttgtggccaacgtgtgaaccaccgtacgaatcggtccgattgcttgctgctctcatcacatgtcttcttacggccatcaactgctacaatgtgaaatgggtaacacgggtgacggagacgttcaccggaatgaaggttggagccctgctagtgatcgttgctgccggagcatggtatctattcagtgggaatacggaactgctggaaaatccatttgagaactcaaagatacaaccgggattcattgcgctcgccttctacaatgggctattttcgtactctggatggaattatttgaatttcgtgacggaggagcttaaagatccttatcgaaacctccctcgagcaatttgtatcagtatgccagctgtaacaatcatctatgtgatcacaaacatagcatattttgctgttcttccaccagatgagatgctctcttctcaagctgtcgcggtcacgtttgcggataaaatgcttgggttcatggcttgggtaatgccacttttcgttgcctgttcgacatttggatcgcttaacggtgcaatttttgcatcttctcgactgttcttcgtaggcgccaggaacggacatcttccagcggccatttcgctcatcaatgtcaactgcctcactccgatcccatctttaatattcctgtgccttctcacactacttctgctgttcattcgagacgttttctcgatcatcaattacgtgagctacgtagaaatcctgttcatcttcatttccgtagccggactattgaggctacgtaagaagcatcctgatgccaaacgacccatcaaagtgtcgttgatcattcccatcatcttcctcctgacggcagggttcctggttatattttccgttttcgaatctccaacagaggttgccatcgggacgcttattatcgtgttgggtatcccagtgtactacattactatccacaaacccttggaatggctggctcaaacatcgcaacgaatcaacaacgtttgtgcgaaactcttcctgtgcatgcccaacacggaaaagaatgactaacttgaagcgaaactcgctatacctttacttgcgctgtaaatagactgctcgttacgagttaaggctcgtgataaactgggacgcacatttgagctacatcaattgttatcagtaagcatacaatctcacagcacgacaatagttaacaaaaaaaaagtcaacagtgtctttgaggcattctgcaacatatcgcataaacatgtaaataattcacttataaatcatacttacctaacaaatgaccaacatcaaaacatgttttgagtaaattatcattctctctgctatacaattcgatactagggctcaaacttccacatattccatgttctgaacggtgtaatcaatgttttgttcaatcctctacgaggctgtatagtagaagaagggatccgtacgatctctaatgtacaaacggtttcacgaagatttcagaataacgtaggcttaattcataatcaacccgaatcaattaaacaatgacaaataaggattgaagactgtttcaataaaggtcactcttgttgtaagttttgtattgttctcttacatacttatcgtaaggcagcctacatgtattatgtaacggtaatgaaaagttttgctatacatcgcttttacacatttcaaataagataaaact

SEQ ID NO: 454 - DNA, 1886 bp, Aedes aegypti
gtcaaacaataaggaggtgataaggcttattctgtgaagttgatatttattagtgtaattttaaacctttgttagtacgattaccattaaatcccatattataatcgaaatgaagtgtagttcaatcatattgttgatagcaatccaggccggtataagtaatcagtttaagtgtggcgttccacagcaaagcacaatccacttgatagtgaacggattcaacgcactgaaaggacgatggccgtggcacgtcgcaatctaccacaagaaccatcccctgacagcttacgtgtgtggtggaactctgatctcgtcgacgcacatcctaacggctgcgcattgtgtcatcaatccacgcaccggctatcaaataccaagtaaaagcattttgatggaagccggtgcgtacgatttgaaccaagacttccaaggtcggcagcgacactcggtcaaagctgtttataagatggcaaactacaccaggacaagtcccaaatatgatgtggccatcctagagctagattcggaagttgagttcaaccagtatgtccaaccggcttgtgtgtactcgagaaaggatttgactggaaaggtgggaaccgtcgttggatggggcataactgagacaaacgaagtttccagtgtcctgaaggaagcggaacttccggtagttgatacgcttacttgtctaacaagcaatcggtatgtttttggaccaactttggaaaagggcatgttttgtgcgggttacgtagatggaaccagcgtttgcaacggcgacagtggaggtggaatattcttcaacataaacggagcctggcacgttggaggtattgtgtcgtacaaacaagttagagaagggaatactgcattgtgccgaactgatggatacgctgtttttacgaaactttacgattacttgcaatggataagcacagtaactggagtcaatctgataggtgtaaaaggaagaaaaatgccggacggcgataagtgcgaaccaaagagcgccaacgcacccaaaataggcacgaatgcatttcctcgaaattgtggcatctattctccaagtagaataattttcggccggactgcaaaagtgtttgaatttccgtggatggcaatacttctatacaagaacaaaaaccttcattgcgtgggtactctcatcaataagcgctacgtgttaacatcggcgctttgtgttcagccaagttttcccgaaaaagtgcgattgggggaacacacccgacaacaaaatgtggactgtaacgaagatgatgattgtgctcctcctgtgcgagattaccaagttgaatgcgttgtacgacatcagaactacaaccataaaactgaactgtacaacattgcgctcattagactgaagagaaatgtactatttgaggatcacatccaaccgatttgccttcccctaactaaaaatctaagatcggccgaggtgggaagctacatcattaccgggtgggggacaacggaagagaacaaactatccctatcgctcaaaaaggcaaccattctggcggtgagtggtcacgataaatgtcgccgactgtttgccggagagcagtatgaccccaaagcaatctacaccgatcagttctgtacggtatcggaggattcgccggcttactgttacggagatggcggaggaccgctgggtcaaacggtgcggttcaacggaatgcgtttcgtacagtttggaatcttctcgaacggatggggtgaatgccatcggtcgaatattctttttacaagagtgggcgcctatatggattggattttggccaatgtaagagcgtagcagtggatgaaatattcgggtgtgtacatcttctataaacgattgcaatatcctttaaaatttt

SEQ ID NO: 455 - DNA, 1584 bp, Aedes aegypti
ctctcgcaaaccaaatccgcgatccacagcaaacggaacatttttcgcatacagtttcttcaaatttgtgcttcaagtatgtaattcaatttcgtacaaacttacgtattgttcaatacaatcttagataaccgaaccgaaccaaagactgactgtgtatagggcagctaactaccggtgaaagatgatgaagtggatgacaaccgtgcttttgggcgccgccctgcgctatttactgatgcattcccattacggggtcacgatccagaaccgagtcgaagtggccactccgctgaactcgtggaagcgagcaattgaaggggcatacttgtacgccaacggaacaaatccgtacgaaggcgacctgtaccatcagaacccattcgtgcttgtttcggtgtggttcctgatggagaaactgttcgcgttcgccagtgccatattcatcaacctggaagtgggaaccattctgatgctcaaaagcgtggccgcaattttcatccgtaaactttacgacaaccaaagatcgcgtttgtccagctttgccaaggggaccaaagaattgcagatatcgccggatgatgtccgctcagttccgtactatgtggccctggcgtacatgttcaacccgtactcaatcctgaactgcgtcggtcaaacgactacggttctgagtaacttcctgctggcgttgttccttctgggaatggccaatcgagtgagattggtggcctgcatggcactggccctggaaacgcagattaacatctatccttgcgtacttatcatcccggctgcactgttcatcgctcaagatgacaagcacaaaatgcaaagcattctcattacgtgtggaatgttcttaatgacctttttgttcgtgaattacgcttcattcatgatcatgggcgattggagctttttggatgcaacttatgggtttatcttcaactgccgtgatttgcagcccaacatcggacttttctggtatttcttcaccgaaatgttcgaccacttccggactcttttcctgtacacattccaaatcaacgccacactgctgtacttatttccgttgacgttcaaactgcacaaggaaccgattatgctgctgacgatgctgcttgccctgggcgtcgttttccgtccctatccctgtgttggcgacatcgggatgtacctttcgttgcttcccctgtggaaatcgatctcaaagttcatgggccacaattacatcgtgggagcaacgatgctggtaacgagcatcctgggaccgaccgtatggcatctttggatctactccaactcggccaacgccaacttctacttcgggatgactctagtcttctgcacagcgcagattttcctcatcaccgacctgttctttgcctacataaagcgcgaattttgcctcaagcacggaatgaacatcaccatcgacggcaaggaagcccggattgcgctggagtgaggtgcgaaaggggcaatgtgattgaaatgcttacaactgcaacacacaagtatttgcaatagaaattataaaatgattaaaaaaaaataaaaaaaatgagtgttttaaaaata

SEQ ID NO: 456 - DNA, 1219 bp, Aedes aegypti
ttcaccgatcgagctgaaattgtcactcattatctgcgccatctttatgcgtgaaataccactggaagtcaccggaatcctgcaccaactgatcagcgcgctcggaggaggaggtcatctgattttgacaggagtcttcagctaccttacgatcgttaccacagaatcacagcgaacatttcgatttgcctgtgcatccatcgttatatctgttattcccataatcgcaaggtttttcagcgggcatatattcaaagcccttggttttctaaaactgtgcatcctttgtacaacaacacattcaattgcattgctctatggaatattcgtattgaaggagcctgattcagatgcgaaaaacaaaactgtcgccaatcaaaacgagcctaattcctcttcacccacaaagaaactgtttgacatgactcttgcgacagattgcatcaacgtgataacgaagaagcgtgccttcaatatacgcaaaatacttatgtttacgttcgtagtatatttcataaactttggagcggcagcagatactaatattgccttcagtattgctcaatctaagtttcactgggtcacaaatcttggcatatggggtgcatacgatgctctgactactcaactcggcacaatgctcgccattggcgttttggggaaacgtttcggagtttcggactatttcatctgcgcattttcagtttgtttcacgttgatagcaaaaccgatcatggcttatgcggttagtactctcaaagaccactttttctatgtagctacatcgatcgacatcttcgacggaagtaaaacggtggctattcgtagtatcgtttcaaaattggtcgaacaaaacgaaattggtaaaatcaactctcttctgggggtgatagcaagtgcacagtctattgtatatccaacaatatacagtgtagtgtttctacaaagcagagatattttcattggcgccgtatttatgctggccgaagtcttccttttggtttcactgggattatacatagtatcatcatgtccaggaagctgatcagcagaagaagcaaaaatgaaaaagagggagtagataatgctgctatggaagtgacctctatgtgaatatgaataaaagcgattctgcaacttacaagttttgttttattgacttattgactggggaaagttcgctaataagtctgattaaacatggactcaacaacaccgg

SEQ ID NO: 457 - DNA, 3773 bp, Aedes aegypti
tttgcagggtgcgtcctctagcttagtggtaaagtttgcggacactgagaaagagaggcaactccgtcgtatgcagcaaatggccggtcatatgaacctgctgtccccgttcgtcttcaaccagttcggaccgtacggtgcctacgcacaacagcaacaagcagcactgatggccgcggccaccgcacaaggaacctacatcaacccgatggccgccctggcaacacaaatacctcatgcgttgaacggttcaggacaacccgtgaacggtaccatcccatcgctaccctcgccaacgatgccaaccttcaacatggcagcacaaacgccaaacgggcaaccggccggctccgaagcggtctacacgaacggaatccctcaaacctacccggggcatgcgctccacctgtcgataccggcccaaggacttccaaatggggacgctgccctgccgcatgcggcgtatcccggcatccagccctatcccggtgtcgcctacccagccgtatatggacaatttccgcaagccataccacaaccgattgccaccattgcaccagcacaacgtgaaggctgctccatatcaggcccggaaggctgcaacctatttatctaccatctgccgcaggaattcggcgacggagagctgatgcagatgtttatgcccttcggtactgtgataagttcgaaagtcttcatcgatcgggctacgaaccagagcaagtgtttcggttttgtgtcatttgacaatcctgccagcgctcaagctgcaatccaagccatgaatggttttcagattggtatgaaaagactgaaagttcagctgaagagaccaaaagacgccaaccgaccctattaacaatcagagatcaaaagcgctttaaagagtgcttctgctgaagctttaaaatacgaagttaatccctagaaaaaacgaaacactatatcatcaattaatgaaaagtgaaaaaaatgcaaaaaaaatcagaaaatccgaaaaccgtttaaaaaatacagtaaactgtccactgtaagctactaccacactgacatggcgcacttttggatgctataatcatgcgagaggtattaacatcgtctcccctctaagagcaaccattacagttaccatcaccaccaacagcaaccttctcagcaatcgtgcggtatgaaaggcgcagaacaaagtccaactctagtcaaaagccacaaaccacataaaagtcattagaaaagttacccctcaaccaaaccccccactcatcgtgctctttctccatcgaaggacatcacctctcagtcccaactccccaaaagccatttttttatctatgcacaaagttttcagtttgaaaagtcctcccgaaaactgacaaacggtgtgtgattagaatcattctgtgagagcacgtgaaatgagcctagaaccgaacccattgaataacacttaagaaatggagatatctctcagttgaaatccttcatgctatgtaaattaatagatatatgatacaaaaaaacatatattatatatacaattcctaagaatatttatacattaggtcgtaacgaagaggcaggatttaggtgagatagaaagagagggttttgtttggtttgaaccatttttatcgtgccatttcggggaaaggacgcaaccaaaaacaggaagattaaaagtaaagtaagtttttcgttttcacgtgctagacacggaagttcgagttagtcttaggagagctgcgtactatttggcacacccacacacgtaaagcgggagaggacttttcctatcaacaggatactgtgcaaactaagatcatacacattaaattcaatgaggaaaaatggtaaaggactatcgcgtatgagcaactaaatttaaacctaaccactagaccactgaagttctatatacattactaagcaaacataccattatataggaagttagataaacagaacttataaaaaaggagtatttaaatttaaacccacagcactagcgacgtaatagagcaaatgattggggatgacctaagtggaaaatttggactgtgaaccgacagaaggacaaagaaacgtgctcttttacagcgcatgagggcgaagctaaaaaaaaggacggccgtaagcgaacgaaacgccggtaagaaattgcccattacttagtatactagctagaagtaatttacctacattgataaaatgaagaaaaaggacgcatctacttacacctttacacacacaaaacatacacacataccaatgtcacaatatttgcattgcacggcaaaacgtaaatattaaagtatgggatgatacaaacctagtgatcgaacattacctagagaaatgaattagaaatttttagagctcatatttgaagctcagtttttaatcttatacgtctaacgacattgtagaatgcttaaaggtagtttgattgtttttaagtttcggctttatttattcgctgtttgattatcttcaccattagagcatcattttacctgtttcagtattaatttattcgattcttagacatctaaccaagtttaatttaagttatttggtcctatccctatcttccttgtcatctccgtctccgataaaataattttgtgatttttaagtgcaatatcttttaactgtttttcgacttgtcttcttagaagagcgaatttactacttagtaatataaatttgttagaagcattagagctgtaataaataaactaggtttaattaactatatttgatgaacatacaaatgagatagtaaagttcagcttgcagcaaacccaactaatagagacccgtgaacttcgcgttatatgctaattaaccaccaaaacaagtaattgaacaaaactacattcattcgagatgaatctacagctaagtaaagccaaaaaatgagataaacttgtaaagagaggttaaaaatgccagaaaaaaaacacgttagcgaagattgaaaaaataccgcaaacatgtatttactatgaagaaaataatctagttcgaactgaatgcaaaaatacgaataaagtaaaccaaactagtcaagttagaacccgtaaaattagggcgcctctccgtctccttcccaaagcttcagtttttccagcatctgtcaacccttctatctctagacccgcaggaaaaggaaccgtgtaagtttatggtcattaggtttcctccccggcaaagcgtggcatcatcacaagtcgcagctttgggagaatacaatacagagaatagaggtagagttctccagtcgccaagttttctatcctaaaaccccaacgctgcacagcaaatagcccgtcccgtttgatgactgcttcggttcttattttttgttttatatccaaccgtcatggccgtaagtctttcatttcgaaggcgctggtaagtgtgatctcatacccagtagtggcggaaggaattttatccccgaaccgagaaggagctcgccaagtcggctgccgctttagatcgggactatgtgtatattaaaaattgcgctgcaggatggtgggttccatggtgaggataatctttatacttttaattagaaatgtgagaggattaagtgtggtttatgcatcaatatggaaggtctcgtcagcgcactgagacggtgtgattttttatttttggaaataatatcttttcgaatgagagataaagttattgtattgaggtgttatgtgctggatttatgtttcaccacgacacatccaatgcatcaacaacgttttttt

SEQ ID NO: 458 - DNA, 1755 bp, Aedes aegypti
tgaaggggcgaagattagtgcaaatttctcggggggtgaagactagatttttactctactaaaaccgtactattctaacaaaaatgaactgaaacgtatctaaacgctttaatagaaggaaccttcttttagcaggtagcattcaggtgtttcccttttatagaatcgtcaatacaggtacacaccaagcactggttttcttttctaaattataaaaaaacgatatgcagctcaggtgcacatcttttttccgattctacatcgataggcaaaaaaagcaagaaaccgtcgttacgaatcatgcaaaacacctcaatctgggtgtttggtttcctgcaccaacagctagaatacgaacccaggtgaaggcatatagttacctactcaaactgctagcctagccgtaggaagaagaaaacctccacacatcataataaacgaaaccgagcgcaaaacagtaagaaaaaaaaaacaagcttggcttcggatgtaaacaaacctctgcgagttgcatcgagccaaagccaaagccaaaggcacatccacaacacacgttctgtccgttcgtccgtccggctgttgattccgtcctggtgcaagttctggcttgtcccctcgcgtattcaattcaagccgattgcacgctatcacttcgcaggaaaagagaaggatggtgacgagagagggagaagggaggaggacaactacatccacacgttatgcagcagataggcctcgtcgttttccctcgctttttaccgtcagactgatcccttctagcgagaggcttggcccctagaacgacaaacgcagaagttcagtttcgtatcagagttcgaagcattcagacgtgttttgtaatcgctccttgtccagtcgttttccaatcaagctgtcgttactcacgtagaattgagtgtttacttgtgaagtgatcttctgtgaagtgttgttaaaagactgtagaaacatggcaatcgcattctacattcctgccatcgatgatgaaatcgagaagcagtatcagttgcaaatgatgcaacagcagcagcagattttgatgcaacagcagcaaaatcagaaccaattcagttcgccaccaccgtcgccaacaagtccaacggagtcaattccgccaactcctccgttgactccgacgatgacgcaagtcagccttcaccacaaccgctaccatctggtgcaggcttttcatgagattctgttccgtcacgctcaagaaaataacccaacccgttcccgatgtctgctgtgcaacaagctatactacttgctgcgaaaggtgtattaactaccctgttaagttcccgccaaaagcaaaacaattcaaagttcagttccaaaagttaactacataatgtgactttgcccagtaagcaaacgttgttcgagctgctccagcgaaatgatgggatattcatttgcgcgaacatgccaacgctggatgcggcctcagtggatgttctgaatccagacaacgccctgtaatatccctgtgtggattgggtcttccgatcaaggaagtttatgattctgacgtgtccggttggaagcaacggtgatcttcgggaacgtcactcggagagcaacgcccaggttgcagtgtttggtttgacgcttcttgaaaaagaagatcttggtgaaactgaagcaaatgtgtgataatcgttagtgataaatgtgaacaagtgacactccagacactttgctgtcttaaataaatagtaattaaagtaa

SEQ ID NO: 459 - DNA, 1872 bp, Aedes aegypti
acttcgccttaatcattaatttcgaatctcgagctttcgtttagtgtaacacaatcttaaagctggatgaaattaactcgcgtttgggcgattttccattcctcgtgtacgcagttttgttttgattctcctcttcgtcgggtcgtccgtcgatttactgttatgtttttgtcgctttcacttcgcattcgcaagctgggttataataagattggatctaagtattatctagcaggatgcaatgcgtaatcaagacggaaccaactttagatataaactttcacgaagcagtggatcaaacatgttcctcgagccaatatatgacacgtcgaaattatgcagatacatgtcccacattacgactgccggatgtaacggaatcttctacggacgctatgaatcgcctattgcagcattggggtctggaggcattgagcaacagattcgccgagcacttgattgacctgaatgtactggactatatcctggatgtggacatcgtagatttgtgccgggatttgccgattcggtacaggctcgttttaagacacaatctgcaaaacgggtaccacaaaaacgctgtcgtggcggaacagtcggacaaagaacagcacacgtttgaaaacgatgcaaaagatcagtacaatatcaatccagattatttaggaaattactcccaacctccaaatttcgtatcagttccagaaacgtcggtgaacaaatatgatttttctggagctgaatctgagagagaggatgcgctcgcatcgaaatcgttcgaccttatgacggaagaagaatccagaatgagtgattccgactcggacagcccaatggatgtggaaacaccagaggaaaccacctcggatagacagattccagaaaaatccaaaacattgtacgagggtgcgtataagaagttcgatgaatggcgctcgagaaacagcattacatcggttgatgagaactgtttgctggcatatttcacgcaagagatgggcagccaaaagccgtcgaccaagtggagccacttctctatgctgaaagccaccattaacatgaacttgggcattcaaattgcaacattcacaaatctggtatcatttttgaagaaaaaatcagacggctacagtccgaaaaagtcgaaaattctcacaagagctgacatttttcgatttttgaaggaagccgacgacgataagtatttagccttgaaggttgtgctgattgtgggggtatacggagcatgtaggagagaagaaattctgaaattgactttaaacgatattgaagacacgggagtcaatgtcagaattaatgttcctaatcctaaaacaaaaaccatcaggcagtttgtcatcaccaaaggcaattcaccgggagtcgatatgcttaagttgttccgttcatatgcacagaaacgaccattagacgtaccacactcgcggtttttcgttggttatcgttccgggaagtgtacgaaacaagcgattggaatcaattcgattgcacacatgccgaaacaaattgctgaattcctgaacctaccatccccacaggaatataccggacactgcttccgtcgttcagcggtgtctgtgctaggagattctggagtagatatagctattttgaaaagacacgggagatctcaatacgagagacacgcaataaccttcaatcttgacgcggatatttaattaggatatcaataagagaatttaataaattcattcattgttgattaaaacaagtggtattacaattcatctgaatttgtgattagacggatctagtttctcaatatgtgttgtatattatttatgatctcttgtaaattataattatatgtacaggtcggactcgattatc

SEQ ID NO: 460 - DNA, 955 bp, Aedes aegypti
gttcgaaataataagcactcccaaagaagagtgatgaatctgtatgcaaggaaaatatttttgttcgaaatgagatactgatagtaatcgtaccgtgtatttgccatcgtggaggttttactctgccacgaccagaatagtaaggtaaactgaatcacgctgtagtgttgtcaagtttgaactaatgttacagtgattgttcctcaacaagagtagcgattagtagcatattgccataggaaagttaagtttattttacatcagtcgaaaacagtgcggtaagaaaaatggctgatgaagacaaaggaaaagtcgctggacatccacccgcagtcaaggctggcggtatgcgaattgtgcaacacaaaactcccagtgcagaacggccagctaaggatcccgtagaagtcatcggcttatcgaatccagcgcctaacgtgaacaccggcgaggtggtgcagagctctacgtccaacaagcacaacgagcactcggtcgaagctagtcaggtggctcatgcccagaaacccccggcgcagatcccccagaagccagtgaacaacatccagcagccacggaagttttgaacgagtgattacgaaagcatccacaaacgcaatacgtttgcaatcttttatttttcacatcgtacgtatattgatcttcttgtcggtaatgggaatagtaactgttgcgtttcacatttgctgctttatgaatcagatataaatacctacataaaaatccaacacatatatttaacacctgaagtatgttgttttctaagtttgtataaataaatttatataaataaagaacgttttatgtgagtcatatttagatttatgacgcaaataaaattatgtcattatattgtggtgttatactaaataaaaccaatcgaaagaaagtgaattgaaataaatgctattaatgataacacattttgtagacc

SEQ ID NO: 461 - DNA, 5695 bp, Aedes aegypti
atgggcgcgatcatgctacgatcgagtgcgatcgtattgctgctgatcgcttttggcgtcattatcaacatcttcggaagcgtggacgccgctcgcaagtcacccagcagtcgaattgcgaaggcgccggcctgtgccgagaatgagtatcgctgcgataacggggcatgcatccccgatgtgaaccactgcaacggcgccaaggattgtaccgacggaagcgacgaggttgggtgtgattacttcctctgcaagaagccgatgtggtaccgctgcaagcacgacaaaagctgcatcagtgcgaccttcctgtgcgacaagcacgacgactgtccgctgggcgacgacgaggaaaactgcgaaaacttcgaagtgccgcacgtcccggtcccgtgcagcaagttcgagttcacctgcacggacaaaatgtgcatcccgctggatttggtgtgcgatggggtgtcccattgcctggacggatcggacgaaaccatcggctgcaaggacatcgaaaacaagtgcaaggggttcgtgtgcaagaacaaacgctgcatcaacagccacgactgggtgtgcgacgggatcgacgactgcggcgatggatcggatgaggagaactgcttcattggatgcgacctggagcatgggaagttcgagtgtgcggacaatagcacgtgcgtcgatctgaagctggtttgcgacgggaaggacgattgcggagatcacagcgatgagggaggatcgtgcaactcgaaggagtgcgattcgatgaggtgtccagagggatgtaaggctacgccgcacggagcggtatgtctgtgtaagccgggctttaggttcaacaagaagagcaaggtttgcgaggacatcaacgagtgcgaacggtacgggttgtgctcgcagggctgcgagaatactccgggatcgttcaagtgcacgtgcgtcgacaagttcaaactgaaggatgattcgaggacatgcgagctggatgattcaactgaaccgcttctgctgtacacaactcagaagtccatcggtggccttcatctgaacaccaagcatcagtactacgtagcgaaggatctatcgcaggtcatcggtgtaagctacgacggtaggcatgtctactggacggacatttcgttcaaaaccgaatccatcgaacgatcactggaggatggcaccaagcgggaactgttgctgacttccggtttggcgtcgcctgaagatctcgaaatagattggctcacgggaaacatctacttcagtgacagcggcaacatgatgattgccgtctgctccaacaacggagttcactgtaccattctgattcaggacacgctgcataaacctaggggtattgcgctgatgcctcagaacggaaccctgttctattcggactggggagataacgccatgatcggagccgccggaatggacggcaaaaacaagagaatcctgatcgagcaagacattcattggccgaacgggctctgtctggattggcccaacgggcgcctgtactgggtggacgccaagctgaagaagatcgagagcatccgggtggacggaaccaaccgggtgacggtgctggccgatgtcctgaaacatcccttctcgatagccgtgttcaacgatcgcctctactggtccgactgggacacgaagagcattcagtcgtgcgataagttcaacggaaaggatcgcaaaatagtggtgcatgatcgacagattttcgatgttcatatctatcactccggtctacagcctaaaggagatcacccgtgcttgggaaccttctgctcccatctctgtctcctcgcaccgaacgatagctacagctgcgcttgtccctacggaatgagcttgaaggcggacaagcattcttgccgcgagacggtcaaacgccagtatcttctggtgggaatcgccaactacctggtcacgctggaaacgcaaaccttcggacgtcacgagtcttcccaagccgacgcctaccaaatattcttccaccgaatggccttcaactcgatcacaggggaaatcttcgtcgccgacaaccgtcagaaggcgatcttcaccgtcgatcccaaaaccaaatcgtcccaaaagctgatcaccaccggtattgggaatatctccgcacttgctttcgacttcctcggcaacaacttgtattggacggacagcgagcgatcgacggttgaggttttctcgctccagactcgccaccgggccatccttcagcactacctaggtcaagatattcccgtcggtttggcgatcgtgtccgagatgggcaaaatgttcatcgccctgagatctcccctacccgtaccgcacacccacatcgatcgtttggacatgaccggccgtggacctcacctgcatgttatcgaggaacgactcagcggcaacggatcgttcaacttcgtcatcgatcgcgatctgcgttcggtctactggaacgacatgggttcgagcaagatagagttcaccagctacgaaggcgatacccgccacctgttccgggaattccttcgactgccggtttccatagccatcgtaggcgacagcattttctggacttgctaccgatcgaagcgtctctattggtccgacaagcacaacctcggcgtgaccaagaagatcaccattgacaagccaccgtacggagcgttccccgatgaaattgttctgctgggcagtcaaccactgcagcgatacgatcacccctgcatgaagcaaaatggcggctgctcgcatatttgcgtccccgctggaatgtacagctctgcgtgcatctgtccgacgggaatgatcttcagctcgccgaagaacacgacctgcatcgatgcgatcgactgcgagttcaagtgtaccagcggtgagtgtctgacgatcagcaagcgatgcaacgggaacaaggactgcgcagacggatcggacgagaagggatgcgatgaggctggacagcccaagcagttgcactgccaatacgatgagttcatgtgcgcagacaagagcaagtgtattgatcagacgcgaagatgcgatgaacacgtggattgcggcgatggttcggatgagatgaagtgcgaaggttatgatcgcggaactggatgtcatgaacatcagcatgcctgcccggacgggatgtgcatcgatgtgaatacgctgtgcgatggattcccggactgtctggatggatcggatgaggtgggatgcacggatctgaccaacgaaaagagcaatgccacaacctgcggaccgctgatgttccggtgcaatatgggccagtgcattccgaagtggtgggaatgcgacgggaatccggattgcacggacgggtcggacgagcatgacaagtgcctgacgaagaccgattgtggggcaggtttcaccaagtgcgcactagggcactgtatcgaggatcgattgctttgcgatgggaacaacgactgcggagacaactcagatgaactgaactgtaaggtcgagctggaaccgtgcgtgggcctggaggatgataacccgaccaagtatttgtgtcctcgatcggggaagtgtttggatattgcggtgcgctgcaatgggacggctgagtgtccggatggcgaagatgaggcagggtgcagcaactgtggactgcaggaattccagtgcaagagcgggaaatgtatacggaaggagtggaggtgtgacaaggaggtggattgcgacgacgggagcgatgaagtggattgcgtaaatggaacggctgccgaacatttggaggtgcatgtggcttgcggagaaggtacctttgagtgcaaaccgggtgtatgtatcgagatgagtcaggtttgcaacggcaagaaagactgcgacgatggtaaggatgaaggcaaagggtgcgatgatgcatgtgccaagagcccatgcgagcacaagtgcatcaaaactccgaccggggcgatctgcgagtgtcgtgaagggtttactttggccccaaacaagaagtcttgcttggacgtggacgaatgcgccgaaggaaggccttgcgctcaacagtgtaggaatacgttcggctcctatcgctgctcttgcaatccagggttcatgctccgatctgataagatatcctgcaaggctgtcggtccaagtcgctacgttctgtatacttcatacaaccagatacgtaaactggaagtgaatcctccatcgattcgtatactgatgcaggccaacgagtcccggatcacttcaatggacgtggacatacgcaggcagatgctctactttaccgacgagtacaatccggtgatctacgaacacgacatggaacgcaacactacccacgtgctgtacaatgttggtcacccggagcacctggccgtggattggattaccggtaacgtgtacttctacgaccgatccgaaccgtcgatcaaactatgctccgttcagcgtcaactttgctctcgaatcataacctttgcttcgcaagtcttcgtcaaagccgtcgtcgtcgatcccgtgaatcggatcttgttctactccctcatgcacttctggatctttcaagtcccgcactcgatcatctaccgggccgatatggacggccagaatcagctggtcattaccaaggatgtctcgcatgtaacttccctccaggtcgatacggagaacaagctgctctacattgccgacatcagctctcggaccatcaatgcactcgattacgaaggcaaaaaactccgtacggtcatagagaatcagaacctggccgttagcaaaccgatcggaatcatgatctatgaaaaccaagctctggtcctcaatatggcctcgtctacggtaggccagtgcaaactctacggagacttcgaatgtcgactgctggagttgaacgtccacaactcgaaccaactgctgatcgtccaggaatctcgtcaaccggaagctgaaaacgtctgcgatacgaacaaaatcaactgtagtcacgtgtgtgttcccggtgccgacggacatggagtctgcatctgccacaatggcgaacgaatccacggaacggacatctgtccgcaaacctcgaacgtgatgactcctctggtcaagacgcatcttggcgaagccgcgccaaacgttcacgattcgtccgacgaatcgtcaacaggttcaacgatcgccaacgtcttcctggtactgctgatcctagcgctagtcggagtggcgggcggatatatctaccggcgtcgctaccagcacaagttcgacatcggaatgcacttccacaatcccgaactcagtacggccgatgcggccgaagtcaagatgttccagaaagtgccacggctcaatcaaaccactacgcacaacgagttgacgctggagacgcctccgcacaggcctccgtgtcaaggcgatctcaactcaagcgagtcgaccgggcaaaacaatgtcaccagcaccgccctggagctggagaacatgtccgacgtggactcgatggaggacgcgtacgactgccgagatgatcccttgcagcggttgatcctctgaattcgggagcgcgcgctggtttggttacttggtaataagtaacttcaaaacctccattcttttgtagttgttaaatgttagtgtaatattagtaatttgtaacaaatttagttgtccatttgttgaagaataaaccacggctttgcgttgt

SEQ ID NO: 462 - DNA, 2144 bp, Aedes aegypti
cctagccgaacgaaggtagctcatttttatcacagaatgcatttcattcatacacggagacgctctcaaattatcaagtgaagtcaacgctgaatagtcagccgactagggttcacgcttctatagggggcctggaatacatttctctagtacaatgcattgtacttaggcaccctactgaagtccgcgggcagttacagccaaatcgttttgtattcaactttttttttgcatttattcatattcactttagaagcctagctatcttcgaaggcggcagcgtgtgtgtaacgagtgtgcgcgcgcgtgaaaagacgtattgtttagcagcgtctttgattactatcatccatcgtctggtccaaaactgttggccgcggcgcgagcctaagcgcgaatagcactaaacggcgcttgggaaattatttattgtttaaccgtcgaacggaacggaacgcgaaaaagaacgttggaaaaattacttatcgggaagtgttgctcgttgactggaagttgtgcctccatccatgataaggaataccagaatgaaagtgaaattggggtcttttctggaggtagaatgtgtgaaacaatgaccactggtgaaccgattgatcgtttcgaagagtttggatgattttgaggggtcaattttgagtggtgtgaggagagtaccagtgtagtgaattttatagatttccattgattgacacatttgtcgatcgaatcaacttatcgtaactgcagatacaaaacacgcggaagcatggttagaccggcatcaagaatattcattaagttcatcgaattattggcatgtgttgcatgtataattacgaaaatcatcactgaccatgagtcacggcgagtattcgtgcggaatcagaaattatctagagaatggagtctgatacacaacgtcacctggagcagtggcggcaatgcatttaccaatatcgtctacggcggctacacaattgtcatagcgttgatgctaatcacaagatgtgtggatgccaaatcgagaccgacgcttttcgaaaagatcgtgctaacgctaggaacgttgctattcttcgctgcaggtggcctggtttttgcctcaatagaccaagtacatccggacctccatgacaacgccatcatactgggctgtttatcgttcctggtagcgatactgttcgtcatagacttggccgacccgttggctcgcatgaccgcccatacgactcaaaccgatagctcctcaatgacgaacgtttcgagagcatcggaaacggaaaagggtattactttgaagaaggatgtatcgaccgatacggaagcgccagtgtatcttatttcaggcaaggaacggtacaaagatatgaacgaaccggatagtcatcgatttgtggattcaaatggacgagattatgcggatcgagatgaaccggaccgaagaagctatcgtaaatctgaatcaaggcggcaaagctatctggaaagtattggcgaaggtctggattacagccgggagtctatcgttgaacgcaaagtgcttccttctgtgcagacgccggtttttgctcacgtgcgaccagcacctgaagaaagtcgtcgtatagctgggaaggaaatccaatacctacctcggtacgattacagagatcgacgggactaccgcgatgccgggccacaatcaggtcgccaatctgtgcaccaacagtcaccgaaagcaccttcttatcacgacaacgagtcgttcgtggaagaaatctcaccatctcgtcgtagcacctacgttccggcagacaagtttgacaacgaagcagtacagatgaatcctcgtccaaggccaccaccaccggcaaagcctaccacttcacctacgacggcgcatggatctggttcgggatctggatccagctgcagtaactgcaactgctcacagagaagcctaccgggaaggagaagagaacaaggacgggatgagccggacataccgatcaaaccgggctacgtggctaacgccgccaagaagtgggacgatcgacttcggagtaaaagtcagcccattataggattgaatactatggtttaacaaaagcgaagattttccaaacagtagcgagtagattagtaataaagccattttcctagaa

SEQ ID NO: 463 - DNA, 1054 bp, Aedes aegypti
gaacctaatgacttacgtcgctgattaacttaagcaggcaaaatgggcaagaaaaaggatgcatacatggaccgcgaagacgacttccatggattttctcacaagaagcacaaaaaacataagaaacacaagaaaagcaaataccagccggaagaatttacccctccaacgtacgattatgtcccggaggatgtcgaacaaactgttgaggtaatggaagagatcgagtatatggaagccgatccggaaccggaaattattaccgaggtcgtcgaagcggaaaccgagccagaaccatcaacttccatgacgattcctccagtagcttcgacttcatgtattatgccttctcaggggccatcgttaaaaaccactccccagggtaagaattcatcggtcacaaaggcgtcgaagaaaaagaaaggcaaaggcagggacagtggcacttccagcgaagaagagcgatggcttgatgctattgagtccgggaagctggaagaagtggacgatgagctaaagaagattaaacccaaagatcccaaactaatgactgctcgccagagggcaatgtacgagcggaacaccgataaagacaccaacaatttgagcggcgaaatgttgatggcacttcctactggatacaaagaaaaagtaatgaccgcagaagcgatccagaaagctcagttaaaatcccaaaagagaaaacagctagcagatgaaaaacgagaaaaagacaaaaagaaaaccatggagcgactgctaaaaaagcaagattcaaagtcagtgaaagccattaaaaaccgagcagcaaaagcgcaacttccgatgataacgtacgtgaatactgtcgaaggtgcgacgatttccctaccgccgaatgtagaatttccccttcaaccgcaaaaacccgtggatccaccgaaacccatcatttgcggcatgcccaactgcaccaacatcaaacggtacaactgttcgaaaaccaatattccactgtgcagctatcggtgctacaaaatgaatgtggattcaataaagcagatcatatgctagt

SEQ ID NO: 464 - DNA, 1119 bp, Aedes aegypti
gctgtggttgttcacccgacagctgtcaaatttcgcgcgtttgccgctcaaaacaaaccgtgctcgcttggaagtcggtcgcttgcgtgagtttctgttcaaagtttattcaggaaatttcctggtaaaatcagtggatttccttctagttaggtgttttttcctttatccatcacgtcgagatgaacgatagtttcggtgccggagggttcagtgccaatgccaccggtggtggggcagcccaggagaacaaggccgagggcgttcttccgctgaccattcgacagatcttggaatcgtccgagagcggagtgcagttgttcggaatccactatagcatggtcacctttgtggccatcgttcggagtgtggatcattcgtcgacgaagattacctacggtctggaggatcacaccggccaggtggatgctcacctgtggctggaggaaggcgacacaaacagcgtcccgggaatgatgacccacagctatgctcgggtgttcggatcggttcgccatcagggcggaagcaaggcggttatgatctacaagattgaacaggtcagctccccgaatgatgtgaccacccatttgctggaggtgttgaatgctcgctacaagggagaggagtatgccaagggcggaggtgccggtggcagcggtggggaatcggaaaagaacaccgcctcgagcggaggattcatggaaacggatggcaatgcgatgggactgacgggcaaacagctgatcgtgtacaaagctatcaagagccatatgtcggacattgggattagtcggcaggagctgcagcagaagttcccgcatattagtgcctcggagatgcagagcataacggattacatgacccaggagggaatcgtctacaccagtgtggactccgatcacttcctatgtgtggacgcgtagagcgcttgatgtgttgttggtacaaattaaggtatttataagcacccatattattctcttatgtaatagttattatacatcccaaatgcatcattttgatcaattgatttgttaatgttaaatcagaacccagcttcaatttcggtttaaagtgatcgatagtgttcgatacatacctactaaatgttccgta

SEQ ID NO: 465 - DNA, 1474 bp, Aedes aegypti
gctttgtttgcggtagctattatcacatctcccagacaagaattcaccttcattccactgggatgctctcagttaaacgccgaatggtgtctgagtttgaacttaaaagtacaaccctttagttcataaatttgaaacatgattgttttgattgagtgtgggacgtaactggagtgtagtgttgaatcgcatcagtgcattagcagagcagaagcataacaaaaccaataatgagattcggttcagaaaggtgtatttattgcctgggagcaattctggcaatcaatcagattggacagctgtgttcaggggagataacggaacagaagtttgatgcagctcaatcaaatcaaggacaaatcccggacgatggaggaggaagtggaagtaacaaagttctatcgagaaaaagacgtttcctgcagtttccagaaggcagctcgtttcaagttgtgtacgatcaaaccattccagtggtggggagcactcttttattcacagtcggtgtaacggttgctcttgcctatcagttgcccagtatatccgtttttgaaatatcgaaaatgttacgagagcaagtcgaagaaggagtacacttacgacgaaaagacgaaaatgtcaatacaactacgctggtcgacactagtacgagtaaatatgagcaaagtaataagcactcgtattactacaacaatccttatggaaacagcttataccagccggcaaatgggacgaagaacatttttggttattacaacaatttgcaacaacaaaatcaacaagcacaaatgggttacaacaatcgaataaaatactatactagctccaatgatagcagatatgaagcataccagaacaacgcaaacaaatggccgcaaaatccatcattttcattgaaagatttgccgccaaattttctatcgccatacaaccataccaaaaatgattggaatagtctcatcagtagatactttttgaactgggttcgaaagcatccaccaaattatcacctgagcaaaaaacgtttctaccccgtgttcggcaaacggagcattgaagagcatacccatcccgaagataagttcttcctgagccatcatcgctcaactcgacacgacttgtacttgcagattgaaaagtttctcgatgcgaagggcaaacatggtcaccactgcgttttgcgagccctttgtgaaagtggacagcgaaggaatgcaaacgaaccggactcatttttgaaggagattttgaaggctgtttttagtttgccaacgacgcacgaaacgcccattcatcacaaacatcgaatgtatgacgaagctcacggtcatgaaggagattgtgcggaaaagttttcgttttgtcaggatagtatatggtcagatagttttattttctgaagggtgtagaacaacagttcgaatgacaaatattttatcgtttataataaaacagtttttctaaagcctttttt

SEQ ID NO: 466 - DNA, 1552 bp, Aedes aegypti
agatatacatctgtactaatgttttgttatctgaaactgatcgaaaaatcctgtggttctgggtttcgaagacaataaacaaagtgctgttctcacgccacttaggtttcaaatgtttcaactttcaagcttaaaacgtttttgattctactaaatgcgatacttttccatcaggacaaaaatcaagtgcttaacaattcgaaacactggacaaattgaaaaacacttacaacagatgtctgtctgctgtactcttatgagtaatgcgatattgaaagatttggaaattgccacagtgaaagttgtcgtcatttcgcttcaatttaacacatcccacaaaatggaaacgcaaacattctccacggtatctatgccgcacgatttacttccgacgtaaatgctaactgtaaaaaaatgtgcgcttacaactcattcatcggatatattcattctggccatagcaagttcccatcagtaagtgcaaactggcaagtgggacgaaagtgttgacgatgaaagcattgtttttgcttgttttgattaccatccacgaatgctccagtatctctatcaacaaacctggggatttcggagaaaacgatcgaaatgcaaccgataggcagctgtcactgtccaggaagaagaggtttctgctttttccagttggtgccgctattttggtaacagtatccggcgcaaaagcaatggtatacaaaggccctggaggaaattttgccatcttggaactggacatgtatcacccgcttccggacttcaataaccgttttacacaattcaaactaggtgaaatatattacccaccaaagcctgcacccaagccagcaccaccccctccaccggtaccagctcctgcgccgccacctccccctgaaaatcctcacgatcatcacgatggacatgaactgtcggaaatggaattgcaagactacttgaaaacgcacccggatacgtgggtacctccaggatacggcaaagatagatctgactggttcccaaagaatacttacaatccgtatccaaattactatcgacaaacaccggctgcaaattatattccattcgaaagtaatatgttggacgtcaatccttcaaattcttaccgtatgagaaggtctggcaaaacagtaacggactatcatattgaagaagatgaggatcgatataatataagtcatcatcgcaactgggagcattactaccattatcgggaaaagcgagacttgtaccaatcacttgaacaggcacttggacagaagcttcgattccagatgaaatcctgtatattgcgcgccatatgtgaagcacgaagtttgcttcttccaccgggcaggtctatgatgatggacattctaaggattgtattcagtgttccactgaaggatgacctccaggatgaatacagtaaggcgatgagacatgaaaatatggattgccatgaagtgtatggaaaggattgctctgtcagtatattgtatctgatcctatttggaaagtttgtaacgtaataaaaaaaaaacaaaatgtaagaaaa

SEQ ID NO: 467 - DNA, 1504 bp, Aedes aegypti
gcaaaagaagaaaagccaccaaatcaaaagccgtttgaagaaatcgattttccggagttagtaccagcaaaaatccagtcttatagtgctcatccgtttccggaatgtgcgaagcactcggaaacagttttattcagtgtgattaaatgatgaggacaactaatttaacagtatgaccagcttcacctgtcgagtttgtgggaacgttccgctggtggtgccgaacgacccgaaaccgtttgccgaggtggccgctgtgtactacaagatcacggatcttcagaacgttgacgaatcatcgctgcccaagaatgtctgtcaattttgctatggcaaattggtagaaatagactggtttggaaagaattgcattgcgtcgtatggtcgaatgacaacaacgtatccgtacggatcagatcatgaacagcacaacagaacagcatttaatatgtatccggatgaacaaagaaacagttattcaacaaataccatccaacaactggagccgcttggacatattatgaactatccaaacccacaagcacatgctgaaatggttgcaccaaactctgttttgggtacggaaaatgtagaattttcacagtctccaccaaaacccagtggtgcatcacattctaaaagtcatctggaaaagtctcgatctactcatagttccgatttgactgccatacataatcggttggatcagctaggagctaagttggatggccacagtgcaatactgcatcggattgagatgtttatgctgaattcctcttattccaaaccagcagaacagcagcagcctcataatcgggatgattttcgactgcgcagtggcgagaatttcgatgaattcgagcgaatgcctaaaattgtaactaaagaacagcttactgagctggatgcgaagctatcaaaccctgaatatgaggctaaattcttccgatatattcaatcagtttataagctcactggaaaacgtgagggctttccgttcttcaagaccgtcatcagaagattgatggccccaaccgtgctggtctgctattcctggaaggggaacagtcgtacgaagaaaggcgatcaaacagccgttgtgaatgatcaaaattatagcttcaagaatatgttcccgaatatcgttagattcatctaccgcgttgtgagtgcagcagatttcgagtacaccagcgaggataacgagaaagccttcagcgattatctgcgacagaagacgacggaaataaaacggtttctacattcgaacggcgttcaacgagaggcttgtacccggaaacgaagaaggaaaatgcagccaccggcagcagctgacgatggtggcagcagtgccggacaagatcagggccaggatcaggaaatttacggcgtaaacgacactaccgatggtgacttcagctacgacgaagaaacagtttccgataatggtgatgacggggtggacataaagcaggaggcatatgggtctaatgatgtggtttag

SEQ ID NO: 468 - DNA, 1136 bp, Aedes aegypti
caaagctttggcgaatcacctacgctttggaactaagaggtttatcgcgtgactcatcaatcatcagcagattgcaatgcatcgtttagcaatcaggtcgatcctagttgggacggtttttctattgaccaaggcagccgttaacgaattcgtgacgtgcgatttcgatttgggatctgaagtggaacccagtctaccgacagagtgcgaaaacgtggacgattcgacgcgggcggccttactgcaggaagctgaaagcttcaaggtgttcaatgcgaaactgtcggagtacgaggcgagcgtcggtcaggacaccgaagatgagatatacaaggattgggagtttcgagcagaactatatgggaacgctgagctgaatttgtgccaaaatactacggaagttttggtggagtatctcgattgcttgatagagaaacgtgcacagatggttcttgaaattgagaacaagatggagcatggcagctgagaatttctcttgtaaataagctagtctagtaacgtgaaatcaacaccaatagagttatattatatggagaatacaaacctaaacatcgtcgtttaactcgtctacgaattctgcgaccaaatcgtctacgcgtgcttctacgtcttccgcctcaacgttcgccttggacttcttctcactcgactccgctgtttcctcaacagcttccggttttcttttctgggaacttttcggagaccccgctttgccattctgagttactgctggcttcggtgtagtcaacggttgttcgatcacctccacttcgtcatcgtcctttgcttttccgttgggggtttccgagctcttctgcgcatccgtctcaatcaattccacttcattttcctcttcattatcggaatcgatttcaattgccgccgattccacagtcttatcagtcgtcgatttctgtagttcaccactattgaagttggccctgttttcatcatcatccaagttgtagacgacttctggagactgcttctcttcgatcgtgacctcctccaccgtagcgatttgctcttcatcttcactgtcttcaacagattctacgacattcgtcgctgccggttcgggaaccgattgtttgactttctcaaagcttatcgga

SEQ ID NO: 469 - DNA, 1526 bp, Aedes aegypti
cgaaacaacatagcaaaacatacctacgtggatgatatttcagccgagagccagacgaagaagtacacgttccagacaaatcctggaattgacgacgccgtcggaaggattcgaattacgccgcccgaagtgtacagtgcggagaaagtgaaagttagccgaaagaaaccgacgaaattatgaaacagcttgcgttgttaaccttgacgctactctgctttgcggcagtggccctcgggcaacgtgtggcccccggagtgaatcccggccattatcagcagcaaccaccccagcaacagtatcagccacccccgccgcagtacaatcagcatcctccccaacagccgcagcagcactatcagcagcaacagcaacaacagcctcagtatcagcagccacaggttccggttcagccgcagtaccaacaggcaccggttccacagcaacagcagcaacaccagcagcctccacagggccatgcccctcaccatggacagccgcaacaggtgctgaatgccaacaatatccaacaggaaaaagcgcacattgccgagcatatggacgtgccgatcgacacgagcaaaatgagcgaacaggagctgcagttccactacttcaagatgcacgactcggacaacaacaacaagttggacggatgcgagctgatcaagtcgctgatccattggcacgaggaaagcaaaaaccaggaacagaccggccagcccggccaccaggacaaaatcttctccaacgatgaactgtcggcgctgatcgatcccattctcagctcggacgatcacaaccgggacgggttcatcgactatccggagtttgtgcgggcacagcacaaggcggccactcagggagcgcagggtgcaccccagcagtagtaaactagcggccggttggcgtcacccagccccaccgctcccccacttcccacccctgtcccaaactgcgaatcgggggtctgaatctccgaccttaactaatactatcgagaccgagccatatgagatttgttacaatttgtgctctatttctatataagttgttggtattttcttgtattttcgtactcagctcttactacttacgtccagtatttcggaaatgttgaacattcctttgcttttgcaatcgcacaaaagtctttcttttcctttttggcgaaatctgacgcaaaatggtacttttctgttttccaagtagttgtagctatcttttccctttgtttctctttttcgcgagaattcgccgacaaaacgagttacaatgagagcgtaccgtaggcatgttagtaggaattatattaagaattacgaaaaaaactgtagtactgtgaagcaggagtaagtaaatctacttaacaaaccattcgtatgagagcatttgacttttgtgaggactgtatttttgtaacaaaataaaactaaaaaaaaggtgagaacatgaacaaatgaatgcaattgtgtgcgaatatggaaaatgacaaatacaaagcaagtgatactgattgcacaaag

SEQ ID NO: 470 - DNA, 1536 bp, Aedes aegypti
caaataaacaccgaccgaaaaccggtgtctcagcggagacgacccaatacttagtattcgtttattaagtcgataacttatcacagagataagacttcagcaagacggtcgtcttcttctccgcctccagtcgaagatatcttatcgtggctgaaacttgtctccatcgcagtcgttgtctgtctttcgaattggtttagcataagccaagggtgtagagcaattgggcacaagaaaacaagcaccacattgccagaggaaccgacccggagatgatgtccaagctattcgatgagactggttccagcagtggaaacgctacccgtaatgcgttgcttctggcggctggagttggggtagccaccttagccggttatggcatctacaagctggcgctgaagtacctggaaaatgttccacccaaagaatggcgtcgagtgggagagataacggacctccatgtctaccccatcaaatcatgtgggtctgtacgagtcagcgagatcaactgctccaacatgggaccccgtattgctctactccgggaccgtatcttcatggtggttcaaactgacgggacgttcatcaccggacggagtcatccatccatggtaatggtccagccacggttcgacgacaagcacgaaacgatgaccctgtccgctccagggatgatggatatcagcgtggatgttaagcgtctgctatctgtggaaccggtcaaggcttcggtttggggtcagactgtgacagcggtggactgcggagaagaagtagcccggtggttgtcccgattcttgctcagtgaagacttcggtctacgtttggtgttctatccgttggactaccctacccgggatgtgagagagaaaaacaagattcacctgaaattgacagctagggattcgggagccctgcacgacgccaccagctatatgttgctttcggaagcgtcggttaccgatgtgaactccaggttggagaaaccggtaacggcactgcagtaccgaccgaacatggttgtgaagggacccggggcattcgaggaagacgactggaagtggatcaagattggagagacgatttataaaaatgttaaaccctgcaccagatgcatcttcactaacgtcgatccggaaaccggtatacctagcccacaaggcgaaccactcaaaaccttgaaaacctaccgtaagaagcccggcctcggcgattcaccggttgtcggcatgcagatgggcatccgcaaggagggcaccgttcgtatcggtgaaacggtctacattggatgctaacgttacgttccggaccatatcgctatcgtcgtcatcttgactagctgccattcctcactttttatatctgttttcttacgttgtgtgacttgctgttcacgtgattgaacggactcggtgtaggagctcaacagtattttgcttttttatgcaaatcaatccgcatgttatgtaacgttgatgttcttattatgaaagaaaaattccttgttttaaaaatacaacaaatttattaacattt

SEQ ID NO: 471 - DNA, 878 bp, Aedes aegypti
ctattgtttagtaaagaaagttaatatctgaaccgatccgactagttttttggttacacagactaatttgtcagaacaacaacgatgtcgaaaccacgattcccaggtcgtcaaagtcttctcaaggtcaatcgaaatgcgcagctccaaacggtagtaaccagacaaatgtcccttctacgaccgccgactatgccaactacaccgaagcacatcgacccttcgttacccctccgtggacggcccccaaagcgtctaaagatggaacagctatcagtaggccttcgacaccaacaaggttcctccttcatcatgaaactcttcgatcgaagcgtcgatttggctcaattcgacggggaaagttcgctttatcccgtttgtcgagcttggatgcgcaatcaaccgcgtgctcggcaaaacccgtacgacccaaaaccatccgacccggcttcgcctccgcggggagcggaatcatcacgccactcgatgcccgacattgtcgagcggttcaatcggaaagaggtgcttgaaattccagacatgccgaagccgagcgaaaccgaactggaaccgtttcggttcgagcggcatttcgcggagggtgaagataatgaacccgatttggatggagtggagggatcagctgatcggaaagagattcttttgcaacaccacaaggcgcggtggacaaaaatgcgtcgaagttggcaaggccatcggcagaactatttgcgcaagtatcagcttagctatgatctgctggacgctatcatgatgaagcaagtgtgagctaatgcgctattgggaaatgacaataattattttgttataacgattgttgctggtttacagattaacgataataaagtttgattatc

SEQ ID NO: 472 - DNA, 999 bp, Aedes aegypti
gcaaagttttcgtttgcttttggcaaacataaacttttgccagcccgcagtaatttcggttaaaagtctaaattctcaagaaaaatgtcctataataaacatttcttcatactgaaagatctcgccgaaaacgaatcggacgatcagttgcagatcatcacacttcgtaatccggccaccggtaagccaaccaagtatctaatccgcaatgatgaccttgatttgtacgaactgaactgtttctcggaggcgaatcggtcgtggttcatcaacgaaacggtgtgctccaatgggaagatattcctcccgactaggatagatcccctgtttttggctataccttatttggagaagaactgcaatgggaaagccgttcctttggatcacatcctggtggatgatgattttccccatacgcaccggctggtgaaggcatgctccagaaccggacagctggcgttgatttccgatgagaaaaaggccggtgaaatttgcgcctacaagtacaatgaggaaaaactactggattggcttcgtcggaaatgtgtccggctggaacaagccttgggaaaggaacgtaagttctcccggtcgcacaatttcgtcaaggaggaaaaggaaaacgagcggcaagctggcgagatgcttctgtatgctcacggcattatgtccgattatttgagcctggaacacagccgaaagcttagcattgccgttggaattccggaggagaagcctcagaataaacggaagtcaaccgctgagctggaatttagccagataaagaagatcaagaaggaggaaatccacgagacgacgccaatcaaacccgtggagaagaaggtaagtgccaaatcgaaggcgctggccaaagcggcttcaggaacgaaaagtattgccagtttcttcaaaaagtaatgcgagggtttgttatgtgttattgtttgtttcatttaatgatgattaaaatagggaataaattaaggaatacataaagct

SEQ ID NO: 473 - DNA, 2373 bp, Aedes aegypti
actggcacacaaacaaaagccgcatcataaacaaaaacaaacgaccataaaataaacaaattgcgctgattcaagatcatattttgtgcaaaaagttatcataaaaactcaactaacacaaaataattaattattaaattacgtatttgttatccgaacaaattacaatgtcaaccacgttcaactacaaggacttgctttcgtattgctgcgtatgcttgaaaccgatggaaccggcgtcggaaacggaaaccgtgtctcccgatttcgtggatccgcagtccggattgacggtggccatgatgcttcacgaggtactcctggattcttcgtaccatgagcttgaaacaccggattctgaggggaatggaatttgcaaaatctgcttccagaggctgcaaaatatacgattattccgcagtcaatgtacggaagtgtacggattttataaaacattactacaggcccagagcaatgatgatcaactatcgaatctgttggcggacagtataagccacgatttacgagctcatttgttccgtttgggagtcacttccagtgaaaaccttgacagtgatacgttgctttccgaaattggttgtattaaatctgaaaaggataatgccttagtggaagatcttcagaactcaccatttattagttatgaagtagaaatcgactctccaaaatttgaaaactatcctgattcagagggctcagaatcaagcaataatgaaacgttagctaccattcaacggaaggaacaagcctcaaaggcgcctcgattgactgtttgtcccgttccggactgtcagcaacaattggtaggtaacagatacactgaccatttgaaagaaatgcaccgctacggctgcaaacagtgcggtataatattgaaattgaagcatgttatggagaaacatgtgactagtcacagccaaaatcaaccgactgtgaagtgcagcttctgcgagcggatgttctgcaatgtggccaaaatgcgctgccacgccagagatgttcatttacagcaagcagccaattacgagtgcgaccagtgcggtgaaatgtttgaaagacgtaagctactaaatattcaccgagaatcgcatcttccgaagaattgtgcctattgtgagtatcagtttgaccattcaaataaactgctatatcacgtaaaaaggatgcatccaacgcatctgttgcgatgcaatgtatgcagaagaatgttcgttacacaggctttattggatcgtcattcaaagaaacatacggaatcacctttctctgaggacagttatcagttactaacattgaaaaatttgcccatcttcgtttgcgaccaatgcgagaagcaatttacttcagaagcgcaccgcttggcacacatgacaaagcatgacccggcaagccgacctaaagttgtattcaaaaggcgttcaaaggcggagttggccaaactggagaaaaagtttaagtgcgatcagtgtgacgcttgctacagactaccaacttcactggaaacgcacttgaagacccattccgccacattcgtctgtgatatttgtggagcgttcttcaataacaagtccaatctcaagcagcacatcacctataaacatacgcgaaactatcgctatttttgcgagttctgtccgaaagcttgtgccacaagttccgatctgctgcgacatcgtcgagtccataccaatgaacgtccctatcaatgtgagctgtgcaaagcgcggttcaaaaccaacgatggctatcggaagcacatgcgagcacattccggggagaggatctatcggtgcgatctgtgcgagaagactttcaaagaccactgcagtttgaagacgcataaaattgcccataccaatgagaaggcattcaagtgcttccactgcgaacagcatttcaatgttcccaggaatcgcaggagacacatcttgcgggcgcatcccggattgcctaccaaactggagcaaaaggagtctacggaaggtacgtaactttgattaatatatttttaaactcatcgatactggaaggattggtgaaataggacaaaagaaagcattatcataaaggttcctataagatttgatctaactcaaaagagaacggtttgaaattggaagccatcggtcaatcaattttcttttccatcaaaatagttaaatttgctcatctttatcacatgttctttatacatattgcacaataaaaacatcttgaaaaacatccaatatatccccattaaacattgcctcagcaccgaaaccactaggtttccctctatctctatttccaatcatgtatacttcgttttggtagattcgatggtcaaacctttcgtgctgtgcgtacacg

SEQ ID NO: 474 - DNA, 1606 bp, Aedes aegypti
aaaacggtcatctgcgtgctgccggcgccaagaattcagcgaaaggaacataattttgtgagtttaattcggtagaaatagagacaagaatcgtaccggaagtgatggcagccttggacacgttcccggaacttccgcggcctggagagatatcgatctgtgagcgaaacggacgcatttgctcgctacccatcaacgaggtcgatgcatctagttcttgtaatcaactcttatcgtaccccgaaatcaacatcggacgtgagctgttccaccatgcggctgtccacctgcgagaggatcaccgaacgcttatggtgccggtcgacgaaaccttaatcaaacgtatcacgcgcacctttttcgaggagggagcagtcgaagccctgaaggaagcagccaacagcggtagccaccagtacaatccaatagtgggttccttgtcgcgatatctgctgaccctgatcggagttgggaaccgagtcaaattcttcttcaagccacatctgaaggaacgtggcgttgactgcgtggggaagtatacgcaaacgaaagattgggccaaaagtgccatacgatgtatccggtggcatccgaattgctttaaagtagccattgcggcctcggacgatagcattcgggtttacagcgacgaaccgaccattgttccagtgttgaaaagtggtctgcaaaagtcggttacatcgttggcgtggcgaccttatacggccggggaattggccgtggggtgccaaaatggcactcttgtgtggaacgtcgatccgaacagtttgataaccagaccgttgtcacaggccgtccaactgagacatggcaaccacttcccagtgacttcggtggagtggagccctaacgggtgtctcttggccaccgccagtatcaacgactcaaacgttctaatctgggacgtggatcaaaataggcaggtaccgctccgtcgtgtaggcccaccctgtgccttactctcgtggtctccaactggatctcgactgtgttccacgacggtctcgaacgttttccgtgtatggcaaactgacaaatggactccggaccgttggacggtcaaccatggcaccatccaatcagtggtttggtccaaaagcggatcccatctcctgtttgtcacaacggaggactgtttcctatacaatttgggctttgttgaagatgaagtgtttacctctacattcacgccaaaatcggcgctgcccattgctgatctatcgaaaattcccattggtcaaaccgaggttggaggtcatcctcaagcgctggcctggtgtccgcagaaccaatacctggcaatcacatttaaagaaacgccatcaattgccattttcaatacggtggtaaatcgcagccagttgagcattacaccatcgtgtttcatcactggcattggtatcgaaagtgcatcgtgtataagcttccaggaaaacctcggacggcgatcgagtgacaagatgaaaactgtactgactatcggctggtccagcggcaggatacaatattttccatttgtttaatggctttctttctgaataatttgttctgtctttttgtttaataaatgattcatattccgtat

SEQ ID NO: 475 - DNA, 1322 bp, Aedes aegypti
caattttatatgattttcttctaacgaaaataatcatttatcggttttagcaaaatggcaacgatggaggagctgaaacttcaaattgaaaccctgcagagcgagctatgcaagctaaaagcgacttcagccggtggtgccagagagaagatagaaaaaatgtcctccgaggtggtagattcaaatccctacagtcgactcatggcattgcagcgtatgggcattgtgagcgaatacgaaaggattcgacagaaaagcgttgccgttgtaggagttggtggcgtaggcagtgtgactgccgacatgttaacccgctgcggtatcggaaagctcatcttattcgattacgacaaggtagaattggccaatatgaaccgacttttcttcacacccgaccaagctggactctccaaggtggaggcggcggcaaagaccttaaacttcatcaatcctgacgttaaaattctgaccaacaattacaatattacaacggttgaatccttcgataagtttttgaatgccatcaaaacgggaggcattgaagagggcactccagtagacttagtactgagctgtgtggacaatttcgaagcacgtatggccatcaatacggcatgcaatgagctttcgctcaactggtttgagtcaggagtgtctgaaaatgccgtctccggacacattcagttcattcgtcctggagatactgcatgttttgcttgtgcccctcccctcgtagtagctgaaaatatcgacgaaaaaactctgaaaagagagggcgtctgcgctgccagtttacctactacgatgggcattgtagcgggaatgctggttcaaaatacccttaagtatttattaaacttcggaactgtgtccgattacctgggctacaacgcactgattgatttcttcccgaaaatgagcctgaaaccgaacccaacttgcgacgaccggttttgtattgatcggcagaaggactatgcagcgcgccccaaggaagaacgggtcgaagaagtccctgaggaggaaacaccgcttcacgaggagaacctctacggtatcgagcttgttgcggaagacgatacgcaaggttctcagccaagtactggaacaacccattccatttcaactggtttgaaactggcctacgaaccaccagcatctacgaaacattccgaaactacatctaccactgctgtgagcgacgacgttagcctagacgaacttatggcacaaatgaaatcgatgtaaagcttggttgtagtgttgacgatttgttgtattatttgcattttgttctaataaatttgattctatttacttat

SEQ ID NO: 476 - DNA, 3152 bp, Aedes aegypti
cgtcacatcacagagcaaaaagaaagcgaagcggactcgcggtgaaaaacattttcaagagcattctggttagactccggagttgaaacggtaaaattgcgcgaaaacttacgattgcggtgctttaaagatccggcggccggttatcgatacttacggtggtgataaatagtgcaaaaagtgacggattgtgggtgttttattttggggataagaaaataatgcatcaagtgtataaagtctatcgtcaccagtgttgaaagaagtttcgggtttaaatttaccttttcttacggataccggtttcccgtcggcgactcccatggatgccagaaccaaaacctgcttattttgcctgaaacctcggcaaattctggtggacaatccaaataccgccaaagccatcgaagaaatttacaacattaagcttccccaggatggatgtcgtatttgcatcgagtgtcatttcaacattgcacgggttcaggatttcaaacggaccattgaaaatgccgccgatttcgacgtcgacagctgcttcgtgtgcaaatccgaaaccaccgtcaatgaaccgggtgtggacagagtagtggactatctcataaagcagtgcacgacgatcgactttgggaacaccgatacgatcaaagcgtgtgtcacgtgtatgcatgtgctagaaaccagcatcaagtacgaaaagatggccaggaattatgccaatgcgcaacgcttctgcaaacagtattctacattaaaggaatgtaatattgcactgtggaagatcgatttggataccctgggggaaatttgcgacgacggtggtggcggacgtcgcattggtccgaagggttgcaagaacaaaaagaaacgtgcccgcagttccttaggtggagacgatactccggcgaaaaaatccaagctagaggacgggtctgtgcttccggttatgctgaccaagttgaccccaaccggagcgaagaaaatatcgccacccagttcgaaaggcaaaatttccaagcaaaatgataaaatcttcatcaaactaccgctgttcactaggccgaagaagaaattgaaaagcaaaaaatacggtgcgccacattcgccatctcgatcgattcccgccactccgtccgtggatgacctgaacagaattttcaacgtggaacttcgtccactgacggtccgaatagagcacgtcgatctgtcgtcctttatgaacaaaaccattgctcacgataaggcgaaccgacagatacgaaagcccaaaaaagaggaatttatcgggctggacgaagaggatgtggtagagctacaaaacaccagtatgaacagttccattagtaaacggaaaagtattctgattaccgatcgaaccgaaagtccaaactcgacgaagaagaaggtgcagttttctgattcgcccagtatcaaatacgtggacaagttggacttctcagatgacgacaacagtgcgaaagataagtctgatgaagatgaggattatgaggtgaaaacggccaagaaacgaggtcctaagccacagaacggtacttcgcccagtacgccagaaaatggaaaaccacgtccgaggggaaggccgaaaaagataccgaacgagaatggcgaggatggccagaaggcagaatcggatacggcgaacgaaagcgaagcaaagaaagttaatgaggatgtcacgaaagaaagcgaaccggaagtagcgaaggatgaagcggaacacgaagaggtatcgccgaagcagcagcaagaagaacagcaaccggcagtcgaagaagggaaagcagtcactgagggaaatgctgaaggagaaactaagagtgacaagcatgaagacgacaccggtagtagtgaacctaaaaatgacacctctgtagaacaatcagaaccaccagtcgctgctgaagaagataaaccgttacccgacgcttctacggtagctgagatggaaaccgaggatgctgactcttcagaatctatgaaagttgaccagattgatcagccacctgcagacgcggaaatgaaagctgtggattccccggaagatgtagagatggtcgaatccaaatctcctccaaccgaagacgttgaaatgaaggaagttgccagtacgagtcctgaagcgacagaaaccgagaaggaaactgctctaagcaacgatactgcttctactattccagaaacgacggagaaggtagattccgcaacggaatctaaagaaactgttagcacaaaagaagacgagcccacgccagagtttgaaacatccgataaagaggaagaagaaatggacaaattcaagcaaactctcagcaacattttaggccaggaagtttcggattccgatcaaggattaagtcaagacagccaagataatgcaccttcgaagccagtagccgacgaaaagcatgaggaatcagaagcagcgccatcaagcgagccatctgagaaagacgaacccaaatctgaaacacccaacaatacagatctagaaacaccaccagtaaacgattcggatgaaaacccagctggaaacgaatctcccgagaagaagaatcaatcgttcgcttcactggaagacgtagacgatatttcagacgatgatgacatcctcgatcggctagatgatgccgacgaatcaaccggacggaaacgatcgcccgatttgcctcccctgggtgaggacagtctttaggatcatgcgtaggccataaggataccgagatttatgtttattattccttgagtttaatgttttactgtatgaccgctggcaaacaaaaaaaaaccgacggcgatattatacgcttttggcgacacagaacatttgtacacatttatggaaagtgtttgaattcaggattgaggaaaacggcgactgcgattagtccacagaaattttacattttaaataaattaaacggcagagcatagtgcggacacaaactttagatgtaaaatgtaaatgttctagatacatcagatgatttgtagaggaacaaaaggcattaaaatacaaaaatactgaattaagtttgcacaagcttctgttggttgtatttaatatccgaaaaacaaggtttgcaatcatctattaaacatatccccagtaaacgagctactcaagctgcaat

SEQ ID NO: 477 - DNA, 1894 bp, Aedes aegypti
acacgtaaaagttgagaatgcttttcatcataattgacattgaacggtagggcataagggagcaacaactttagaatttgcattagcctaataggtcactaagtctggtgaagagggtgctatgcctttgtgtccctgaaggtcataatgtcgctcactccagttcaaaaatggtacgctggaaagacaatatttgtcacaggtggatccggattcatgggaaaggtacttctggaaaagctgttgtatgcctgttctgaaatacgcacgatttacgtactgattcgtccgaagcgtggaaaggtccctcaagcacgccttgacgagtggttcaagctgccgttatttcaacgtattaaaaaccaaaaacccgaagtgttcaaaaaactggttcctatacaaggtgatatcacattcgatggattgggcatttcaaaagacgacgttgacaggctcgccaacgaagctgaaatagtttttcattgcgctgcgacgctcaagctggaagcaaacctgaaggatgccatagaaatgaacacagttggcacgaagcgagtactggatttgtgcaaacagatgaagaaactgcaagttttgctacatctgtcaacggccttttgctattgcgataaggaagtattgaatgaacgtgtgtatgacttccaccatagcccgtatgatctaatgcgagcaattgaatggatggatgagaagacactcgatctcataacacctaatttactgaagccgcatcccaacacatatacgtactctaaacgactgactgaatgtcttgtcagggacaactatccgcaactgcccgtttgtatagtgcggccaagtatcgtatgtcctgctgacaaggaacccgtggaaggatgggtggataatttgaatggtcctgttggaatcatggttgccggaggcaagggtgttatgcgatcaatgttgtgcaatggcgaatacaatgcagaggtcatcccagtggacttggccatcaacggtttgataacaatcgcgttcactattggacaaatgaaagaaatgccaccagaaattccggtatacaatgtaacatgccgagaaaccaaacgaacgacttggaaggaagtgttggaaatggggaaagcaaccgcttatgaatatccgtttgaagctggcgtatggtatcctgatggtggaatcactacaaacaaattttaccacacattttgtgtaattttcttccactggctcccagcatatttcatagatttcttaatgctctgcttcgggcaaaaacgattcatgtgccgcttccagactatgatttcacaagggctcgaattgcttcaatttttcacgacgcgccaatgggacttcaaatcgcatcaataccaatccatagctaaaaaccttacgccagaggacttcgcattatttgatatggatatcgacaaaatcgacacgaaggaatatctcaaacgcatcattctcggtggaagacaatattgcttgaaggaacccctatccacactgccgaaagcacgaatgcagctgaaagctttgtgggttttagataaagtagcaaaagctttgatgctttggcttctggtttggggattagtgaaaataacaggatttagtgaaattttcggaacagtggatgccaactgatcgttactgtttaaaagcagatattttagttattttgtgtcctttgatttcaactcagttatgtatgggggtgttgttggtctgaatataaaatataaaattgacatcaatccttgttttgttacctagatttcaattttacaccagtttataatcttcgaaacacctgtatttaatattttaaaaacgaatatagcatgagcatgagcatgagaatagatgaccgtacaattcgtag

SEQ ID NO: 478 - DNA, 264 bp, Aedes aegypti
cccggacaaggggatcgacgcagccctgcgcaagagacgcccctctcgtggtaccagagtgtaggtactcctcatcagcgtccgctcgataccatcctgggccagaaccctaatatcgacaggattgacgtgccagaaattcgctacaaggcaaaaggtcgaaagccgaaaagtcgatacgccattccgactgaatgtcaccctcaggtgaagttaagcttctcataccctttccataatcctttgaattccccatataaatga

SEQ ID NO: 479 - DNA, 264 bp, Aedes aegypti
cccggacaaggggatcgacgcagccctgcgcaagagacgcccctctcgtggtaccagagtgtaggtactcctcatcagcgtccgctcgataccatcctgggccagaaccctaatatcgacaggattgacgtgccagaaattcactacaaggcaaaaggtcgaaagccgaaaagtcgatacgccatcccgactgaatgtcaccttcaggtgaagttaagcttctcataccctttccttaatcctttgaattccccatataaatga

SEQ ID NO: 480 - DNA, 2592 bp, Aedes aegypti
cgactgttcaccagtacggacgtccaatccaaaaccttaggttctccgactaagctgatcatttcaactcccatttttccatttcttttttctggtaaaagttcttgccgaaggtgtttgcttcctgctagcaattggagtgtttgaagaaggtggtgaaggcgtgactttgtgctgacgggaaaggcttccgaagcgatatcctgttttgtcgcggaagtatccggttcaagtgatctcgcgtgcgggctttttgtggtgtgaaccaaaaccggaatcgagtgtaacgtccgctgataggctgatattgtgatccgaaccgaaaaaagcttttctcgcgtgtgcatattgtcgtaacaactcggagttcaacatgttggaaaaggaaccggattcgatggctgtcaccatgaagcaggattatgcagctagcgaagtctacagcactacgagcgaggcgccacctgcatacaaaatccgccaggccaactcggtcaagattgcccggattgtggccgtcacggtaatcctgtcgtcctgcatcctggggtcgttcatgctcgcttcgacgtacctgcaggcgaagcagtcctgcgaccagatgcaaaccttggatgccgtcctcaacaaggaactgatgctggaggcgatgcaacaggaactccccaaagcgcaagccttgatgcaagacaacctatcggtggacgaggccaacctgcagagcatcgaccgggaagagaagcagaagaagcccaccggcaagccagaggagaagaaggaatcgtccgagagcaccgactccgaagacgatgacgaatcggccgccgatggagagagcgacgagagcgccgacatgaactccaacaaccgggttcgggttaagctgccgctggatctggatctgtccgagctggcccacaccatgctgcgcgataaccacaagtccaagatgaactgtgtcgttgagcgacgccgatcggaggaaatggttgactcgccggccaagaccatgcgattgcccttcggaatggagttcaacaccgaacccaagaagcagaaggttaccggagaacgtattgccatcttctgcgaaaccggaaacgaaccaaagaatgaagacgctgaacccgtgcgtcaagtcctgatccccatcccaccgatccgctcgttcggccccatcactcacctgccccaacagatgcccccacaaccgatgatgcgccaaatggcccgaccaatcttccccatcccaatgatgagtcatcaccagcagccccagcagatgcctccagtcccagcccagatgatgcaagctccccatcccgagaaccccatgatccgtccagccttccacgctcaacctcaaccgatgattcatagcccacagcctcagcagccacagtctaccttcccacagcagatgcagccaccacgtgccgaagttcgcatccagttccagcgcatcccgattccggaagccatccgaccattcctgcccccacaggctcttcgcaacggcccagaacaacccgaagttcaaatccgtgaagtgcccctggagatggctctgcagaaggttggactgtcggccgatgagctgaaggacatccacgaaatcgccgcccaaaagttcaccgaacaactgaagcaactgatcggagagatggctgattcggaagaaagtagcgatgaggagaccgattcgtaccgcactacccctgcccaggagcccgcctcgcagcactccgaggaacgggaactccaggaacagcagcctccccgcccacaggaacaagagcctcaggtacacaacgttgaaccacagatccttcccatgggacgtgcccagtatgctcgatctctggtcaaccctatcaaccttcccggaaaggtcgtagagtcgtccctatccgtttcgtctgacgaggatgcggaacgtccacactacgttcaaccacgatcggtctaagcacggatcgtaatcaaacgcgccaatgtttccattcctgaaaacagcgaaacattccagcacgtttgcacatgtgattgtaaaaattaaacagatgttttgaagaaagtttatacaaaagataaacccaatcgataagtattagccagaagcgagggagaagaagagaatgaacaaacatacaaatcaacgagaaaagattgtgaatgtgtaaataattgttagaaactttcaaaaccaaccaaaacaaccaatcgttccagaactaatgagcaatcaacaaacctaaatccacaaatgccacaaaagatgtcagtacatgagtgcagaatcagcaaaacaattgaaacaaaaagaaaactgaaaatctttttttattttgctctaaaacacaacaactgaaaggtttcctaaatatgtattaaaaagctagtagagagtagtgaaaagaaacaaagaaaatcgcaaaatcaagcgcatccacaagcgaacgatattgtttataaaagtttttaaagtaaacttgaatctaacgtacaatcggattggttgtcaatccaccaaaattttattagttttgaaccatttcaaataaagatgtttttactaattataattaaata

SEQ ID NO: 481 - DNA, 1403 bp, Aedes aegypti
gcatctgttgatcgaacgttctgtggagtcgtgtttcgctaaataaataaattttaaaacatttaaaatgccagagaaagatgaaaccagttcaaaagtgattgaaaagttcaatcccgaatcgatgcaggatttgcttcccatctactataaacggctgttcccgcacatgcaattttaccgatggatgtcatatggcctctcggaaccatccgtattcacgaaccgcgagttctcgttcaccctacaagacgacatctacatccggtaccaatcgttcgaaaaccaatccgagctcgagaaggaaatttgctccaagaacccgttcaagatcgacattggcgcagtctacaatgtgcggcccaaagatcaccgggctagcaccgtaatgaaaccggtccagcgtgaactggtattcgatatcgatatgacggattacgacgagattcgaacatgctgcaatgaggcgaatgtttgcaccaaatgttggaagttcatgaccatagcgtgcaaaattatcgacgctgcactgcgggaagattttggcttcgagcatctgctgtgggttttcagtggtcggcgaggtattcattgctgggtttgtgacaaatctgcgcgccacttggacagcaagggccgctcttcggttgcggaatatttgcacattttgatcagcggcggcgaaggatccgtgacacgggtcactttgggcgatcggatgcatcactccatcaagcgagcccacaagataatcgaaccattcttcgaggagatttgtttggtagaacagaacatgttcggcaccccggacgggttgagaaagctcctggccatggtgcaagatgaaggtgtgcgacttgatttggaccggaaactgaaaccccacgttggaaattccaaagccctgtggaaagcttttgaagcctttttcgaaagtttgagggtgtccggtcagaacaagggtcgaaggttcaagcacatcatcgaagaaacgcaactggcattcacctatccccgaatcgatatcaatgtcagtaagggattcaaccatctgctgaaggcgccattctgcgtacacccgaaaactgggaaggtgtgcgttccgttcaacccgaatgtggcggagaagtttgacccgacgcaagttcccaacataacagtgctactaaacgaagtgagtgcattcgatcagaaacagactgccggtggcgaggaggaacggtcccggatcaaggactacaagaagaccagtatgttcaagggaacggtaatctttgaggaattcctgcggaaactggagcaaacgttcaagggcaaagcgatcgtaacgagtgacaagaagatggagttttaggttgtgcaggatacactctttaaggattaaatataagaaatgtaaaagt

SEQ ID NO: 482 - DNA, 483 bp, Aedes aegypti
atgggcatccaccagtttccgaaaatggccaacacctcagcgggtgttattttccaacaccgatcatcgagacggcaacgatattccacatggatttatccacagaatcggactggcggattctctggaccacacattcgcaaaccggctgagcggtatcgtgaacaggaggttttcttctacgtcgggtgcgtcgagataacagtcgggaacagaaagggaattgatttgccgctcggggaaatgtactgtttgcaatgtttgattccggtgctgctgattccgaagccaacgaatccggccctaatgcaaacgcacgtaatgtttatagtgctgtatctgatcggattcttcctggaacgtaaaccgtgcacaatctgcagtctggtctttctggcggctgtgtttctgatctgcaacagcggcgtcgggaattgcctgttctggggcaactgcgagggtcacacttgtgacaacggctag

SEQ ID NO: 483 - DNA, 3883 bp, Aedes aegypti
gcttctctttgcgagaacatcaatccccctttcattccatgctatatccaattcgagaaagggggactcaattgcgacttgcggaagctcccaccgctcagagtgagaatgtcctttgtgcaatgcggttcagtcgccgaggaccatgaccgctgagctcgcaaaaggacggtcggtggaaaatccattttattcggaccaatccgtgcagttaattgccgtgtggaaaacctagcagctgctgttatatagtgagtggattttaaacatgcccaagtgatacatcgataatgaataatctagtgaagaggtgtggattttcctttcgtcgaagcgctgtgaagcaaaagggaaaatcaatcgcgaaaaggtgaatcacaagcggatgtgaagtttttccgtgactcgattcaagttcgagacggaaaatgagataaaatctgaaggataattgatggtgccgaaggtcacattcacggttcacagtgctttcagtgaagtgtttgacgctttttttggatacgacgcataatgtgaaacagatgaaaatgaatgataaatgtgtaaatctgctgagctaaaagtgaaaattgtgtttcttcaagaagattaaaaaaattgaagataaaaaagcgtacgccagcaagtatcagtggtggtggtgagagtcattgttatagtctgagttgtgaatcggatgctgggtatccggacgcacggcacatagcagatcctgtagcgaagcgtgtcctgccgagtcggagcgaaggaaaccaaatttgagcaaaagcaatgttccaccagcatgagatccggcaacgaatccgactgggagcccctgctcgaaacggatgcgaaaagctcttcatcatcgaggcgacctcccgctggttcctccggtccaggagcaggcacatgcaccactaataggcgcgacaacaaaagccacaaccagcaccaccaggagaaatgtggccgtatcaagcttggggtgttggtggcgctagtgttcatcaccttctacctgtcgctgtcgacgatcagcatacggccggtggtgcacctgatggtggtcaccataccggacgatgacgaagaccttccaggaccaagaggcctagcctcgcccaaagtagtatttgaatcctcaaccaaccaaatcattcccgttattccaaactcgatgatgaccaacaacccccgcgtggtgctcaaactacaacaaccgaaacatttctccaatgatgctgatgataaaactccgtctacgttcccatctacgacgacttccaacgccacgaccaacgcagtgccaaagggatttctagtctggggcccaggatgcaagatcctggatttggatccgctggcggatgacgtaatgcggctgttccacaaggagcacttcgtgccctgttcggcgaagaaaccactcaccactatcgagcaagctatgcagacgacgacgacaacgacgacatcatctacgaagtctacgctcgagaacgatacggttgtgttgcggttccacagggatcgcattgcgtcgcatctgccgcactacatgaagtacatcgaatgctgctaccagagcatcgaacgatccgggatcaacgaaaaggctgataacaaatttaatttaggtgagtgtaaatatttctcccacgatgtcctactgcccccgaacgtcactaatggggtgatggttcgctgcaaaggtagcgtatcgcccaccagcaagactcgcaaatcggtctacaccaatgtgcatgcctttattcgagccaagccggcagtacaggaacggctagaacgattccgtgacagctacaaacaacgaccgctcagtgtgctgatggttggaatcgatagcatctcgcggctgaatctcatccgagcaatgccccacaccgcacaacacctgtacgatacggggtggttcgagctgaagggctacaacaagatcgatgacaatacgttcccgaacctgatggcgatcttgactgggtacaacagcactttggcttacgataagtgtaatccgcgtaaagtaggtcaattggagacatgcccgttcgtgtggaacatgttcaccaacagcggatacgtaacggcctacgcggaagatgaggccagtatcaacacgttcaactaccacaagtacgggttcgtcaaacctcccacggattactatctaagaccgatggcactggcagcggagaaaaatctagtgaagaagaccaagaactctctaaccatgtgtctgggctatgaaacctacgcagacttcatctacaaatatgcgttggactttgctacgttctacaaggatgagcccagcttcggactcttttggaccaacacgttcagtcacaacgacatcagtgatccatcgtccatggatctacgaattagatactacctagaacagttagatgagcgaggtattctgaacaacagtatggtaatattctttagtgatcatgggctgcgtttcggggcggttcgatctctgctgaccggatggctcgaagagcgacttcctttcatgttcatgtggttgccggaatggttcaaagaacagcacccggaagcggtccaagcactgaaaatcaaccgaaatcgactgacaaatccctatgatctccacgcaacgcttaagcatatcctggagctttcggaacgtgtcgacaaccttccggctcctttcagttgtccaaactgccagagcatattccaggaaatgccctggaaccgttcctgcgaggaaacgtccatcgcaccgcactggtgcacctgttcaaacttcgaaaagatcgacaaaagctccaaaatcgttcacgaggtgctgagctatgtgatcgactcgatcaacaaggatctggaggatcatcagaaaaatttaaccaagaaactttgtgccaagattcagctgaaatcgatctcgctggccaaggtggccagatatccggacgctgccgaaccgcacacggactatctgttgatattcgatgccaagcccggttcgggcaagttcgaaacgacggtccgccattacacgaaccgggaccagctcaaaaacccgttcgaggttaccggatcgatcagccggctgaatgagtacgctagtcagagcgaatgtatgcacgtggattacctgagaaagtattgctattgtttgcgaaggaagggtgggtagattgggtggtgtgggaggggcggtggattaatatgtaaagttattgtgacaataagtgtgtaaagttgtttaaggcaatcaaaagtaatgcctagcgcacagatcttaagtttagcaaaactctcttgaatcttattaaattgtttttttttttttttttcacaaataaaattcacttttcttttatcaattttgtgtaatttttaaattcgttttaaaattttgatcgccagtagaacattatgaaataagtaatatgtagcttttatatcctaatgcccattcatgtgattaatataaaactgggtttgaaaaaatacctaaccgttgaaaattcctgccattcaattcataaatcaagttttttttgtaatcttaaactgttgtgttacaattatataattcttttcgcttttggaacattattgggctaacgttgcaatacttgaggatcattctcattattgaggccaagaaagggtcaaatataatgttcaactaaaattcaggtttatcctttgacgacaaattttcaagtatttttatgccgaaactgaaacttttacaaattaaggtttggaatttgtatactcttttattcattttccatttctttcgaattgacaaattcgaaactcaattctcgtactcatttcaagataatattattattattattgtctt

SEQ ID NO: 484 - DNA, 1356 bp, Aedes aegypti
aacatggagggtcgggtggcaagcgaccaggacctgaagctgggcgacaccctgcggtactaccagcgcgacagcaatgccgccaaagccctgctgattcgtcgccttcgttgcctgacggcgtacgaaaccgccaaccggaatctcgaaaaggcccgcgccaaaaacaaggacgtccatgcggcggaaacggcgcagacccaagcttgcgaaaagttcgaatcgatgtccgctcgtggaaaggaggagttggtcagtttccgactgcgtcgggtcgctgcattcaagaagagccttatcgaactggccgagctggagatgaagcacgccaaaacgcagtacgaattcctacgccagtcgttacttgccctgcaggagattgcctagatctgcacctggacgactcgacactatcatgttgggatagactgaacgacgattctgcggcgcgtgagtaggaatgaacatcacttttactcgattcgattcgaatttcaatacgtatgcgttcgtgtatgtgtgtgcgcactcttagggcagaataaggaccaccattgtccattttgatgaatatacaaaaaggcacacattcagagagactatttgtgcccagatccagcgtaatatccttatcgaaagagaaaagtgaaaccatcttcgtccggtgataacaataactgaaacggtaacagaaggacgactagacttaggaatggacaacaatcagtggcttttccttgttgtaacagtaagttaagaacgaacaaccaattgtgagacaaacgaattccatttttagttttgctattacgatttttttttctgatgaaacaaggtttgaagttctacttctcttatatatttgtatttaatcaagcatttttagttgcaatcactcgttaactattgggctagaagttgattaagatcatagggaggaacgtgacgattccgttcgatatctgttccttgcgtacgcctaatataatttttggacgactttaaactgattttgtagttgaatctattgtggagaacacatctaacgaacaagactattatgaaacaaataatcaaataattcaaactattcgtttcctcgtgaaaactcggggaagaatagggtcatttgcatctgcgcgtcacacgaatacatacacaaaaataaaccacttaggaaaactgagaagaatacaaacatccattaatttttataattgctattattattaactataattctattattattgaacagtataagaaactattactattattatatttcgattcgatgggaaataataatatattctgtatatgatcgtaacataagtcaagaatgagaagattacg

SEQ ID NO: 485 - DNA, 1342 bp, Aedes aegypti
tattttagaaaccaaaaacaccagaaaacagaagttgtacatattgtaatatcgagttcaacactatagctaaatggaagtatcacatgttaaagttccatcgagaacctcgtttcaaatgtcctatatgtgcgaaaacgttccactacaaacattcagggaaggcacatttgaacaaacatggaacaacagaactggagaagatacagcttgaggaaattattccaaagccacgaaggctacccaaagcaaaaattgaacctcgttttaaatgcccaaagtgtgaaaaacctttctatttccaatcaaaactggatcggcatttacgcaatcacgttaaattcgataggaagcaaaatggtttgacgactacgattcctacagagccgcgttttaagtgtcccaaatgcgagaaaccctgcaaattcaaaagtgaattgaagagacatctagagtcccatgctaaacaagaattgaagccaaaaattcaaaagagaccactacccgcagaaaaacaaagttgtacaaagtgtaatgtcgagttcaactcttatggtgcatggtattatcacttgacacatttccatcgagaatttcgttttaaatgtcctttgtgtatgaaagggttccagtacgaatcttacctgaaaactcatttgagaaaccatgagaaaaacaaacagaagaaagagcctgaggaaattatacccgcggatgtgccttctccgatttctgataatgagattgaacctacggaggcagaaagtctttatgcatcagcttaaaaaccgataattatatttttctatgcgattacgagtactgagcctcgtttgaaaagtccaatgtgtgaaaaaccgttaaatttccgatcaaaactgttgaagcatttaagctctcacactgaactcgattggaagaaaaatactttgaagaaaaccgaggatcccgactcaccgattattcatttaagtgttatctgcaaggctgaactccgtactgctgattccatgactacggttcacatagagccgcatttacagtgtcccaaatgcgagaaagccttccacttccgaggtcgattgcaaaaacatatagaacaacaattgaagcaggcaattgaaaaagagcaaatataaaaaaggcaacggttcatgtgggaacaaatattgagtgtgataaatgtgacaaaacattccatttcgcatcctggctcctgcagcattttcgtactcatgaaggtgaaaaataaagtaagattaaaaaaaaataatcgaataccaatgtgattttcaaattcatacttgtacaaaacctagaagtaataaaactgaatcgatag

SEQ ID NO: 486 - DNA, 1343 bp, Aedes aegypti
atgtttattttgtattcagtagtgattacaacgtcaaacggtgaaatcacggttaccaagtcgcaagcacctcccactccgcccctatcagtacaaaaaaatcatcccgcatcgctgcacttcaatccatccatttcgccccaaccgttgctccatcatgcgagagatctgctccagcagcagcaacatccagtgccgcatcccgtgccatccagcagtcacaactcgacgcattcgtctctggcaggcgcttcatctttatcgtcgccctcgacccatctcggagtggaccatcatcatcacctagcgaaagagcaacagggtctacagcacaaaccgtccgctacgtccaccagcagcaccaacagtagcgtcccgacgccgggagtaatctccctcaccctggacgacgtggagcagaagatttccccccactcgtcgggctcatcgatgtcgtctaaacgtcatcgaagtctgacgcccccaccgcgaaagatgagtcctgcgggatcgattcaacattcgcaaagggatgaggacgatgatgacgaggaggacgacgataaccattccgccaacaacgagttggaagactctccaaatgaactcacaatcaaccaaaccaactgcaacgtggtcgacggaatcgacctggacgacatcaaggagtttgcgaaagcgttcaaattgcgccggctctcgctgggcctcacgcaaacccaagtaggccaagcgctgtccgttacggaggggccggcctacagccaaagtgccatctgcagcgccctcgccgctcagatgtactgtgcagctcaactctcgtcgcagcagcagcaaatccattcgtccagattcaagtcagggcagaaccatttgaccgactttattggggtggagccatcgaagaagcggaaacgaagaacgtcttttacgccgcaggcactggaattgctaaatggtcactttgagcgaaatacgcatccgtctggaacggaaatcaccggtctggcgcaccaactcggctacgagcgtgaagtgatccgaatctggttctgcaacaagcggcaagccctcaaaaacacggtacgaatgatgtcgaaaaatttcaaaatggaaagctcataagcagggtctttgtttcggttcgaaaacggttcacccttgtttcgttacaatcacgtgccatttgtttgaatatattttttttcttgcttgaaatttttaataaactatttggaagttcttagtggaattgattgattgagagataaaagttgctatttattttaagaaaacgaaatattcatcaccttattagttcaattaaacagctgcaaaatcgt

SEQ ID NO: 487 - DNA, 1260 bp, Aedes aegypti
ttatgtgagcgatttgatctatccctggaaaaattgcaaaaacttgattttgatcacacgcaattctatgaccattcgcctccatatgatatagttctcaagacaccaaacttggaaacaataaacatacgcagatgtgtattaaaaaacaatgttcggcttgagctccacagttgtcctaaactgcgatcgttgagtatatttagtcaaaagccattatgcttagcagatattaccgatccctgggagttggacgatatagtatcacaaaaagtacctcatttcactcacctcaagctaacaaatgtgcccataagaaggacaatgaagaccatgttcagaagtctacgatatatctacttggcatacgtcagaatagttcctaccgatgatgtgttggattgtgagaatctaactgagctggtcgttcattcattacttctaaagaaatccctcaagcttaaggtaccaaggctgcagatattaaactgcgatatggacgtgctcaaattattggacctgcaagacgcattccaagctgatcagttgatcatcgacatgttttatgagtctgctggtcgtaacacagaaatggtgaatctttcaggattttcccattttcgtcggcttcttctgaagcctaacaaatgctactgctacgacgtttcatggttcacttacttgtggtcacatctattaggtgtagtggaactagaagtgcgtggcgaatttccacgtgatcctcaagagcggctgcaggacttactgaaatgcttcacgcagatttcatcgctgcgtctgcagagaataaacattccaaacgatttgcgttttttaccatcgaatgtaaagacgatctacattgaggattgttcggttgttggcagtagggttcagttctccccaagtgtggagagcgtccgagtgcataggctatggaacaagaacgaagatatgcgtaggactttttatcacatgcagttgcaaccggcgaacaaatttcaaccgttactgtccatgaagtttattggtacacctatgggacgtagaatggcctattcatcatcggaggaacgccagagcggctcaaatcgatgagagctacagtgtatttgatagttaggcgtagtgtgttagtccagaagagctcgattttgtgcaaatcgtactcaaattttgtaagatataaatttcataatttgtataaaaaagtttcgtcgttgataaattatctaaaataaaattttcaaataatgctgt

SEQ ID NO: 488 - DNA, 621 bp, Aedes aegypti
atgccttcccaatcgagaccacgaggaatgtctggcactggatcgggtggatctggacgaccagcagtgacggcaccgatgtccgaacggcagcaaatggccctactgatgcagatgacgtccacgtcctccggcaacgaaggagaaatgagtcccggatcgagtggaacctctggaacgaataccggtgggggaactggtggccactcgcgccgtgatcgcattaatgaacgcggtgaaacggcattgcatttgtcgtcgaaaaaaggcgaccaggaaacggtcaagaagctgctggaacagggttcgaatcctaatgttacggatttcgcgggttggacacccctgcacgaagcgtgcaaccacggccactacaatgtggccctggcattgatcaaggcaggggccaacatcaatgccaccggactggaaaacgatactcccctgcacgatgccgctatcgtggggcagcttaagctgtgcaggatgctcgtcgaacgcggtgccgatccgaccttcaagaaccagaagggcaagatgccgtgcgacgttgcggcaccggccgtctacaactacctgctgcaggcacgaggtaggtggcatatttatttgtttgcttaa

SEQ ID NO: 489 - DNA, 1218 bp, Aedes aegypti
acacaagaaaatccggaggggatgaattttcgctataaaatcgatcccttccctcatccttgaaacagttcacgttttgctcttcgccaagaagcataccttacttcgtgccttacttttgctaatcgatcaagtatacaaaatgtcgcgatcgtttttagtggattcgctgatcagcgataaatcaactccagtgaaaagtaatccgttcgactacagtcagtttactcagctaccagtgactccgccggcgactttaccttactccgcgtgctacgtaggaagttatctgttctcacttggattacaacagcagcagcagcaacaacaacagatgcatttgcctcatcctcattatctgccgccagcacacaacctttcgctggatttgtcgcctaagctgtatcagccaaccgacgttcaaccgccaaggctttcacccaaagaggaatactaccgcaagttgtaccgatgcgagaagactcccgaacgtttctcgccttatccttcatctccactgaataccgccaaacaccccaccgtgaaaacgtcaactccatcgccaactcccgtggatactctggccttcgcaatcgacgatgagctctccagcaaacggatccgtacggccttcacaagcacccaacttttggagcttgaacgtgagttctccagcaacatgtacctcacaagactgcgccggatcgagatcgccactcgccttcgtttgtccgagaagcaggtcaaaatctggttccagaaccgacgggtgaagcgcaagaagggcgatgctcccatctgtccgagtatggctcctgccgacgggtcttcgcctagccgatcgcagcagcagaacgcccaaaagtgctgctgccatggatcttcttgtggaggtggatcggacagtgaagacgtgaacgttgaaagcgactgccagccggaggttgatcggaagccatcaattgaacaagtgcagttacttcagcagcatgcgtgggattttagtaaaggtttccattagaggacgaaaaagggaagggttttgggtttcccagtgatttgtagatatgttgtacaatcaaaatgtgaatgtaaatagatcattatcgtgctaaaactttgaagactttgctagaaaacatatattgaaggttatccataaaatattgttcatatattgaatgcgaaaagaggctcaaataaaaattgtatgattat

SEQ ID NO: 490 - DNA, 6126 bp, Aedes aegypti
cggtaaacgcgtagctattcagtgagatcatgttgagagtcatgggttcgaatctcgaaccgtcgaggatctttttcgctaacttttttctgacttctcagggcatagctttcagtcattaactctggaaacgctcataacaactcagttggtaagcagctgggacagagccagaaataagaaaagctgcaatagataaccttgtattaacggggactgactccaccacatcgcgtcaaatccatttcgatggccacattcacacaggaggaaatcgactttgtgcggcagaatggcaacgacacatgcagcaggacgtggctgggcctgtgggatccaaagcgagccatcaaacaggaacatcgagattttatgatcgacaaatacgaaaggaagaggtattacttggaacctgctagtcctctaaaatccctgccatcgaacaccaccagctcgacgacatcgctgtctgcaaacaacggtatcagcaccagtagtagtaatattagcagtaggaacggtgccgaaaatctagtgccactcaagactatcactctaactccgcccacgtctctacgacttagccgaacaaattcaaactctagcagtggcctcaacggaaacagcagtcaggcgtcatcagccgccagttccagtacaaatctcaagtttcagcaacagttcaccccagacgatagtaattttttcagcgaccctccaaaaatcttgccacctacgccgcagaagcactcgagccatcatcatcagcgattgaatggaaccgtgaacggaagcgcattcgagcgtagtcagaaaaatggtttactcaccagtgccaccaatggccacactaatagcagtagcaacatcaacagcaacgccaacaagttcacgcccgactcggactttgtggcagatttcagcaatgcaaacattgtcagtgtcaacggtgtgactaccgccagcaatggattgaaaaatagcggcaatcacaagttaagcaatggtttcaatgaaaatggaaatcttcccaatgggtatcacacgaatcagaacggagtagtcggcactgggcaaaccaacggtgaaatggaaaactttgcagattttgagcacaatacgatttacaatgcggccggtaacgtgagtagtggatcattcttcagcaatagtaatagcattgatagcagcactacaaacagcagcagcagtacaaccagcgtcaacagtataaataacgatatattcatcaataactacagtttgttgaacagtaacaatagtgccaacaataacaccaacgtcataggcaacagtgggggtggatctgatctctcgaatctaaacggcaatcagtttatggcatttggtgatttccatccgaccgcaggaggaggtggctcgttttgtagtgggccgactgcccaacgaacgaacggttacagctactttcaaaactaccaacctggaacaggtggtactggcagtagtagtctgaacttcacctcctctgctaacaacgccaccaacaactgcactggtaacgtccaatggaatctgtggcaacagttcaatcagtggccaccccacgagccacagcccatatttggtagtatgggcagcttgagcggcaatagccaaagtaaaccatcatcaactagtttaataaggtctcatcagcaccaaccacaacatcaacagaaccatcagcagcagcagcatcacagctcgaatcagaatcgatggagtcttccgatatccggtaatgcgaaatcctccacagcacaaagctcagcaacgccgtccgtagatagatacgcagccctcaaggatttggatgaccagtttcgggaaattaagttcgagaatgaaacaaacaataacaacaccaacggcacatccagcagtacgagtagtgggctaattaatggcaaccatgttaacgatgttcatcagacatccacagcaaatcccttcaagacagcaaatccgttccaacaacaagcacagcagacgcaaacgctgagctggaccataccgggaacgacgccaccaacgacagggacatcaagcaatggtttctacgcaacgtcaccgtaccagaacggattcgtgcatccgcatctgctgcagaatggaaatgtgacgaacggggtcgggttcaccaatgccttccatcatccgtccgccgctgtcccgacggttgtgccacaattcaacggcactgcgacgaatcatttcgggcactttggtaatccgttcatgactggtgccacaaccgtaacgtccaaatccaacaaccctttcttatgagtgcactcgtaggacatgcgatgcaatgccagcggcggccaaaatcccccacatatagcctatccctgtaccgtaagtggtagacggatgtgcattcaagattttacaatgggatcttagacagagatgatgtacagaatagccagccgaagctgtcgcaaactacatttatacactggcaagccgacaggcatgatttcattagagcaacaaataacacaggagtgatacattgttttttttactgagagggaggagcgtgattttggagaaagagagaagagcgtgaggttttagaaagtgatatcgacatgaatgagactgcgtgatgattgccagttgagggacgaagaaagaacagtgtgcgtatttgccaatgtgccgaataatgcagtgataaattccattacacaaattgactgtatgggggtgaatatgaacattttttatctgtgtttcattgtttctacttatttttttttttataataagcaaatgtagaggtttcgttttaaagaaaacaggttgactgctggatcggaaggaaagtgctgacttattaacttttttatacgttttttgtgcagtgatagaagacatatattacttttttatttgtatcccgatcagctgcgagagtgaaagagtgaaaaaaaaataagtcgttagtaatcctaacacgaaatatctgtatcgcagactctttaagttaaattttctgtagcgcaggctttttacaacatttataatccgactgcatattattacttattaataaaatatcaatgcccatgttgatttctaattctaataaagcgataatctagaattttttcattatatgtatttgaaattgtgattccaatcctgtagtttactctttttaaaagtagtttgattctgtttgatctatttactatggatcaaacttactatggatcagtttgagatattgacgatacctaaaacaatatttaagatagtcagtagccttcaaaacacgtcaatcaagatttttttcccaatttaagtagtgtgatacatcatagatgaatcttttattatcaaaaaactcccggacttcgataaaattttcagggatttcacaaagaatccataagatccgctaaaaagttttcagatttccctaggactttagagattccgctcagattcctgaagatttctgtggaaatctatgtgctcttcatccgacatacaaattatattaacccaaattaaaaactatcaaactggtataaaaccacgaacgacgtgtacgtgattaactcaaaaatttacttagttaaaggctaatgaaagtgttcaaacttggtgataatgattcataatgcgatcgaatcatcattcggaaaaaaaaggaaaggagctctctttcgaggtatttcataaggacggtcgcttgaaaatcttaagtgacgcatccttagtatcaaattctaaatttttacttttgacgctacacacaaaattgatcaaaaatactattaaaccaaatctgtaagcacttagatagtagcttcgatttccgaatagatcgagctattgactgacttgaaatgacaatgacacattgtttcgaaattatatcatgtgaccagttttcttctgaatgggaaactttgcaatcactaggattatcatacgccagagaatatgttgttttcggttgtgaaacttttcctccttttcccagaatcaatttcttcaaaatgtaaatgactttgatgtaaagggtaaagtatcacaatcacttatttcattctggttctattctgcaaatcggatgagacggaacaagtttatctaatcgcaacggaatcgaaatgatcatgatgagaaacgtcgtttcagcagaatcatcattactccgattcgcagaatagacccaagcgtgttgatggcaccttttcttttccatcgtagctcaatcgtcgtttgctggaacaaatagaatttagtttgagctaaatcacacgaatcataggggtcaagctacttagttctttgagggtcgttctggtgaaataccaagggtgagtaaaaggtgttggaaaatagataacatggaggtgggtaaataggagaaccgcgataaattagcaagacagaaaaaatctgaaattagccaaaatataggcccatgcggtcatgtaaaaccctgtcatgtctaaactatcttgaatttttgatcccttgtcagcttcattcagtatcaagcagtcagcctggccagttgtaaatagatctacaactaattatttacccttaattttctcctaatcaatcaaaaaagatttttaaaccaaatatagagaaatgaaaaaagtattgaggaaacgtcgccataatcaacaacacttaatcaactcgaacatttacaataaatcaaggggttgtgtagatgaagcacttactcaacatacaaacacataaaatcatacataactagcagtctatacacccaattcgttgttcagtgataaaatcgtgaccgtatgatataagtcgttcaaacaattagtcatacacacaacgtttcgaaaataaaactcgaattctgcacgccgttttactaatacctacattttaacaagattagaaagattctgtccattacgaacaaaacttagaaaagcccgaaaagttatcgttcaatcacgtgatatgtcaactgaaataaaaactatgctcaaatacaagaaaatttacacaaacatgaaagataacggtaaagttccgactcacgtcggattctcaaactgaaaaaactctacaaagcttaaaagttgtaaaaacgtatttaaatttcaaagataaaaaatgcttgtgtggccttacataaccgaagagttttaacacaaatgtttcgcagtggtagtcaagagtgcaaatctaactttaacaaaggtataataaagtaatatttcagttcagtttcctctgacatgctagcaacttattttctcagataaacattatcaaaacgttgatagacattcgagagtttaaacccgatcctttcctattgttaaaacgtccccacaataatgtttcacgactggcatagccatatctatcgggcacatacagtgagctttcaaggatgcgcctttgattgatgcttttgctgattgttttagtgcgataaatttttgaagcatttttgacctactcggaaataaagcttaaagcgaacaactattgatcaaatttgtcgtagatttcttatctacgcgtaggacgtagtttaccattctgtagcttaaacaaattccttagctagcgtagtctagctcttattaacaaaaaaacgacgaaacatagaatgaattttaagtatattttaattcgtatgttaactcggaatcaatcaaatgacacagaagatgttttcttaacgttgctctcgcttttcctcgtttttttttttctaatgaaatgctaagagtcatttacaaagtagaaaataggtcatgatgggagaacacaaacgttaagtaacaatattagagttaatctgttccacacaaacatgaaatcctatacctaaataacacgactaactcagaaattccggttattcgcgagattagagcatggtttgaacagttttaaatgttattactccgcaaaaaaaaaatgttagtagtattcatagtgaaggggaagaacaaattactatctacagttaaacacatatgtaaaaatgtttaaataacaaagataatgaacaatgtttcaaatgccgtaaatgaataaaaagttaatatttaatatttataacgacaa

SEQ ID NO: 491 - DNA, 1866 bp, Aedes aegypti
atggacatgcacagtaaacaaccggtcccgaaagtgccaaagatcgttgaagagacaactgaaaccgtggtgagcacacccagcgaaagtgaagataatttattggaacagattttgaagcactccaacgcaaatgagagattcacgagccatcagatacgagcactgtttccgcatattttgaggagtttggaacactcagatgatatgcaatggctgatattcgagaacgatgaactgaacaagcgtttcaatctgggggattatgcgccaatcgtcccgcaagaagctgaagaggttgttaacgttcctgaggtggaatctcaggcggaaagtgttgcgtccaatagtcggtccagcagtgtggcatctccagattcggaaatcgctcaaatgcgctccgaaatggccatgacgcagccacgggagctgatacagttggaaagctcccgttttgtagatacacaggctctggtgaatgtcttggagcagtctgagaacgtagctgttggtgagagtcagcaacaggttgaagagttggtcgagccgatagttgctgaagaagtacagcacgagctctctccaatgataactccggctcaggtcgaagtgattgagatatccgattctccaatgcatgaagatgatgaaatccaaatcaaagaagaatttctctacactctggactacttcagaaaattcaccaacattgaacagtatattatgcatgaaatcaagcagaaacatcccaaaacatatgagaaaaagttgtcaaagttagatcaatacgtagagcgatactacaagagtgcgatgcctttattgctgaaaaaccagttgcctccaaatttgcgacttttgtcgcgaaaggaacgcaaacaacgacaagcctcaatggttgaaactggacagcggttgaacacctcaggagcttcttcggttatctcagaacttcctccaccaacaactcaaagcgaggaggtaagccctataacagagactcctttcgttccgagagttccacggaaagcaagactaattgtctacgaagaagatgaagatgacataccaactcaaccgaatttgccggctgacactctaccgatgcctaatacggaagatttcctacctccagtatgctccacccagttaccttgtgaatctctagcttcaccgccccgtagaagggatacacccttcaattctccgtctgtctcaatagttcctaatcaatcaccttcacgattagctcccgccatcaacgacagccctatagatctaccgccaatcgttgtgcctacagagacccttccagtaccaacattacataacattcaccctccaagatactccacacatcatccgaacgaatcggaagcaataccgctcaaccgacaggacacaccgttaaactcagctctgcgactttcgacttcgtcctcccacgttccgacgccagccttcgactcgagctcaagcatggatggaactgttatcgttaacacaaaatctcctcggaaggacacctcgatcaaacgtgagctcaacaccacttcctacgaggacgaggtggaatttgtagaagtccccaatagatacatcctgattgaggattccatcgagctcttacccggggcactactcgaaagacaacccagcaatagctgcttggcagctttccccgacaatttacggggcatggtgagcacactgttccgggagactcgggacaccactctgtcgcagggaagcggcgctagcagttcgggaagtggagaggccccagctgagacgcagccgatggggtttcaccagtcgtcagctaatgctgatgaaaaaaataatacaaaaatcatcgcaatttga

SEQ ID NO: 492 - DNA, 684 bp, Aedes aegypti
atgaaactcccattaagcttcaaatccaccaaagtagagtctcatctcactgaactctgccatcgactatcgacgttgcagccattccgattgatgtccaattcattccaactgccgtcacttccatcctctgcgaccaccatccgcttcctcacccgatcggagatagcttctgtgaagttctgccgcaatccctccgttcaccgacaacgccaccatctagcagttacactgaaccaccgagaggatggcatcttccggttgaccgtggccgatcacgaagtgcgcaagcttctgaacctaaccggaggggaccgaggatggcaggctctagtttcgacgctcaatcgcatgaatcgattcgagtacgaccgcttccggcctgcaagcgcattccagtttcaccagatgagtattagcgagaaaattttgtaccagttttttgccacatctccggaatgtggccaaggaccgggatgggtgttgcgttttgacgatgtgaggaactattgcgagggggatggtgttcgattggaagagtttaactgttttaggcatacgtatggtggtggttttagtaaagctaatgccagcgatattgatttgagcgaaggactggatcccgcaattgtacaaagaatgaaagagattaagcggaatgcgagccatatgcaccaaatttaa

SEQ ID NO: 493 - DNA, 772 bp, Aedes aegypti
gtttaacgcgtgcaaaagttcatgtgaaaatctaagtgaatttgtcttttgtcatcttcctgtggagtttaatcaccgtttaatttcaatctactcgcagcagcatttggccattgcaaactgcaacgacaattcctttcggtgggggaaaacaataagacgacgtttgctgagtttatttgtggtcatttgaccaatgccatagcgtgtgtggtggcacaagatgtcctgacagtgaacgaataatctacgtttcgatgagtttcaacggcatgatgttacgaccatggaggagtgttgatcatattgctgaagttattacgacctacgatagaaatggatatggcgtatacggcgatggccaaggactggaatgttattgtgattgcgatgatgtcggtacggaatacgaagtgtattcgaataagccaaatggcgaacaaaggtggaaatccataatgagactgtgctatttaaatccacgttctgaattgagacgaattcatattatcgatagactactagctagatgggtattcattgtgaatattccttgcatgaaagaagttcgagttaatgataaaaaccaatttgttgtaacaaaccatgtaattacgtataactataattcaaaaaccgttcctaagggggaagaactgtgatatatgtcacaatctgaatatattatatacatgtagtagtgataagcagagaataaaataaacacagcgagctgggctcgccctcttttatcgtcgactttcgaccaaac

SEQ ID NO: 494 - DNA, 2094 bp, Aedes aegypti
gagtgattccttattgctattgcttcttttcatgggttcattttgggaccaatggggttgttttcgtcgttcctctattatatgaccaagcagtgttattgattaaacaagctgtgcacgagcttttcaataatggggaaagatcgataagactgtggcagtgtatggaagatttttcaggaattcaactatcatgagtggcatcggagaaaagtagaggtcggctattggctaaaatggcagaaatggctttaaaaataaaattcacacttaaccttgaagtgtgacagcagctccttgtctatctctatatagtgattgtacatcattcacaggaagaaccagaaattggggctttcggcggaacaagtattgagtgttttgcaaaattcccaaaacataattctgtgtgctaaatctatgagtttcacgtttttactgccctttcggtagaatgcagttcttgaaaagggacatttttagtgctataaaaaaataccagtgtcgaaatcggcgaatccgtccgcggcgaagatgtctacatcgtacagtccggatccggcgagatcaacgacaacctgatggaactgctgatcatgatcaacgcgtgcaagattgcgtccgcttcccgagtgaccgctgtgataccctgcttcccgtacgctcgccaggacaagaaggacaagagccgtgccccgatatcggcgaagctggtggcgaacatgttgtccgttgctggcgctgatcacatcattacgatggatctccatgcttcacaaattcagggtttcttcgacatcccggtggataacctgtacgctgaaccggccgtgctcaagtggattcgggagaacattgccgagtggcgaaactcgatcattgtgtccccagatgccggcggtgccaagcgtgtgacgtcaattgctgaccggctcaatgtggagtttgctctgatccacaaggagcgaaagaaggccaacgaagtggcctcaatggtgctagtcggtgacgtgaaagatcgggtggccattttggtggacgacatggccgatacgtgcggcaccatttgccacgccgcggagaagctaagggaagcgggcgccaccaaagtgtacgccattctcacgcatggaatattcagtggaccggccgtttcgcggataaacaacgcatgcttcgaagccgtagtcgtcacgaataccatacctcaggatgggcacatgaaagattgtcccaagattcagtgcattgatgtttccatgatgttcgctgaggcggttcgccgaacacacaacggtgaaagtgtttcctatctgttttcgaacgttccctactaaatatgacgcgtttgtacctggacaatgctggggagggcaaggaaaattatttgagtcgcgaaactcgtgatcgccattttttttctaacatttattttatcatcgtatatttttttctttcgaaaagtgtacacatttatataacacgaccatatatactttttggctattaaaagactcgcaactgtcttaaactattcttgagaaaaaaaatctgaaacaattggattaagctaaaagaaacgattccgcaatttttgcattaaatatctcaaatatcgcgaaagtgaagcctagacaaacgaaggcaccgctcaacgccgcaacgacggcccactactataatggcctccttccttaaaggcaggaagtccacaggagccatttccccatttcatgcatagcatggaatctgtttatcttcttccgttaattatttagaaccccattgaagtaatatcaattcggtgaattccccatcctagcaacgtaaagggaatattctatccccttgcacacatcctaaacatagttttgctatagtgagccaaacctgcgaatgccagaacgagactcttattaatttcagttgtggaattggttttattggaacaactacatcaactaggcgatagaaagtgaaatataaatttaaatcaaactattatgtaagacaacaacaaacagttcttatttttatgctatttgctataaaacaggagagaaataaaaaagatagtattacactagtaaaaaa

SEQ ID NO: 495 - DNA, 2339 bp, Aedes aegypti
atgcacgataagaacaaagaaagtacacgcgaggtactctcgatcaacattggacaggcgggatgccagattggcaatgcgtgttggcagctttttaccctggagcatggcatccaggcggatggaaccgtcagcgaaaaggtgccaatcgatgagaacatggcagcattcttccacaatacggattccggccgggtggtcccgcgaaacatcttcatcgacttggaggagtcggtcatatccgagttaaagagtggcccgtataaatatctgtaccatcctctgcacatgatcgccggcaaggaggacgcagccaataactatgccaggggtcactacacggttgggaagcaaatcatcgaacaagtttgtacgtcgatccaaaaacaagcagaacaatgcgacgggttgcagggattcttggtgttccattcatttggcggtggaactggttcagggttcacatcactgctgatgcaacggttggcttcagagttcggcaagaagtgcaagctggagttcgcagtgtacccctctccaaggatttcaacggccgttgttgagccgtacaatactgtcatttctacaagcactaccatggccaattccgactgttgcttcatcatggacaacgaggcgacctacgatatctgttcgaaaaacttgcaaatcggtcgaccggattacatccatttgaacacgctggtggcccaggtcgtatcttcagccacggcttcgctgcgattcaaaggcacgatgaatgtggatttgaacgagtttcaaacaaatcttgtaccatatcccaggattcactatcctctagtatcgtacgcaccattgctctctgcctccaaggcacagcacgagtactcgtccgtgtcagagatcaccaatgcgtgtttcgaaccgtccaacatgatggtcaaatgtgatccccgccacggaaagtacatggcctgttgtatgctgtaccgtggagacgtagttcccaaggacatcaacagtgcgatcgcggccatcaaaagcaaacggcacatcactttcgtagattggtgtccaaccgggttcaagattggcatcaaccaacaggccccgagcgttcttcctgggggcgatttggcgaaacccaagcgagcggtttgtatgctctcgaatagtacggccatgtccgaggcgtgggctcgtgttgaccagcagttcgacctgatgtaccggaagcgggcctttgtgcactggtacgttggagaaggcatggaggaaggcgaattcagcgaagcacgtgaagatctggcagttctggagcaggactacgaggaagtggccggcgatacgcaggatcccgacggggtgggttcggattatgagtactaaatacttgagtagtggtggtttctgtacaaatgtactatttcgtgtatttgttttcttctgtaagctaagtctaaataaacatttacaattaggggttcaataaagattatcataattgtcctgtaataatttttaaaccggtttaataccatttttgagctcttaattatttatgtgacgaaaatatcattaagttacgtttgagtgactagaagtaagtatgagaaaaggtcagaatatatcaagcgtgtgctagaacaaggacgttagtaacatgaacgactttacttgttttaatatgtttacaaaagagagaatcgatgaagggaaatcgatcatgtgactaacccccttattttagtacacgtttgatgaatggtgcttacgtaagtgtttttgtatagtggttctattagtagataaacaagaactatgtaagaactgtactggcgttggtatggcgaaaatatacacgacaatcgaatgacagaatttgaataggtatgaagctgaaaggcagattttttttctaaaggatattgaatatcagaaagtctaaattttaatttttgttgatcgtcataatattatgaaattcgattcatcaacagttttctactttgagaatgaatatgctttcctgattctgtcattcggaattctgtctttcgagtcttaagaccatttgattaatctatcacggttttatgcgtttcaaaaatatatagagcatatggagcctaattcttacgaatcctatctttaagcgacgctattaacatctttacacagattttttttttagctgagcactataataaattagtacagatttttacactggggttatgcgttgtcttgttcgttacatttttatcatttgtgaagcttccataaaagataagcaaaaccataatgctcgcgttcaaagcgtattgctcggcgtagctgcagtgatcgattttctc

SEQ ID NO: 496 - DNA, 2648 bp, Aedes aegypti
cacccaagaacatcgcacccgtggtgcggccgcgaagagaagaagagtgtgaaacaacggcattcgctagtcgcgacagtttgaaaccgaaactcgctccgatcgaaagtgcagagaggttgtttcgcggttgactagtgccgccgtaaaccgttgattgtctatccgaagcgaatcggaaattggttgttcgggattggaaacaaccgaaaaagtgataaaacgttcccggaagtgtgtttcgagtcgcagaaattttctagctcgttttttcttctcgttttccccgcacggtggagcagagcagaaacagcagacagatacacggattcgagtcagcaacggagaaatttttgctaaaaaatggccgtgaacgtgtactcgacgaacgtaacgacagacaacctgtcgcggcatgatatgctctcgtgggtcaacgactgcctccggtcgcagttcacgaaaatcgaagaactatgtacgggtgccgcttactgccagtatatggacatgctctttccgggctcagtgccaatgaaacgcataaagtttcgtacgaacctagaacacgaatacattcagaacttcaaaatcctgcaggcggctttcaagaagatgaatgttgataagattatcccaatcgataaactaatcaaaggtcgtttccaagataattttgagtttttgcaatggttcaaaaaattcttcgacgcgaattacgacggtagagaatacgacgcttatctggcacgggataacctaccgatgggtatgggtggcgccggtgcgccgaaaggcaatggggtggcagtggcggcagcttctgtacctcgccgggcaccactagtgtcatccacgtcacgagataaaattaagccgatcacacccagtagaccgatggcgcaaacggtcagcagaccggcgggtggattgggctcaacggcgaacgccagtaaatcctcctcgcagaacagcgtgacgaatcagcaggttgaagagctaacgacgcaagtcatggacatgcggttacacttggagggactcgagaaggagcgcgacttctatttcagcaagctgagagacatcgaaattctctgccaagaagacgaacaaaatgagacccccaactcgctgatccaaagaatccttaacattctgtatgcaacggaggatggtttcgcccctccggatgatgttccgccagaggaggaggaatattaaagagaagctttcgtcattaacgcaccaacagttctgatgaacactttcgcgctattaccggtcacgatcagggcagccgccggacattatcatcatcctttcacggtttcttgaaaatgcactaaacattatcagcgtgtccccaatacttccgggtaaccataaccaggtacaagcatcgatagtggttaagcgataatgagatgatcagcttcttgatcgtggaggaaactgcgtgtgtgtgcacgatcaaaccagactctaagaagaataacgcgaaagctaaaatacaccttatgagagaagaagattgcggtagtggtgaaattttgtttcttttgtatttaaaataattcattataaataactattatcaatgtgactaatcagagcagtttttttttcgcaagcgaaataagaaaggggaatcgtgaaacaagtatgaagtagttatacaatgaacacaccttcaaaattcggaatctgtaaccaaccaaacaagtattgcatctaaacgtaaatatttacgcaaaaattagtaaagatatccatcagcattaattgcacaaaagatttcctttcggcatttttgtgtccagtggttgagcgtgctgtttgtaatattgaacgcatttctgggatgggtgcaaattgactgtttaaaatagcgtgtattgttatgcatttcgtcctcagttatcgttgaagtaatctggctttatgttgattgtcaacttacgctctgcattcattaaatgattcaatccaacctctaagaacaaaactcctaacaacctgtaaagcagcggtccatgttaaatacaagatgccttgctaactatgccccaccagtctacgcgatcgagtgatttgtttaacagagcttattcatcgataccatacaccaatagacacagtttttgacgcctcaatctcggtcctataatattttgttcgaatatttgtcgtttctacagagtgagtgccgtattattagaagttatttgcacatcatggtggtcataatgtgggaaatgattaaaaacgctactaatttatatttgtaataaaactgctatatcagaacatactgtatgataggcatataagggttagctcaaatactctgttgataagaagtcattgaaaaataatctcgagagtaaaacatctgatcgtacgccctcccgtaattgttacataatcgtgtgagagtcgcagtaaaccataaataaaatataacttaaaacatctgtgctgtttctgctgctatgaccagtatgcatgattcaaatagaaaacgaacaaaaatcctattcaagacagtttaatagattatgagttcatttttttattctctatatgacgtgactctgctaactgaaaatttcttttttttttcatgaatagaaaatattatctgcgaa

SEQ ID NO: 497 - DNA, 1110 bp, Aedes aegypti
atggttcggtgccgtttttgggcgattttgttcgccgtgatatattgcttcaaggggattgcgtgcgcggtaggttcagcgttgtcaagtagcagcgaggcagaacccggtctcgattaccagaagctagttgcaaaactggagatattggacaccaaaatcacccgcgtggaagtgtcatcacgggagcagttttcctcacttgagtcgaagcttgataagattttgcaattggttgataatcttggccagtcgatgcacacggtacagaaaaacatcggcgctgctagagaggagatccagcaattccaaaatcactctcaaggtcaattacaagcactggccggtagtgtatcgattattgagtcacttttagttgaaagtcaccgacaaaagcaagttcagccaacgagaagtgagtcgactgcgattcgcaagacggttccagttgagcaaagatatttcgaaagctgcgatgttgcgccgaggaatgtgtccggaattgctagacttctacccgatcttggatttggtgaaccattctttgtgttttgcgatcaagattacgaaagtggagggtggatagtgattcagaatcgttacaatggttcggtaaatttctaccgcggatggagagaatacaagaatggatttggaagtttgaatggtgaattttggctaggtttgaacactattcacgctttgacctattcagcgccatatgaattgcacgttttgttggatgatttcaataatacgacggtagtggctaaatactcactgtttgctgttggcaatgagcacgaatccttcgctatcacgaagcttggtgactatagtgggacggcaggagatggtttatcttaccataggggatcgaaattctccacaatggatatgaacaatgatattccaggaaataatggtggagtagactggactggtgcatggtggtatcgaaaaggacattacagcaacctcaacggtcagtatttgtccggaaaagtcgatcacacgaagttccatgggaaaggtatgacatggaatcccttcaaaggcgatgattactcgttgaagcggtccaggatgatgatcaagcgtatattgtag

SEQ ID NO: 498 - DNA, 2365 bp, Aedes aegypti
tgcttcatttaaaggtgagcaatgtgaataaatttgctgcagtttcagtagagttcctcaagcgtcagccagaaccggaagtcgatgtactgttaaccaatatttgtatccggccaaattctgggcgatgtgtcaacccatccagcataggtatcgacaatttgcattgaatcatactgaaagagaccaccataatttcatcgaaggatattatacgaaagataaacaaagtaacgactgcttgttacttatggatggagcaaaaccccacgccaacatttttgcatttggtaatgctgacgcacatcaaaataaaatgcattctgaagatcaggaaactgttggaatgctggcatgttcttctcgcaggaattacaattcaaggataagaccaaaaacaaatgaaatggtgtctatgcactatcattcttccttttctttgtcgaaagctgcatgctattcattggctatattcggtaaacgatttttcaatattggtagttttatacggtatattgtgttgttctcaattatgttatcagtttccaataatgtgacatgtaactccacgaaggcgaatgaaattgtcagtaatttaacaatcaagattgatgcagtccaacaaagtatgaatcggctaattgatgccttggctgggaactctagcacaccagatcataatatttcatttgtggtatcggaaggagcaactggaaatttcacacgtcctaatcagagtgacaaattggctatgcttgagaacgaaatgaagaaaatgaaaggagatattgagcaattgattcaatcagcgaacataacagctgaagataaaacgcgtcttgccaatttggaatcgtctgtagaagtattgcaaaaactgttggacgaccaaaaacatgagatggatcaaaaacttgcgcagttggaagctttgattgagtttctgctcggaactataaaagaacttcgtgctgaacttgacagtctcaagcgaaaggctgaacaggaggaggaagatagaaggatgcgtaggttacctacagaatgcattgaggccatcaagagtcacgactttatcactgctgagagcaagcttcaagaaatgaacgatgataccaagatcaacttaatcgtaaacaatgtatacgatcaccaccagagcaattttgaattgctgctacggtttgcagaaagtattaccgtaaagcaaagaggttttttagttttgaaagcattgaattacgaaatggacaataatggacacaaagacccattcaaaatggtgaagttagtaggtagcctcaggagaaatatcattgctaatcaaaacacttcagcgcagacgaaacagcaagcgggattgtttgagaatgacctgaacaaatcgattaaaaccgtatcgaaagaaaagttgaaacaagctatgctgaataatgtttacgaatcaaacgaaattcaaactctctctaatgatatctttcgggtcagtgataaattatttggcgatattattaaagatgttgtcaatgaaattttccagctaatggacaccaaaaaaatattgaaatatataaaaagccatagttttgtccagcaatctgttcttggttattctgccgtatttaacaggatacgatattcaaatagcgattccttgttcagtattgcttactatattaaagatgcaatggaagcacccagttttgctagtcttgattctaattataaatctactctaaatcaattgaaaaattctctaccccaatctgtgaggaatgcagcatttgcctcaaaagtctgtattgagaacaaaatttatccaaaatatttatatgcttctgggaaataccttcacgataatccgagacgccacgtgttcacctggatgcccgataataaaagagacgtcaattatagagaggaccactgggagctcattcgaactggtgacagtttttacatttacaatgtagctcatcgggaatacatgtattcccccagtgagtacaaggatttcaagcaaggcaacgataggcgcaaagttttcacctggaccgaaggcggctctttcgacagttgcaaatggaaactggaaccggctggagataacgtttacataaaaagtgctgtacgatcggagtatttgtatacgtccaacagatataaacacgcaaacgtccaacagaagattttcacatggattccggggggacgggtgagaaatggattatggacaattgttgattgtagtaatgcgtgaaaatgtcggaacagaggacgatgttatatgattcgaataaaatggcaatataaagtttgaatattgtaaaacaactgattgcactttaacacttcactttttgca

SEQ ID NO: 499 - DNA, 1569 bp, Aedes aegypti
cctatacaaaaatgctcaacctaaacgtgggcatcctaggccatgtggactcggggaaaacgacactggccaaggccctgagcagtatctccagcacggcggccttcgacaagaatccacaatcgcaacaacggggaatcacgctggatctgggctttagcgccgtccaggttcccttgccggatcatttgaagaaggcggacaatgagctactgcagtacacattggtggattgtccggggcatgccagtttaatccgcacgattatcggaggagcgcaaattatcgacatgatgattctggtggtggacatcggcaaagggattcaaacgcaaacggccgaatgtctggtgattggggagctgacctgtcgacggatgattgtggcgctgaataaagtggatactgtggaggggagcaaacgggaaaagaccatcgaaaagatgaagaaaggactggagatggctctgtccaaaacggtttttgctggatcgccaattgtagagatatcggctgctagtaatacaaacctcgatagactccttgaagtactggtggagtattcagtgcttcctgagagaaactatgaaactcctttcctattcgctgtcgatcactgctttgccataaaaggtcaaggaacggtttgtacgggaaccgttcttcagggaagcgtcaggttgaacgaagatgtagaaattccaaagctgaaactagtcagaaagatcaagtccatgcaaatgttcaagcagagtcaacaagtggcgaagcagggtgatcgtgttggaatatgtattacacagtttgatcccaaattgctggaaagagggctgctctgcaaaccgggatatgtatcggatatatacgcggctgttctccgaatgaatcccatcaagtactacaaaggctccctgaaacataaggccaagttccaccttacctgtggctatgagacagtcatggcaaccgtaacccttttcagaggaagcaacacgaatttctctattactgaacagtatgagtttgtgcaagagctagatcaggatacaatcagtgaaaacgcttcgatcttcgctttgctagaattcgataaaccaatccaagccgtaccgaacgccttagtcattggctccaagctggacaccgatatccattcgaacacgtgcagattggcattctttggccgcttaaatcattgttgcatcgacaaagattaccccacaacattccttccccaattgcaaatatacaaagagaagcataaaaccggaactgtgcagcgagtggtcaacgaaatggaattaatctccagcggactgttcaagaaggagggaaacaatagaacggcatttgtaggactgaacgttcaactcagcaccggtgaaagcggtcgaatagaggacacctttggggccagctctaaggtgaagttacgatttagggaaccactttccgaggcaacgttggaactgctgaagtgtaggaaaccttcagagcaggtaacggtggtggtgaagtacaagaagtttatgttccgaaaggagggcaataaaatcgttcaatgaggct

SEQ ID NO: 500 - DNA, 6189 bp, Aedes aegypti
atggacgagtctacgtcgtccagtaatgaccattcggcaggaggggatggttacgcgtacaaaaatgagatatcgctttcgattggtgaagaagatcacaattctggaacgaacagtacggcgatcccgacgccatcgccacgacacgttgaagtgccagtacctatggacgatagcgaatacgcttcgctgaaggatagcaaacagaacggtaacggtatgagtggactggataatccagcatttgagccagaaaaggagaaacgaccgcttagttccttcggacactcaggggagaagtcactaggagctacctcggtcaacggtaaagccaatggagagaagccgttggcagaagcagttaacttggagctgttgaacatgtccaagccagcgaatggtcatcaaaatggatctagtgcacttccagtcaagaaggataccgaggtggatattggagatccatacgatgagtatttcgtaccggttaatgaacatcggaagtttatgagcgtatcgttccaaaaaccgcgtcggcacgcgtacagccatcatgatcggggtgtagactacaccggtcactccgtcaatgaaccggtacacggaaccgtggactataaacaatggaccaagatcacgagaggcgagaagctatacgttaccaaggacaagcgagagaagaaaaagaagaactggctctgctgggtgctgggcctggccgtgttgctagcagtgatcatcatagccatcctggccggatcaggtaaaatcttcaacgagaatcctaccccggtggaatcacgacagttcgctaaagataaccagatagccacagctggagtcttcggatcgggatccaaggacaactccattccgcgaccacagaataagacaacctcgacggagtatccttctacgatgtcccctccgggctccacggttccaccggttccgccaactaccgaggagaacatcgtttacgtgccgaacactttggaaggacagatcacgcttacgaacttggaattcctggacgactatcgcgatccgaatagttcagcgtacaaagtgttggcagccgaactggaagaggaaattcgagacagcttggatgttcctggatcacgcgatgagatctttgtgaagatcatgagtttgaaacctggatctgtagttgtggattatcgcgtgagctgggctaattcaagctcattgaacgtcgaaagtatgaaggatcgactgacaaattatttggacgacaatcaaaactatctggcgacctacatcgttccggtgaacaccattcgagtagcaagacttcccgacctctgctacaccggcccagctgagatgggatgtgaacatgcctgtgaattcaatgcccgtatcggtgattttgtttgcgtttgccctacaggaatgctgctgaacaatgatgatggtaaatcgtgttacagaccggttccagcgccacaacctgaaccaaccgctgaacctgaaccagcgagcgaacctgaaccagcgagtgaaccgaagccagccagcgaacctgcgtcagagccagagcccgcaggagagcctgaacctgcaggagagccagaacccgctggagagccagaaccggcaggagaaccatcaagtgagcctgaaccttccagctcactcgaacctgctagtgaacctgaaccttcaagttctgcagagccggaaccatccagtgagccagaacccgctagtgaaccagagccagctggtgaacccgaaccaactagcaaacctgagcctactagtgaaccggaaccagctagtgagccagaacctgcaagcgaacctgctagcgagcccgagcctgccagtgaaccggagcctgctagcgaaccggaaccaactggtgaacccgagccttccagtgcttcccaatcggaatctacaaaagaacatacaactacagcgcttccctcaggcaaactaattcatgaaccaactccttcaagcgaacctgaaccatcgagcgagcctgagcccactagtgaacccgagcctgctagtgagccggaaccaacaagcgaacctgagccagccagtgaacctgagccagctagcgagcctgaagctacctcaacagaacattcttcttctgatcattctggtaagcttcaactcgctgccgctgcctcaacaactcaaaagaccataccggagccgactagtgaaccggaaccaagaagtgaacccgaacccactagtgaaccggaaccaagcagtgagcccgagcctactagcgaaccggagccatccagcgaacctgagccatccagtgaatccaatccaaagagcgaagtagaagaaattaaggccactactctgaccccaggcagcaccgctgaaccctctgcagaacctgaaccgtcgagcgactctgaacaccactcgtcaaccgcatcgagcttaggcaagctacaatcatccactgaacactccacccatccaaccgaagagcacaccatgccggatttcatgatcgctgacttggactccaccaaacattcaaccagtactgaaacgatctcctcaacttccccacactccaccgcaggagaaacaccggctccggtgacagaaaccatcgatgatgacgtccctcaaccaaccgtcggtgcctatctagttaccgccaaaactactcccgcaacggaaccgatgaacgtgttcgacgctcgttcactggaacacaacgcatcgaccacgactgccgaaaactccgtttacgccacatccagtccgatttccctcgaacaatggcgtacatcaacgagcttttccactacaactgaagcgcttaaggagcacgatgaagatatgtcacctttcctgccgaacatcgaatcatccagtgcaaagacccgtggatcgtacgctgtgacggaaacaatcctggaaaccgaaacaacaccgacactgctgactcatgccgatcagtctccgttcctaccggaaatcgatcagaacgctagcttagtgaagcttctacacgagggtttggatcgacaggttgatggatttgataacgactcgcagcagcagtatctggaagtgctgccgttgtcgaaggagagcgatcgtaatgaatacaaaaagcagttggatactgtaacaaagactgttttcgtagcgacgactattcgaacatacggtccgacaacggattcactggaagatttgattacggcagctagttcaagaaatatcgttgaacagacgactaatggtggcgctgaggaaaacatgatgacgacgagcaccgagaaagacgtggaagaaaccacactagggaaaatcggcgcttttggaactacaaccgagagggaaagtgctcggctcacggaaactacggaacaggtagaagagagaccgacgaccactatggagaacgaaacaagaaactcatcgccaaaagctgaggttgaagatatcagcacgactgaaaaagaagcagataaagtgacaactgtgatgatggatgagtcgaaagatgattccccgaaaggtgatgtagaattagtggcgactaatgatactgcggaaaagttgacagtaacggaagctgagcaaccgactacagaaaagcaagcaatggaaaccactgttggcgacgaaaagctagaactagtagaagaacgtgtgactgcatccaatgatgaatccgatgaggtgaccgaacgtttgaaagaagaagcgacagaaaagcaagaaaatgctccggcagaatctacaagcctaaaagatattgaggaaacgactgtgcacaccgtgatgaatgcttcctctacaactacagaacctagttcaaacgcgaaactgatggaggaatctaccatggaagtgaaggaacctccaacaacgaccacgtcgacgagcacatccacaccaaccactacggaagtagaaacaaccccagcagctacaaccagtacagaagcagcaaccacgtcagaagcagcttctacgacaattgcagccacgtccaccactgaaaccattaccagtacaactgctcaatcaagcaccgataaaagcaaagcggatttcttggaacggacactactagatttggaacaggacaacgacatttccgagaatgatttgaaggttcttcccttggatagaaaagcggacaaactagaagaatcgccaccacctccggatccgttaggctccactcagaaaacaaccgtcgaccaggagtccacctttgaaacgactaccggtcattttttaggagaaacgacgtttcatttgattagatcagaacgatcgaatgaaacgtcggtaattaagacgagaaattctgacgatgacgacttcagcgaattggtggctagcgccagcggaatgtttacgaagtgtgcggtaggacagtttgagtgtgtgaacggtacgtcgatcaaggacggcagctcgtgtattcagaaatcggaacggtgcgactcggtgtcacactgttcggacaattccgatgaacaagactgcgagcgattgggatgtccgggacatttccagtgtaacgatggtttctgcttagctagacagcatgtgtgcgatggaattacgcattgcaatgacggcagcgatgaggttcagtgtgatcagtggcagtgtaactttgatgaaatatcttgtgatccgagtggacggaaagggccatgtctgcctgcgcagtggaaatgcgatggattggaacagtgtgcaaatgggttcgatgaaagtgactgtccggatacgtgtacaaacgatcagtacttctgcaatggacagcgtaagtgtattccggagtcgtggcgatgtgacggtaagtcggattgcaccaacgatgaagacgaacgactatgcgactgtcccgtggataacttccggtgtaacaccggtggatgcgtcccaagtgcctatgtatgtgacgggcaaccacagtgtccggatctgtcggatgagtggggatgtttcacgttggaagaaagcgagctgaaagttcgcgtgggatcggagaaactgaatccagtttgcgcagacagctggaccaaggagttatcggatgccgtttgtgcggagttgggctatttgcaagctaagtcattttcgatctcgaacgtaacgggtggcgatgcgttctaccgatttgtgggtgtgaacagtaccaatctgctgggaagcttggcattgatcaccagttgttccgacggcttggtgaacatcgattgcgaactgtatcgttgcggtagtgatagaattacgcctacctcggaacaacggatcgctggtggacttcacacggactcaaaccagcttcctagtctagccttagtctacagcaataacgcagccatcaagtgtactgctaatataatatctcctcgatgggcacttgcaagttactcctgtattatgggtaaaactgaattcatcgacaaccgaaatattgcggagctgaactggatgctgttcgcgggaacctctcagttcaactacagcatgatcaaaggaagcagcggcaacagttcataccagattgttgaaatccagaggatcgtaccttatcctcaggccaaatacaaacaatttctctactccggagatgtcgtacttctgaagctggctaagccgctgcagttgaacgaacaggtgggtagtgcctgtctggcacaggacgctgaaatcgacccggatcagctgtgcctgaccgctggttggggtgcggatccgtcggccataaccagtaccgaacagtacctcaagtatctaccagtgccaacaataccggcggacaaatgcaactccagtgtgcactacaacggttcccttacggacgatgccatctgtgcgggctacctcagcagtagcaaagcgacttgctataacgacgaaggagctccattgatgtgccacgccgaaagcactggtcagtggctactggagggcattctcagttaccatgggaactgtggcaaacggccacatccagctatttacaactcgattacctcaggaatctcgagctggattcgcaacacagttggcaatgatctgatgttcatgagcagaagaagcggtctcggcagtggtagccgaatcaacggtactgagccaagcagcacacagccaactactcggtaggcgttccgagtttgacagtta

SEQ ID NO: 501 - DNA, 957 bp, Aedes aegypti
atggatgtgatatgctcaacgtcatctatatttaatctagtggcaatatcaatagacagatacatcgccgtgacgcagccgatcaagtacgcgaagcacaaaaacagccgccgggtgtgcctgacgatcctgctggtgtgggccatttcggctgcgatcgggtccccgatcgtgttaggactaaacaatacgcccgatcgggtgcccgatctgtgcgttttctacaatagtgattttatagtgtactcgtcgctaagtagtttttatataccgtgtattataatggtgtttttatactggaatatttttaaggccctacgaacgcgagcgaaaaagcaacgtgcagcccgcaagccccacatatcggagatcaccgccggcggtagtctgatagagaacattgctcaaaccaaggtggccacggagacgcacctggacggcagtacgaaaagtgccggttcctgtaagatcctgccagacgaggcgcccaccaatacggcgtccggttccaacgaggaagacgacgacaatgcggggtcccctgacatttatgactgtcatgtgattgtgaacgataaatcaacagaatttatgttggccacggtcgtggaagaagccggaaatgtgatggctcagataacgacaacgcagattccctccgatccgaacggcaatcacgactcgggctatgcgccctccagcataggtgacgtgctggcggcgaatgcgagtcctcccggcagcccgaatgtggccgccaccgtcattgtaaatagaaacgctacgcttagcagtaggaacggttcaccgcggaaggaagccagtgtgacgctgaaaccgctgtcgttagtgcggtgcggagttcagcaggccttatcgctcaatcgaaacgactccacgctatcaacgaactccaactcgcgggacagcacccgaaaagacaagaagagcatccag

SEQ ID NO: 502 - DNA, 1725 bp, Aedes aegypti
ttgttcaatttcacaagaaaagttaaattaattttggaacggcaagacaagaactgctctaaaatggagagctggctaaaggatcgcctctccaagtgtctgtgcttcgaagtcccggacgaaatgatcgggtacatcatgaccatccggggcaatcaggagctggacgagtatttcaagagtctgctggattccgggaaccccgaacacgtctcgtttctgaacgagttcaaacaacggctaagaaagagtccttcggaaggacgtggcgggaaaaaccagaaatccggcaaacagcagcagaataagtcgcaaccgcctcagcaacagttacagccacaacagtctcgcggaccgaaacttccggaaccggttgcaaaacaggatgtcctgccggtggcttcctcgcagatccaccagggtgcagtcaagaagaaaacgaaatacgtgagcctttacgaccaggaaggccgtgccaatgtggtcctgatcaagggtcggcacctgtgcgattgccaagcgtccaagcacaagctgatcaacaactgtctgcactgcggccggatcgtgtgcgagcaggaaggaagtggcccttgtctgttctgtggcagtttggtgtgcaccgacgaggagcagaagatgatcgacagctcgtccaagaagggggacaacctgaagcgctccctgatggatcagaaccggcccaagggatgggaggaggcggtggccacccggaatcgcctgctggagtacgaccggaacagcgagaagcgaacgacggtgatcgacgatgagtcggattacttccgagcgaactccgtgtggctatcggatgccgaacggaagaagatggagaagctggaagcggaaatgagagagaagaaacatgccagccggatgagccggaaggtgacgattgactttgctgggcggcaggtcgtggaggagccgcagttggccatagaggtggaggacgagattctgaagcagattgccgagtcggttgctccggagaaggagaatgctgggcccaagggtggttgggataggaagaaagccagtgccgatcggtcggatgatattcatccgggaatcgtcggggaagcgccgattttcatcgatctgagctccggacaagcgcctttgagaccacaaaacggcccccgatttgatggtgtgtacagcaaagtgcaggacaaggaattcctggaaatgtccgacctgcggcactgcctttcgatgcatcaaccgtgggcttcgctgctggtggcgggaatcaaacggcatgaaggccgaacttggtactcgtcgcatcggggccggctgtggattgcggccacggccaaacccgtggacatggaaatggtcaaacagatggagaacttctaccgggtgctgtacaacgacgacagcattgagttcccctcgcagtacccgtctgggtgtttgctgggatgcgtatcggtgcaggacgttctgccgcaggaggaataccggaagcagtatcctgagggggaatccgagagcccgttcgtgtttgtctgcacagacccacaggagctgcccattcgttttcctgttaaaggggagcataagatttacaatttggacacgaagatccaccaggccgcggtgaaggcgctgcagcgactttcgaaattgaaggcagaagaatgagtattacattgagagaagaaatctatatgcaatacacaaaagcatagc

SEQ ID NO: 503 - DNA, 1395 bp, Aedes aegypti
atgctgaccatggagtctgatatgaaaggcggcatactgcacgccacaatgccgccgcatcatgcttcatctctgcatagtcactcgtcgtctccgtacggagcgttggggtcgctgagcatgatgaacatcggtcaatcacagctgggtcatcaggcgcaacatttgagccatcagcagcatctgtcgcatagcaacaatagtaattcctatggacaaacccattcgaatccacatggctctccactgcaacctggttccggccttagtcctaatggaccatcgcaggcatcccagcaacagactcctccaacgacaggactcggcaaccatcacatcacctcctccggtcagaaccatggtcacacaggcgttggaggcactgtaaatcacaataataacaatactagcaaagcagcgcaattgaatgccgaccgtgtaaaacgacccatgaacgcctttatggtgtggtcacgtggtcaacgccggaagatggcttcagacaatccaaagatgcataattcggaaatttcgaaacgactgggagcgcagtggaaggatctctcggaaacggagaagcgtccgttcatcgacgaagcgaaacgattgcgagcggttcacatgaaggaacaccccgactacaagtaccgtccacgtcggaagacgaagactctgacgaaaaccaaggagaagtatcctcttggggtaggttcactgctgcaatctagcgaaggcaatacaatccggaataccaatacaatttcggcggcacaacaagcggccgcggcggctgctgccaatcgtgatatgtaccagatgcctcccaacggctacatgccaaatggatacatgatgcacgatgcgtcggcggcagcgtatcaatcacagtcacactacatgagcaattatcaccgttacgatatgggtcagatgcacaacgccgcctcaacgggttcactgaactcctacatgaatgcgaccagctacggtatgtacggaaccgtatcgggtggacaaacgtctccatatggtctgcagcaaccgggatcaccatacagttcaatccaacagcagccaggatctccctacggcttgaaccaacctggcagccaaatctcctgccaaagtcatagtcccagtgattccagtgtgaagtcagagcccgtgtcacctagtcctacgtcaaccaacaacaatctgataatgaaacgtgagtatggacaacctaccgggccggatctaagccatctcatcaatatgtaccacgtgccagacatgcaaagcgcagaacatcaacggaatctaatgcagcactatcagcatagtgcgtcgcccgatcttcaatctcaacagcagcaagtcctgcggacgatggctcccatctcgcacatgtga

SEQ ID NO: 504 - DNA, 2140 bp, Aedes aegypti
atgctccttctctcattacagaaagtcgatccagaattaatcttcacaaagcaagaacgtatcggaaaaggatccttcggtgaagtatttaagggcgttgacaacagaacacagcaggttgtggcaatcaaaataatcgacctagaggaagcggaagatgagatcgaagacatacaacaggaaattatggtgctatcacagtgtgattcccccttcgtcaccaaatattttgggtcatatcttaagggtacaaagctatggattattatggaatacctcggtggcggatcggccttggacctgatgaaagctggtctgttcgaagaaatgcacatagccatcatcctgcgagaagtgctcaaaggtctcgactacctgcactccgaacgaaagctccaccgtgatatcaaggcagcgaatgtgttactcagcgaactgggcgatgtgaagctggcggatttcggtgtagccgggcagctcaccaatacgacctcgaaacggaacacattcgtcgggacaccgttctggatggcaccggaagtgatcaaacagtccatgtacgattccaaagcggacatctggtcgctgggaataactgccatcgagctagccaagggtgaaccacctaactcggaactgcatccgatgagggtgctctttctgatcccgaaaaacaaccccccgcaactgaccggtagctataccaagccattcaaagattttgtcgaagcgtgcctaaacaaagacccggaaaatagacctacagcgaaagaattgctgaagttccctttcatcaaaaaagcgaaaaagaactcatacctgatcgatttgatagaccggtataagaaatggaaaacgcagaagggagaggagagtgaaaccgaatcggagaattcagactctgaggaatcgaaaccggatagcgatatggacgaaccgtggatcatgacggtgaaaggcatgcatttcaacaatttcaacaaaggttcgatggacgacgcactcgggtctccggtgaaacacaacggcaccagcaacagtatgatggtcctaggcaacgcacgagatagagatcgagatagagactacaatctgaatcaacagaaatccagtcagccacgaactccaacgtcgccatctcaccagtcgcagacctcgtcggctctgatatcttccaacagcaattccaacagccgaaagcaacagctagtctcggaccgggaaccaacgtcaccccagaaggatatcggtggccattacccgaacgagcgggcgagtctggaacggcaacgggaaagcgagaaggagcgggaacgtgaacgggaacgagatcgaatagaacgcgaacgtgaacgagagcgggaacgggaacgggagcgagatcgtgaaagggaacgagaacgagaacgcgaacgggaacgggaacgagaaaaggaagtcgagcgggagaataaggaaaggcgaggctcgaaggaggtatcgaaccaccggggcgacagcgaggagaagatcagcagtttgcgacgagagcgcgaaattagtcacagcaatggtaatcccagaagcaacagtattacaaatgtaaataacaactccaagagtcggacaaacagcggctgcctgaagtccatcatattccccctgctatcggagatgcagcgaagttactccagttccagtaatgcggagctgagtgacctgcggctagcgttcgagaaggccgaactaacctgccccggagtgaacgatctgttcgtgaaggagatcatccacaaactggtgcccggtttctccgagacccggatcaatacgcttatagacaaagtgacgcgagattccaaagtgaagcgataagatccctaacccggtgcggtgtgggcgcgccctgtaaagtgttagtgatgtgacccgggatcgaagtgagggttgacaattttgggtactctccaattcaagacgatcagctcgctttcggttcagcgcaaatcaatagctacgactcacaatagaactaacatgaattattgtttgcccacgtgtgtaatgtgtactaaacgtgtcagttatgggaagaatgagagacgaggagtgtaaatatctttctaatttgatgcatcattaaaagattaacaagatttat

SEQ ID NO: 505 - DNA, 1920 bp, Aedes aegypti
tgttaccgatactatcagtgcgtcaacggtttcccttacccaatggtttgtccagataacacgtggttcgatgccactagagatgtttgcgataatcctgcaaatgttgaatgcgtccttgaacctggacagcccacggttccaccaacaccaaacatctgtgacaataccgcaaataatcgcctaacaccgaaccctacagcctgcaacaagtattacatctgcgttaaccaaatcggttggtccaagatttgtccactgaacatgtggttcgacgaagaaggtcagacttgtgctcctgccggaaccgtggattgccctctaggaccaccgattcctccggagacaacgactactcccttcagccgatgcgatgacgttgcaaatcttagatttgttcgtaacgaagactactgctaccgatactaccagtgccgcaatggcgttccattcccgctgatctgtccacgtgaccagtggttctcggaagaaatgcaacgttgcgttgatcaagacactattgaatgcgaaatagatcatcctccaccgccagtatctccaactcccggtatctgtaatgatgccgctgatggagaaatggttctacacccgctacactgtaatcagtattacctctgcgttaatcgtataggattgccaaccacttgccctctaggccaatggttcgacgagcaaagtcaatcttgcaacaatcctctgtgtgatcggtcggaatatgttgagtgtgacgcaactccgccgccaattgtacgacctcctggaattgatggaatctgcgacgacgtagccgatggtcatctgtcgcctcatcacacgttctgcaatgaatttttcctgtgcgttcgggaaattggttggccattgatttgcccgcctggattgtggttcaatgaggaagaacagacctgttcgataggtggaaccgtttcttgcgatcttgctccacagcgccctccagttaccgagagtccgtacgcaattggatctccattcccgatgatttgcccaaatgaacagtggttcgacgcactggagtgtattgtggaagaagaacctccacgtccaccaccaactgcaggtatttgcaatggagtgtctaacgctatccaagtacctaatccaagggcatgcaatcagttctacgtgtgcgttgacgagatcgggttcccacaaatttgcggacctggactgtggtttaacgaagatcaacagacttgtttgccaccaggcgaagcatcatgtgaacttggacctcctactaccacaaccgttactaccccttcgccatatgaacgctgtcatggcgaagaggacaaccgtctgctgcggaacgatttctactgttaccgatactaccagtgtatcgatgaagtggcatacccgatgatctgccgtccgggacgttggttcgatctcgagcgtcaagtgtgcgacctatctgccaacatctatctctgttcagaaacgacgactactagttgcgtagctcctgatcaggttgaatgcccccatggactacggccgactccttcgccgatcgaaggtatctgcgacggtgttacatcgggaactaaggtaccgaacccagaggactgcacgtggttctacatctgtgtccagggaaggccctatgcttcgccatgcggtgaaggaatggcattcgataagacattgctgacttgcgttccggaggcggatgcggagtgtgccgacgttgtaaccacagtgcccactcccggaatgtgctacggaaaggatgataatacgctgttgaggaatccgtacaactgtgcagcgtactacacatgcatcggaggtattgctgaaccatcattctgcccaccgggagagtatttcgatgaatcgttgcagcggtgcgaactggaagaaaaagtggag

SEQ ID NO: 506 - DNA, 1266 bp, Aedes aegypti
atggagaaagtcaaacgattgtggacgcgtcaggagttcgatatcgactcggactatttcaagctgattgattctatttgtttgctgttcgagcaacgaccacctttgactgatagatgtggcatcaaagtcgtatggacggcactaagtgtattccatgggttccagtatatatgttattcgattcaactcgtacgatgtgcctataaatcgccaatcaatatggaagagctgacaagcattggaaatttgctagtggtacttactgttgccgtaatacgaggtcttagtttggcataccatcgcgataacatgctggaattgaagcgttacgtcaataaaaaatcctgtcgtcgatcagatccagatgcttttgctctacgcaaaagaaagtacttgaagatcaatcggtatgcagcatggttttacatcgtaacgacgatgaacagtttcacctgggctttcaccactggtttacaagaagatattttcaaaattccttatctcattgacggattgtctggaagtacgaggaaaagcatcaatgtgttcttttcactattgtttgtcccctggtgttacactgtatggtacagtcccacacaatttattacactactgagtatattacatacggagctaacaattattgttgggcagttcgagggcttgttccataaagtgattgaaaaatacgctttcgatgcttacgaattgaatcatatgacaaaaatgcaaataaatagattttggttcaatttagataatgagtttaaaaacgctctatcgcaccatatagcctttgtcagaaaactgtcattattgcggaaagtttccaatgtaaatttcttcatatttctttgctcgagtacattgatcacaacatttaacatattcttgtttctcgtggaaccatcattgggacgagtaccgctgctacttatggcgatccagtatatttcggagacgtacctatgttgcacaatgttcaacaacttggaaaatgagaacgatcgtatcaactatttggtctacgctcgcgattggctcaacgaagttatcaaacataggacatatgatcggccttactgcgcttcgatctttcggaatgccatctttctgcaccaacaggtcggcagcggattaaccattcgagctggaggaattttcccattgaatttacgtacctttacatccatgatgaagtcggtatactcattgctaacgttgctgttgcagtcaattgagatgaaacctaattattaa

SEQ ID NO: 507 - DNA, 1485 bp, Aedes aegypti
atggccggcggtagctgttttacgtgcgccagaaaaccggacaaattcttcgaaatcgaagatcgtacggaggaatcgaagcccaacatctgtctcattatgtgccagcatttttggttcaaaggcgaagaccttctgaaagctatcatctgtgaggtctgctgggataaagtcgagcaatggcataggttctaccaggaggtaaaggacctgcatgaggatcggcaggattcgaagccgctgtcggttttcatcaaagaggaggaggatgagattgatgagcatttgattcgaggaatttgtgcggatgtttcgtttgaagaaccgatggacgataaggaggactgtaagtctgaaatcgacgatcgatcggacgaaatgccatcgatggttgaggatagtccccctacaacaagaaagcttcgaaatacgtccaaaaaaactgcaaagagtaaggtatctgaacccaaaaccgtccgaagaaggagaaaggtgcctttggagcagcagaaagcagaggacgattacatcaagcagcataggccatttgtatgcgaggagtgcggcgaggaattcgaggggtttgatacgcttcgtaagcactcgatcaaggatcacgataagcagcacattatgtgctgcaacaatcagttcaaaactcgaacattactccaccagcacgttcagaatgtgcttaatccgcaagagatcaaatgcgaaatttgtaacagaacgttcaagttccagagtggatacaatcgccacaaggaggaggttcacgctgatgaacatctgctgatatttaagtgcgatcggtgcccaaggagtttcccgaagcaaaagctgctaaaacggcacctcaaggagcacgaaacactggagaacgagaaggccaaatgtgaggtctgcggcaagtgcttccggacgcggatccacatgaagcggcacgtcacacaggtccacgataagactttcgaattcatgtgcgagatttgctccaagggattcatgaagcattcggaactcaaagcgcaccgcgagtaccacgaactgtccccggaggaaatgaagaagcaatgccccgtctgcaacaagtggctaaagaacctgagatactggagacgacatgtaacccgacaccagaatgagggagcgcacaagtgcgagcactgcagtcacgtttcggtcaatttgctgtcgctgaagcagcacatcgaacgcaagcatggcccaaagatcaagaagtacgtgtgcgatctgtgcggcaaggagtattcgcggccggtcaccttgaaggaacacatcgccaatgcccacaccgggaagcccctgtaccagtgtcagttttgcgacaagagtttcttctcgaacgccaccatgtacgcccaccggaagaaggaccacccgcaggaatggctgcaggatcacaaggccaagtatgctactgtggagcagggcgacggaatcgatggaaccgtgaactag

SEQ ID NO: 508 - DNA, 1548 bp, Aedes aegypti
atgctgttgaatccgagtgccatcctatggaccgtggccgctgggctgctcatatatcgatgcttccgattcatgttcgaccgaccgccaaactttcccagcggacctccgaggtttcccctgctcggaagctatctggtcctgttgatggtgaactatcgacacttgcacagggctgcggtgcggctgggtcagttctaccggaccaagatcctcggcatctatctgggggattttccctcgattgtggtgaacgatttggccatcgccaaggaagtacttgcccggtcggaattcgatggccgatcggatctgtttctggccaggatgagggagaggaacttccaacggaggggcatatttttcacggatggaccccactggaaggagcagcgacgctttgtgctgaggcatttgagggattacggtttcggcaggcggttcgatgagttggaagcggagactaggagcgagttgatgacgctgctggatgtgttgcgatatgggccaaagttcgagcatgagcggttatttgcgaaggatggttgcgtgaagtgtccggatgcattctacgggttgctgggcaacgtctacttccaagtgatctgcggggaacgcttccagaggaaagatatggcgcagttgtatgaaaccggccgccacgcgatcaacttccagcagaagggcgacgactacggtaccattctgagctatctgccctggctgaaagactacttcccggaagcgaccaactatcggattctccgggaggtgaacaaccggctgaacgacctgatagaagcaatggtccagaaatacctggcctcatacgacgagaaccatatgcggtgcttcctggatcggtacatctacgagatgaaacagagcaaaccgctggaaggggatgccttcacttttcaatatgaccagttggtgatgatcctgtgggacatgcttctgcccaccctttccggttcggccatccagctatcgatgcttctggaacggttactcctcaatcctcgagtggccaccaaagtccaacaggaactggacggagtcgtcggacacgggcggcttcccactctggacgaccgcgtaaatcttccctacgccgaggcaactctacgggaagccctccggatcgataccctcgttccgtccggaatttcccacgtggccctcgaggacaccaagctatgcgggtatgatatcccgaagggttgtttcgtcatgctcagcttagatgtgatcaataaccagcgggagttttggggcgatccggagaacttccggccggagcgcttcctggacgagagtggcaaactgtcgctcaaaaaggacatctccgttccatttgggggtgggaaacgactttgcgttggggaaactttctcccggaatactctgtttctgatgtttaccgctttgatgcaaaacttcaacattaagccaagaccgggcgatcccctgccggacctgggccagaggataaccggggtggtcacatcgatggaacccttttggctccggttcgaggcgagatag

SEQ ID NO: 509 - DNA, 1173 bp, Aedes aegypti
ccaacatccaaaagcatcactcattcggtgtctaatcgttgtgtagtgaaacaacagagcacctggtccgacttctcgaagacttccagtcctgcctgtctccactcattgcctggtattagaaagtggtattgtatctcaccgtcaaaatgcagctattatccggactagtgaaaaccaccctgcctaactacttggccggattgccgatcccggacagcttcggtggatggttccggctgggattcacggactggctctcattgatcccgccgactgccgccgtcggaggcctggtctatgtgtcctacctggcgttttgcccggaggctcggcccaagcctagcaccaaggtaaaccgtagcatccgtatggccgaggccaaggtagtggacatgatcgacatcgaggacatcgccgagaaggccgcgttctgccgctgctggaagtccaagaattggccgtactgtgacggatcgcacggtcctcacaacaaggaatgccaggataacctcggaccggtggtcgttcagcgcaaaaagaactaaggcgcgtaatccaaagcaaagcagtgggacactcgaaagttccggtggattccaattgtgtaattgaatagtgctttttacatgcatctaaaaatcaatacgaaaatagaaaattacgtgcattataccggtagcgctaggatatatagaatcttaataggaaacccaattcaaaaaaaaaacgagagagaaaagaagagacggcattcatgcatcacatcattctgtttatcgaatccttcatttttttaatttgtcatacatggtaactgaaaaatacttatttcaatgcaacatcaacaaaaaacggtgatggcagataataacgtcactcagttcaacattcacttaatattcgaacttttattcttgatatttttgtctaacaccaaaccttatggaagagacgtgactcaaccaaaaacatacagcatgtttccttaattagtacgtactaactttttcaatcgacggttgacataatagaagtgatacctgttacagggcagatggtgctagatgaaccgttaaaactgccgaatgttctaaacattgtaccgtttttttctttccaattccaaattgatatcgtggataataaattgagcaagttgagttatgaaca

SEQ ID NO: 510 - DNA, 2508 bp, Aedes aegypti
aagacagaaaaaaaaagaaaaaaaattcagcttcaagtttatatttcattatttcgcatctgagcatctgagctcacacacatgttattctaagcaccgatttttttaatgtgttccctcaatcaataatgtttttattaattcatgaacgtattatacttgagattgggtgacctagagattgactgaaattcatttatcctcaccataaaaaaaaatcatgaaatacccaatacgactaaatgcttcgaatggccatcatattcaattagtaagaaactttaacttttaaatgataatattttccagattggtttgatgcggaatggaattctgctggcagaagacacacccatcaacatcatggagcgttttaattgtacaaatctggaagatgctttccttaccctttgccaaaaacatggtccctctgaggaggctgatcggacaacacacgagtcacataccatacgtagtataaaatcaatagacacaatagaggatgttggatccgacatcaagaagtctattccgccactatcgtcttcacataatgaaaagaaagatatgagtaaaagcttgtacgaagaaagcggaaaaccaataacgagaaccataaaagaggttttaagctttacgacgaaacgaagaatgaacgcattgctatcgaaaaacttcctacaaatgatccggcagcctgctggaatggtgtttctgttcctttaccccatatttcagttggtaagtttttacatagcaataggtggagatccaaaggaccttcgattaggtgtcgtaaacgacgaggtgaacaacatacaggaatgcttcaacagatctcttatcaccacatactatcatgatgaatatgactgcgatttgtacaaaatttcctgtcggtttctcgatcagctaaataggagcgttgcgatacaggaacattacgagtcatttgacgatgcttacaaagcagccaaaactgggaaaatatggggtttcatttatttttctgataatttcactgagtccctccaagatgtaagagataatgttcgagacgccaaccctggatctttccatacttcggaaataaaggtctatttggataaatctgaccagcaagtaacattttttctcgagaaaaagctgatagagacgtacaaggaattcgctgaaagagtaatgtcggattgtcacctaccgaagcagttggcaaatattccaatcacatttgaagaccctgtctacggatcatttcaagatgaattcaccgactttatggctccaggagttgtcatgacaatgatcttttttctggctacgctcatcacggcaacgatattcattactgaccggctcgaaggtgtttgggacagaacgttagtagcaggtatcacggccctcgagttactgctagcacatataattacacaaacgtcgattatgctgctgcaatgtgtggaaattattcttctcgccactttcatatttgatgcacagaatcaaggcagtaacatcaccgtggtcggtctactgatgctgctgggcttcgctggaatgttatatggtttgctgatatccatattctgcgatgcacattcaacggcaaactttatggcaaccggaagcttttatcccatgataatcatgtgcggaattttgtggcccctggaaggtatgccccaatatttgcagtacttggcgtactgttttccctttacggtgccttcgatggcggtgcgcaacgtgctttccaaaggatggagtatcacaaactcccaggtgtatatgggctacggtgctgttggtatctggataataagtcttttgttattatgtttgatcggtttgaagataaagaaatagggatatatttaaatgatgaaagtacagtttcaaccaagctcactgaatagcaatttaattttacttttggttagctctgtacatattagccgttatccgattggttgttcaatcgatagaagctacggaaagatgaataaaatttgcttaccatagatttggatggagctcaattagaattataaatggtattagtgcactaagtaaaaaatccaacataagagtactgcaacttttttccatctctctgaagtttggtgtagcaaagcaatatatgctgtcacctatgtgatagcatctacgtaaggtatattccaaaagtctgttatttataattctgaaattgtttaattgtattttacaataaagaatgcgtgtgaaaagcggttttgtattgagacgagagtaatttatttttttatcaatcattttttaccaacagagctaaataaaggagcagaacaatagtatcagtagatttaatagcatgaaacacttatgcatttgggacacaatataacgtcatcagatctttgacatactatttgtggtcaagaaaatgcattcgagaaaaattatgccagggtaaatatgggaaagaactttaaataaataccatcaggttcatgaaaattcaaaaaa

SEQ ID NO: 511 - DNA, 807 bp, Aedes aegypti
atgttatcaattacctttgcattggtgctattcctatccgccagttcagctgtgatcgtgtcgccgctggatcatgcaatagaaacctgcggtcgcgatctccaagtctgcgagagtaaactagcgtcgtatcgtgcactttcgtttccggacgatcgagaaacccaatgtttcataaaatgtgtgctgatcgagcttcaggcctggtctaatcctcgacgcctattgaaacattctaccattcagcagtacttcataccggacgcggcagattatagttttgaagaccgcacgagacgctgcctagatcagaccttgccgaactgcattcccggagatagttgttctcgcgcttattggacgttcctctgttataaagacaactacgggaacttgatacggcaaccgaatcagttcatcccaccaacggaattggacatcgctcaacaccagctggattgtgcagatattctcagaattccacgggaagagttgctcaatgcggagactttgacgaatggttcaaattgttacgcacgttgcatattgttgcggagtgaagtctatagcgacgaaagcggattggatctcgaccgtctatatgttctacttggatacgacactgagaaacaggcattcatacaatatgctcaacaatttctagcaacagattcggcaaattgccaaactgacaggtgtctggcagcgcaggtaccttatcagctgttccacgagctgctggtgaaacttttcaaaagggatggaacgagagacatttcctacgtcttcgatgtaaataacgtgtga

SEQ ID NO: 512 - DNA, 1427 bp, Aedes aegypti
gcaaacgataacgttattatttcagttttgatcagaactcaaaagtgcactacagcagtttaattaatttccattgttacttctcgtgcatattttgacggttacggttcgcaaaataacaccccgtttcagcaattaaaatggtatcgaagaaggatcccacagcctggctggataatgccttcttcgaaaaagtgcttcggcaggctctcagcgacaaagctatcactgttgaagacttcttcataagcctcaacaacgattccagcactcagtacgccagcacaatttatcgagccacggtcagctattggatcaagggcaaggtcgaccatattgctctcgttataaagctgatttcttcaaaagtaaaccagctagctgacgcaaattcattccaaaatgaactcaatctgtacagaaactacatcagtagaatggaacatctgttggcacaggcaggatactcggatctacatctggctccaagattgatatacgcatctacggaacctcagccagtgatgatcttggaagacgtaactcacaatcactacgagctacacaagagttccatggattttgatgatgctaaagtagtaacggagaaacttgccagattccatgcagcatctttctgtctgttgaaggacatttcgaacaaaattcccgacgatctgttcagtggtttgttcaaggcaaagcccaaccaaggtgtgaagtttatggaggaaaattttggcattttcgctgaagagatcgccaagtgggagggctttgaacattatgcagaaaaagtggggaagctgttgccaaaatttctgcagcgtggaattgagatctacaacccagaaattgaaagtgcttccctcaaagtgcttaaccatggggatttccactataacaacatgctggttaagttcgatagcgaacgatccgccatattggatgttctctttgtcgactttcaactgagcttctggggcactccagcggttgacctctactatctgctttatctggtttgcaatcgagagacacgtgacaaacaccgacaggagcttatctaccactaccaccaaaagttgacggaaactctggacaaaatgggccacatcggaaccgtcccgacgttattagatcttaacaatgatctgctgcgggcgggattcctggaggtggtgatcgttgtgtgttttattccatttttgtttgccgattacagcgcagcgctgaatgtgtttggcgaaacgaacgacgccaaagcctaccgaaggcagctgtacagcaatcctcaataccgagagatactggaacccctgttgccgtactttttacataaaggtttcttggattgaaatcgttcggaagatatcaagaaatacattctaggcttacaatcaacataggaactgtactgagtaatg

SEQ ID NO: 513 - DNA, 703 bp, Aedes aegypti
ggaacgagaaatcagcgaatggagaaagaccaaggaaatcacgaccaaaggatgagacgttccggatgcagcacttaacttttcaaggaagtgggatttccgaccgagattgccgatgtttacgcggagttaaccactccaactctgatccagtcgcaaggttggccagccgctacatggtcggaattaccaaaaccggatccggtaagacgctttcttatcttctacccgctttgatgcccatcgatgaacagtcgcgattgcgtcgtggagatggacccattgccctgattctggcccctactcgggaattggcacagcagataaaacaggtcaccgacgacttcggacgggcaataaaaatcaagaatatttgtctctttgggggaagcgcaaaacgccgaagctcgtatttggtgttggatgaagctgatcaaatgttagcattgaaatcgaacggtttgtttattcgagttaataatcatcattggaaccacatggtagagagaatcagcaagcagcaacgataattttgaaaaatcacgcgagccgcattcttgaatttcaattttattgaggaatcacaaacggtgacgaagatatttactgtgccatggatcattgcgttaatttcgataatattaacgtcgtttgcaatgtgcaactaaacaaatttagagaatcattaaaggcacgattgacg

SEQ ID NO: 514 - DNA, 1929 bp, Aedes aegypti
atgggggctatattttcacgatttcggaaagagaaaaccacctacgagctgttggagaacctggaggaaaagataagagacatcgaagagtacacaatcaccacccaacagcggcagaagcgcttcgtggccaacttcctggtcatctcgattggcctgtacgtgatatcgtttgcggtgttctactttgtgtttttcccgccaacatggaacgaacgtatcatccactcgctgccgctgctcatctgcccgatgatcatcacattaatcaaaaaagtgctggcatggtacttcgagcaaaaagtggtgagcaacacaaacgaactcaaagtgcttcgggcccagaagaagaagattctcgagaaggtaatggataaggaaacctacaaggtagcggtggatatattgaacaaattcggagacaagcctctaaaaacaacgccgactcaggatatgagtgggatatcgccgatgaaagctccccaaccgatggcgggaacaccaaaaggtccagtcccggcgagagctgctcatggaccacaatctgctccgactcaacagcagatgacgccgatgcgaccacagatgcagcccaacacaccgatgggagtgaatgcgaatatgaggctccctaatccgaatatgcaaacttcattccatcaaccgcaatcggctggccccaatcctcaaagtatgccatatcgacggacaccctatcccatcatcaaccacagcgagaagggggtcatcgaaaagatggtggactacctggtgggtgatgggcccagtagtcgcttcgccatgatctgccagcattgcctcatgcacaacggtatggccctgcaagaagaatacgaatattcgccattccggtgtgccttctgtggggtttacaatcatgccaagaaacaacggccacaggcgccgaagctaccgttcgaagtagctctggcacaaagaaaacttaaggcagaggagtcagaggaatctgctgccgaaggaagtgctagcgaagaaacatcagcggaatccgagcaattgacacccgatcatggcgacccacaagaagatgaaatgccagaagccgatatggctacaaattcgcctgttgatgatccatccgacgaggtaccgcagggtggaacgaaatccgactgaaggctgaggggtcccactagccgattgtagatgcatctacttccatcgtttgtgaatagaagtgcagcaaaagtagccctttccaatcatagctgatggcattttcatctccttgcatgactttgcatgtcgcttacgacgctttaaccgaaagtacgcatctgtaagagcaaagccatggccaatggaattaaccactgagagaaatgacgatcttcctctgtaagcacatcactcgcttgcgtcacttacctatacagtaacagtgcaagaggaacgattggaaatttgaaacattgtaaaattttagctgatgtcaacatcattctagatttaattatagtttgaccttcttttcaattgtaacaaaaatttcacactatacatactaccgaaaacacatttttaagcattacttttctacaaaagcatatagagagtagactgatttgttattcttttgctgagagatttcacccgagttgcagagaggcaaagtggattataataatcattttagctacataattaagacaagcatttaaacgataaaaatgatgattttagacaaagcgtttggactcgacattaaagtcagaaatttgaattggtgaagcgtagacagaattggtaggaaatgcatgatttaatttatcgaagaaaaacaatgcataacatgagtgttactattaattataactttgttttcgttttataagaaaaaagcaaaaaaatgtcgatggaggtaacaaatataacatattgttattg

SEQ ID NO: 515 - DNA, 2472 bp, Aedes aegypti
atgtcgttctccaacgtcgagaaaaaggaagaacaggaatccatcgaaatggacgagctggaacagttactattggcagcggaatctgaggaaatttcattcgtaaaaatagcaccttctaccagtttgactgctccgaaagacggttcgataagtagctcatcatccagcaagaaacctgcactgaaatcaagttcgatttcgctcagtggctcgactttcctgcaagatgtggaaggacaaagctcgggacctgccaagcaagaaaaatcagccataaaaccttccagcgcggtccatagtggcgatacggactcgtccgatgatgaggaggtccggaacttcctggagaaaaagtacgatgaatatggacgtggtattaatgcattgctcaagcaaaaagaggaggaaagggttgatattcaaatttcgaacttcattgatagagctttgaaaaaggctgacgaagaagtttcgaagctacctaaaacggacactcctaaaacaaaagcagaaaagacgactggagatgttaagcctttccctggggcaatggccgtggattcggcagtgccgattaccaatggtaagataccgaacatattccaaaaaagcgtatataccgatccaatctttggtatacgattagtccatcccctgatttcaagcaatatccttaaggagagaatgcaaggaaggaaaccggttcccatgagtaagattaaatatcacattgaacatgggaacctgaaggaagattgggccgttgctggtgctgttctgagtaagagtcctccaaaaacgacttccaaaggtggccaattttcgatttggaaactaagtgacctccatggggaaattaaaaccataagcttgttcctgttttcgcaagcccacaaagatttgtggaaaacggccgaagggatggtcatcagtattctcaatccgggtgtgttggaacgcaatgaggacagaaatatcgaggccgtgctctcgatcgacaaatccgccaaggtgatgatactgggtcagtcgagggacatgggcacgtgccgaagcaggaagaagaacggagagcgctgtacggccgttgtgaatctggagaagtgcgagtactgcgtgtaccacgtgaagcaggagtacaacaaggcctgcaatcggggtgggctcatttcgtcgacggccggacggggactgaatgagctgcggaataaggtgctagggaagaatgaggtattctacggtggtcaaagcttttcagccgtcaaggccaaaaagaatcccaaacaagttgaaaaagataaccaccgcatgatgaccctatccgactactatcagtctccgttccagggcagcagtggtcagtcgcaatcaagttcatcagttccatcctatcggcaacaaccaaatgcaaaacccgtccaaattaaatcatcggcagctagactggaactggacattaaacagcgccaaaaagatatggaacgtttgaagcaactaggactaggtagtactgaaggatctttatcgataacaaatgtctcgaaagaagtaactgttgctcaaaagattactcaatcgaataatactccaacttcgtctcctcgtccttcagttctcaatggttttgaaaacagatcatttagcttagaatctaaaccagcacctagactgagcactggtaattttgtcatagacatgtcagtctccccaaagcatgcagttcattctcgccagaaagccatcgatattctgaaaaagaaaccattagaaaagtccaatccaaatttcatcaaatatcgaggcacggaaacaggaaagaagcgcgccttagaagagattcaaatgaaagatgaaacagaaaacgacaatctctcgaaaaagcagaagctagataaagaggatcaggcacgcaaggatcgcctcaaggcgatcatggaagcgacctcgtcacacacagacctgatcaaagctcatgaggacgaagagcaggaaaagtacttcaaggatctggaacggaaggaagcgatggaggagaagatgatgaacaccttcaaggtggaatgcaaggctgtgatatgtgtgcagtgcaaatacatagccttctcggcggccgaccgttgcaaggaggaacggcacgagctcaaagttcgcgatgccgagaaacggttcttcaagtgtgctgactgtggcaataggacggtttcgttacaccgtttgcccaaaactacctgcaagaactgccaaagctcgcggtgggagcgctgtgcaatgatgcgtgataagaaaggaccgaatatcggaacggcgttgtcgattcggggcgatgaggagaagtttttgggaagctgcgcgaatagtgccagtttgaatttgttagttccagatgaaaattaatatatacgttggaaggtaagtcgtcataaaaaatacctcttcaagatattgttcaataaatttttttgcttatac

SEQ ID NO: 516 - DNA, 864 bp, Aedes aegypti
atggcctatgtagtggctcccaatattgaacccttccgcaagggtcaaacttttgcaacttggatccgtcgtttaacctatcatttccgtgtgaacaaggttcaggataacgataaaaaggatcaaatgttcttgttgggcggtgattacctgttcagcgaggcagaaaaactttatccgacggaggcactgttggatgaagtgtcctatgaggtgctagttcaaaagcttagggagcgtttagacagaaccgattctgtattgcttcaacggtaccattttagttcgaaattacaacaggccggtgagtcggcaagcgattttattttttcccttaaactacaagctgagcattgcgagtttggggaccagaagaacaggttgattttggaccgtcttctggttggtttgtccgatactaagctaaagcatcgcctcctcactgaggacagtgccaagttaacgctagaacaggcggaaaagatcattgcgacatgggaaatggcggcgacccatacaaaagccttggcaaacaatgaggatgttggcttgatcatggttggaaacgaggcgacgactaccgctcatccaacccaaatccggctcgttaaggacggaagtggttcgggtcagccaaaacggtcgatggtagtggtcgataatggtcggtcgatgctgactaccgctgagcccggaggaacggccgtaaacgatgacgatgtccggcaactaccggatcgaagcagcccgagaacggtcgctcaacccggagagagaatcgtggaggaacccgatgtccggcaaataccggatctgagtgttaacgaagaaagaagaaaaacgcacatgataccccagatctag

SEQ ID NO: 517 - DNA, 1875 bp, Aedes aegypti
gttatcaatcccgcggtttaccgatctcgttagaatcatgtcccatttccacctacaactgttcgcctttcggctcaatgagattatcgatgactatctccagcgagtcaactggatctacgagggcgccgtcccggagatcgatcacctgttggaggcgatcgattccacctgttcgaagcagcatgtgtccagcccgcaatcgctggtattcggagatattcagtcctgtcgggacattgtgcggttttttgaaccgatccagtgctgtgggaaaagcctcttgaacagcgacacgctgatggtgcacttgatgcatcacgccgccgatgaacgggaagaactggacagtggcactaagcgcacggccattctcttcaacttgttcgtccaacttggcacgggtattcttgaccgctacgacaacaactacgaccagattgagcaatacaccgctcaactgctgcgcaaggcatccgaatacctaagctgcattctgggcaagccgatccgaggagatgcccaggctgcggtcaccttcatcgagaatgtcacctttgccaagtggaagtacgtgttcgactacacgtgcatcccgtgtaccaacaggggaatcgacaactgccgctacgaggatgcaatcgcatggtacaaaatccacctcaacacgatggggtccaacccgattcgccacctgggcaccaagatgcatggagtaagccttcgggattgtttgggggatcgcgttgttgcaccaactccttcggtgattcgggaggttcgaccaagtccccagctctccacggctaccaagtacctcatggaggtccgtgaaagcgagctggacaagctttgcacgatcggaacggcagttcaacggaacacgccttaccaagccgtcagagcttatcttcaggcgaaactaggatctattctcaagaggagcaccatcgaaccattcggctcgcgagtaactgcagtagccaatcagaattcggatcttgatctggccatcaaagtggatcctagcatgcaaccgaaaactgcctaccaaaaagttcttgcatgggccagagcaaacgatcaggaagtgaatgtagaacgtcagatccctgacggacctttggttcttcgcttgcagattcattccctgcaattgatcgtggaccttacgttcaacagcccatacgtggttggtaatgcaaagatcattgactacttctaccgacttcaaccgatggcccgcaaactattcttcttgctcaaggaatggaagaagcgaactgatatcggcaagaacttccaccacaatgtcctaacttccatgatcgtattctacatgcaaacggaacagtatcttcccccaatcactccgctgatcaacggtccccaaaaggtcaacgccttatacaacacggaattcgttgagctcatcaccctgtatcgacttccgaacagctttctggccctcgtaaaagacttcttcacctattggtctcgcttcgattgggcccgtaccggtgcatcggtcaaggacgccagagtccgacccagaagcaccttccacaatgtgcgcaacccgacccagccgatgatgataacggattatttcgacgttactcgcaacgtggccggaaatgtcgccccaggggactgcgagaagtttgtccgggcctgcaaagaggcagcaggcgctctgaaggccaaacagaccatctgaagcatcgtatcaggttcttagttgacgaaatagctcgtagcatctattccgaaggcgcgaatagaaatcatttgaattcttgaaatgtgcttataccttgaattatagaaacttcaataaaggacaaatagttgtatgataaaatactgacgttt

SEQ ID NO: 518 - DNA, 1343 bp, Aedes aegypti
gcagttcacgtggtcgattccttgatttctccggcatattgtcctccggtaaggacttagcaacaaagtttagcagtgctcgtaacaatgttcaacgatccggaaagcagtgacgtggaaccggatttcacttatccgaaggatacaaagccggttcatgagtcagcagcaaatcagtccatgcaagtggagcaacaagttagtaaagatgttcggctgggatggcgatacgcggaggaagacctggtccctgtgcagaaagatccgtcctgtgatcaaaactggccactggcagcgtactggccggtctacgtcggtaacttcaaagtggaacagtggaaggatgaacccttgtacgatcaggtttccaactatttcgcttactacggattgctgaccagaatgattttcttcaaccgggatcagacttcggagtatttttcgaagtaccgaaggaattgcgaactgctggacatgttggtgtattttacctcccgggaagatgccgagcgggcaattgaaatttgtcaccacgattcatactacggatacaacatcaatgttctaccgggacgagctgcggaattcttcgataactccagaagcgtacgattcgttgaactaccttaccactatccggtcgagtggctcatggagaaccatttctcagaacagggaccggtttcgttcgtgggcagatacccggacaacgacgtcatcgtggaatttggaaccattgaagcaatggtagccgggattggcagccaaatgaaatggaaaccggttccactaagggagcaaaccatgaagcagcgattcctggaagcagacgtaactatggccatcgagtgggcaatgcattcgaatccagccttcatggaacaaaaacctacagccgatgtgttgcaacggcttttcgaaggtgcccgaccaaatgtgtccaccgcgtggcaaggtcacgccaagtttgccagggcaccgctcttccggaagaatcgcgccaagcaaagacgtcggaccaaatatatgatggagaagcgccgcaacgaggcgaagaaaccgaaaacggaaatcgtgtcccgagatacgccgcgagtaccctcggggcgaaaaagcaaacgggaaaaggaagcggacaacattgtggcgattaatcggatgctgcgccactatggagcagaaccggtttgcaagagcatgtttcgataggctcatttacggaggtgaattgattttctgttttattttttactttcagtagactgaaaatgtaatcgaattataacaatgaactgcaatgtaagtcgagcattttactgaattattactaaactagcttacgc

SEQ ID NO: 519 - DNA, 1929 bp, Aedes aegypti
atgaccagcagatcaaaactacaaactacaactcaaaagactccaaagcgtcgcgatagtaaagcacaaattttgctcgatagactatccaattcctttatccgtggccatgtgcaaagcagccatcatggatcagaggacagcaaaagctcaaagcatgaaacgaaagccaattccaagtctgatcgccatatagaatattttgaaacgtccactccaaatcggacaacacgacgcaagtcgcagagactcagcagttctcacgaggtgaaagaagagtccaaatcaagccaatcgaagacaatttatccggttagtgccgatcctgttgacgagaaggtgcatggcaagacgagaaaggagtccctgaaggatctttttggaacggacgatgaaaactcgttgtttggatcgccggataagatttcggcgaagcgtcgtcattctgcaacgcgggacaaatctgatgatcgtaagaaacagaaagtggattcggccgctcacgaggaaagggctttcaaggatattgttagcactaaacgacgatccaagtcgaaaacgcgtgacaaaatcggtgtgcctgcggaaggttttcccaagaaagaaaagagtaattctgaattgaatgtaccgattgtagtggattcttcctcggaagaagctcccatgccttctgtacagcttgttcaacctattcacaagaaagcagcaaagaaaacgcgtacagaaaaatgtcaaacttctgaactggaagcaaccgtaaaaacgatacctgaagtgaatgataaagccccaagagctacatcaaagagatcttcgaaagaaataataatagatctgtctgcagaagaagaactcccgaagaatactacaattcagaaacccgttgctgaaagtattaatgcagaaaactcgccggtgccagatttgaccgataaatcgaaacatttccctacggatcaacgtgtttgtggagatcagtcttccttgcagaacccaacaccgatggatgtttcttcgtccagttttcgactgcaacctgacgaaccaaatgcgctacttgaagaatcgtttacagacgttcacgtcatagaaaatataaaatcaactctgtccaacgaatcatcccaggaaattcagccagacaagaagcttgttgaaagccaccaacccacaaaagaaacaccagaaatttatgaagaatcgtctagagcacaattgcaaacaatcgaacaagaacaagatgaatcccaacgttcattgattacctcgaggagagttgagactggtgtaacagaagtccaagagttacaagaagggttgccatttgattattcgaaccaacgatctgacacgcagatcatcgaagaacgacctgctctgagtccttctcagctacaggcagcaccaatagcctccacggaacagcatcaacatgaccaacagaatgttctttctgagggttctctagagattgaaactaatgtcgctgccaaggttgcagcagaaggtccagaagatttgtcaagcaaatctccccaaatcgatcgccaagagccgaaagcttccaaagatcaacaaatcgtggacgtgccttcgtacgaatcagaacgtagcagcacagtcactgaatgtatggatgttcccgcttgtccaccgaatgaattggagcacgttactcaagcaagtctaccagaaacccatcaggttgctccacctccagaaaaggtcacgacaagtgatccatctgagtcccaacagcgccaaaccccgcaggttatcgtctactccaacaaatatggcgaatatcgaatcgaggacaataacgaatctgaaattaccatctatgtgacacgcaagaagaggcgaagccgaaaatcgttaccagcaagtacggaggttagcagttcaagcattgtggtggaatga

SEQ ID NO: 520 - DNA, 2311 bp, Aedes aegypti
agtacaccagtggataagaccatccttgaaagcgcgcaaaagtgaatttgtttacgtttgtgttccggttgcacatcgggagcatctaaaccatttcagcggcatttccggcaattttacctcacgaacgataattatcgttcacgatggattctaccatatcagtatcgaagggagtcttcgtgttcaagaacggcgcaaccaaagcgaaaacccgtcgccaaccgcagaaatgtcgcagcataccgaacagggccatcacggacacggtctggtacggaagctaccggaaaatgtggaccaagattcgcgaccagctggagcagcttcagtcgtgcagctatggtaaaattttggacgatttgctgaagtttgtcgagggctgctaccggagtttggagtatgagggcgttttgccgaccgcggctctgctcaccggaatcaatcaaatcgatcatatggcccagttcgaaacgctggccgggaatataaggaacaacacgttgtccttggtggtgttgctccagtcccgggattgtcccagcatgaaggcagccgtggagacactggtggccggatttgtggaggaaagtcgtacctcggagcaggatgatagcgacagtcgaagattgcggaggaaccagttgaacttgggagtgttgcgagcatggtacctggagaagcatcaacacctggatgagaaaccgaatctgacggtcatcgtgccggactttgaggtattcagtccggaggtcctgcaggacttgctgctggtgctgaattcctatgcagcggaattgccattcgtgctggttttcggagttgccacctcagttgccacgattcacagcgtgctaccctaccacgtgaccagcaagatcaagcttagcatattccagtcggaaccgtccgttgccaatttgaacaaggttttggagagcgttttgttgacgccgtactgtccgttccatttgtccggtaatatgttcaagctgctgacggacatatttctgttttatgatttttctgtgaagggatttgtcgagggatttaagtatgcccttttggaacacttctgccgtggcccgatatacgcgctatgcagtgccactagtgaccgagatgagctagaagaaattgtggaccaattgagcgcggccgatttggaaagcattcgccagttgcaatcgtttagaccgctgattgaatcgctgaacaatccccaagaagcaatagattttctaacaaaagacgactacttacgccggatgctgccatcgattttgatcgacgtgcacaacttttggttcaactttcactgtgcgatggagatgttgctagttttggttcacgatttacccaaagctcctcttgggaagcagctgagagagttatactgccactgtatctcatcagatgtgactcaaactgatgaattccggcagtgcatgcaaatggtgtcgttcatgtccaaagaagagctcctagctaagacgttgaaggtcatggaggtttgtattggttatgtcgacaggaacgatgaggcctccgatcaaggagtaacgatttttgaagtgcaaacgttggaaaagatcatcaatgatttggaacgattctcaacagaaatcgccgccgccagtatggagcgagtaactgttatctcatcggatgccaatttgatttcttcgcccaagatgagtcgacaggagttgaatcaaaagctactgagtgcggctcgtcagccgaagacggaatccccgtttatgcaatccgttagtaacttagtctcctatttaacccacgatgtgttccgaaagcaccttcggccatccagtaagactactcctttgattgagctgttcgtgttcagtgattcggctacgattcggcagcacatggtcggagtgccacgtgctgcagttcacacggcgctcaacaatccacactactatctgcagtgcgaatgctgcgagatggatgaagacggcagtctggttcagacacttccggacctttcggtggcttacaaactgcatctggagtgcggacgaatgattaacctgttcgactggctgcaggcgtttcgtacggtagtggacgaagtcggatccgatgacgagcaggagcaacaggttgatcccaagattcaagcacggtttacgagggctgtggctgagttgcagtttctgggcttcataaaatcgtcaaagcgaaagactgatcatgtcgctcggttaacgtggtaacttctataatattttagtgttttgtatggtttcgatagtgaataaagttttgtaatgtatttgaa

SEQ ID NO: 521 - DNA, 1651 bp, Aedes aegypti
gatgatatggctgctggacagacaccacacaacgtgctactgcttgctcatgacgatttggtggacaaggttcaaccgggagatcgagttacggtaaccggcgtgtacaaggcaatgccaattcaggaaaatccacgccagcgtaacgtaaaatcagtgtacaagacgcatatcgatgttttgcacttccgtaaggtggacgacaaacgattgtacgaacaggaggaaggtaaagagcacatgttccctccagagagagtggaactgctgaaaaagttatctcaaaaaccggatgtgtatgatcgcttggttaggacgattgctccttccatttatgaaaacaccgaaattaagaaaggtatactgctgcagctgttcggcggttcgaagaaaaagcaggccacttccggtcgacagaacttccgtgcggaaattcacatcttgctctgtggagatcccggtacatccaaatctcaactattgcagtacgtctatcacttggttccgagagcccagtacacatctggaaaaggttcgtcagcagtgggtcttacagcatatgttacaaaggatccagaaacgcgacaacttgttctgcaaacaggtgctttggtgttggccgacaatggcgtgtgctgcatcgatgagttcgacaagatgaatgacaccaccagaagtgtgttgcacgaagtaatggaacaacagacgctcagtattgcaaaggctggcattatttgtcagttgaacgctcgcacttcaattctggctgcggctaatccaatcgaatcgcagtggaacatgaacaaaaccgttattgagaacgtccagcttccgcccaccttgatgtctagattcgacttgaccttcataatggtagatcccaagaacgaacagttcgatcgacggctcgctgcacatttggtctcactgtactacgcaaaccgtgaaaatgatgaggatacacttttcgatatgagtgtcttaagggactacatcgcctatgctaaagagcacatcaaccctgtgctgtcagaggaggcgcagcagcgtctaattcacgcatatgtcgacatgcgcaagcacggaagtggtcgtggccaaattacggcctacccaagacagttggaaagtttaatccgattggcggaagctcatgctaaggtccgcttcagccagactgtcgatgtagtggacgtggaagaagcctattcactgcatcgcgaggctttgaaacagtccgctaccgatccgctgactggaaagatagacgttggtattctgacgaccggtttatctaccgcatcaaggaaaaaacgtgccgagttagttgccagcatcaagcagagcctggcaacgaagggcaaaatcttgacactgccgtatcaaaaattgtttggcgaaatcaaagaggggtctcaagtgttggtcacaaaagaacaattcgaggacgctcttaagcaactgcaagatgagggcgttatcgtcattgtgggcaacaacaccatcaggatatgttaatatgcagtgagtaacattgctatgcggtacctttcttctttttagtaatcagcatacttaaggttagtagtaagttgtttttattatcattaactatacaaaatacatttacataatttgatagtataaatgc

SEQ ID NO: 522 - DNA, 3752 bp, Aedes aegypti
agaatctggcaaacaaaaagccgaacgagacgacgaaacgtcacctgctctggcaaagtgtacgcagaaaatcgtacgagtgttgtgccgtgcaagcgaaatttgtgaatattttgttcgcccagcgagacgattgtgaaatcggtacttctacggacaaagtctgaaccgcctggcccttggcgcgtatcggttagatggctacctcaatcaccagttacgattacgagtgtacgcgcaagtgccacctgccgcaccacggaaatgcaattacggcggccctgacaaagaagtccgtctctgatgaacttctggcggcgtacgtggccaagatctgtcggaattttgccgaaatagtggacgatcagggaagaagtggccttcatttggcggcatcggtgggacggtttgccatcgccgaatggttgctcaacaatggggccagtattgcgctcaaggatggcgagtccggccacacagccctccaccgggcaatgtactacggctgtgtgggggtggccgtgctgttactcaaacacggagccatcattgacgttccggatgaggactttgtcaatccgctgcagctttgcagtaacatcccaaagcataaggacagtggtatcggtaatgaaatagtagtctggggaaagaacaaaaactacaacctcggaattggaaatgtcgaaggtagagacacgccagattgcatcgattacttccggaagcatcgtatccccatcgcgaagatgtcgatcaacgcctatcacagtgtgtttttgacaaaggatggggatgtgtacgccacaggacatggccgagggggacggttagggaacggagccgagaatacggtggcgttcccaatccggatagccgttcacacgagaagcgccgaggagcggatagtcgacgttagcaccggaaggcatcacacgctgctgctgtccgatcacaactgtatttactcctgcggagagaacaaccactgccagttaggaattaagccacccccggagaagcaattgacattcaaagagattggcgggttgcacaattttgcagataagcgaatcaaccgaataatagccaaagactaccactcgatagcgatctgcgaggcggacgtgttcgtgtggggtcaaaacgggggccaatttggcatgaagaaggaagtgaacccgggcaaggacaaactggcagttgccaacgtggacaccacaatcaagctagtcgaatcgagcaatgcagcaattgtagtttacaccaagtctagttatttgtacatatttaataattttaagcgaaagacatacaagaaccccctgatggagaagtttgagtgcatttccgtgtccggtggggagttcgtcacgaaaaaggaagaccttccgaagcatacaaaacaactgaggattttggccttcacggtttcaagaaacatctacatttggtatgaagactgtcagcagtttgtgcgatgtgtatttgcccagtccaggaatttggaaattgagaggatcctttggtgcaacaacaacgccctggtgctgctgctgggaaatttgtactacggaaccataacgcacaaactgaacgcgcatgcagttactcaaatcagtgagtacacggagacgtacgcgaaaaaggagatgagcaccaccaccaagacgagaatcgagctgaagcgtataaagaatttgaacaatgtgactgattttgtgtgcgacgatgatggggagaattttgcagcactgctggaaaatactcgtcgctgcttccagatgccaaagctgctggaatccaactacgacttcggcaaccttctagccgaagcacacgaaatggacggcgttcacgatttaaccttcttggtggactaccaatccttcccggtgcacagattcatcatctaccaccggtgtcgccatttgcgaaagttggccgaaaaacaacccaccgagaaggaaatccacctcaagggatacgaaggtctgacggcatccattttcgaacttgcgctccggtatatctacacgaatgaagtgctagcgaagggggacgtagaaaagttggttgggcaattacatccaggcggaacagtggaagagatggtcacgcggttgcgaaaggtgttcaagcagctagagataggggcactgaatgagtcgttgaagaagttcgttcaagtattctatgatccttgcttagggaacttcccaaaactatcgcgtgattcctatccggatcttcgggacgtaaccattcgattgcaggacaatcaggagatcaaagcccataaatgtattctgatggcccgactcgagtacttcaatatgatgttcagccacacgtggacagaaagtaaaaccgtaaatctgactactattccgttggagtacatggaaccgattgtagatttcatgtacaacaacgactatcagaagattcgcgaccaaaagtattctgaaaatttcctcttcaacatggtggtaatttgcgatcagttctttatcaatgaattgaaatctctattcgaagccacaatcgccgatcggatcaatctgaaaaacgttggtgagctactcgagtacgccttccagtataactgcgatgtgctgaaggatctctgcatgcaattcatcagcgtgaaccttgccaaagttttggaaatgcgatcactggacaatctggaacctcccgttctggcagagattgacaggttttacaaggaattctatcaacttgccgcttaccggaccatcaccccatcggcggatgccatttcggatgaagatatggcattgtttgttggagattttaacgtagatctgaacgccaaggtgaacgaggccccaacgaaaggcaaaacccctaaagggaaaataacacccaagagtacaaagatgcaacaagagaaaaggagctacgaaaaagaagccatgagttatattagggatttatcatttgaagaaattcctatttcgaaaccggaagataagaaagccactaatgtaacgaatggtcacgaacccgcggtggaaaaagaagtcaaaagttggcataaagttgtagacaagaaagatcctagaaaaaagtctctacccgcagcattaaaagcaaacgaaattgttaaatatgagtccaaagtaacagaaaattactctaatcttcgggctctccttgagaaaggcacttcacccgacaaagacctgctatctccggcgactccagataggaaagacgaaggctacgactctggctatagcagcactcgacccaaactgtcgcaaaaacaacgcaagcgcctctcttctacctcggagaaacctaaagaactgatttcggtcgcatcaccggaaataacccctgccaacccatggaaaaacctcaacaattccgcggccgatatcaacggcagctacgaacccacatcgtctctgacgaacgtccatgtccaaccgagtagcatcccgacgatatcctcccccaaggtaaccaccgcggagagcaaaccgatcaaagcccagaaggaattcagcaaaatcctcgatgacgaacgcaaacagaagcaatactacgagaaaatcaagtccaaatcgttggtgcacacgcagatcgaagaacgggccatcgaggaactgcggcagttctacaacgtggacagtgtgttcgatgagaacattaccgtcgagaggtatcggcccaggtccgatacggcagttaattttgccgtttggcagtatcagtag

SEQ ID NO: 523 - DNA, 1473 bp, Aedes aegypti
atccacccgccgccggtgtgcttgtttgcaaattccgcgtaaaatacactgtcttatcaaaactttaaaggctctcgaaactatttagggacagaaatgaagctcggaactaaggaagaccccacaaataacccagcagcggacgcatccgacgacgaggaggaagaggacctgcacgacacttccagcataggaagcacttgcaccgataacacttccaacggaagcgagagtcatccgaaccggaagaaacggaggcgccccaagaagaaaccaccaaaggtgacccgtcctttgttcaagtttgcgtgttacgtgaaggaagatcacggccagcccctgttcgggtgccagttcaatcataatctgaagaagggggagcttccggtgtttgccgccgttggaagcaatcgcgtgacgatctatcagtgcttggaaaacggaaatctcaaactgttgcagtgctactccgatccggacgttgacgagatattctacacctgtgcgtggtcccatgagagtgaaacgggacgcccaattttggccgcagctgggctgcgaggagttattcgtgttttcagtcccgctacgttgaacacggctaagcactacattggccacggacatgccatcaacgaggtgaagttccatcccaaggaatactatctgctgctgtcggccagcaaggaccattcgctgcggctgtggaataccaagactgatgtttgcatagcggttttcggaggggtggaaggccatcgagatgaggtgttgagtgcggatttcgatatcctgggatcgcggattatgtcctgcggaatggatcactcgttgaagatgtggcgtttggatactgataccatgaaagacgccattcgaggaagttacacgttcaatgtttcgaaggcggtttatcggtttcccacggtcaacgagcattttccggtcttttcgacgagagatatccaccgaaactatgtggactgcgtcagatggatgggggattacattttgtccaagtcgtgcgagaacaccatcgtctgttggaaggcaggcaagatcgatgacgtggaaatcaagaacaatgacaccacgaccacggtcctgagtactctggagtataaggagtgcgatatttggttcattcgtttttcgttagactactggcaaaagtatttggcgctgggaaaccaaaacggcaagacctacctctgggagctggatacggatgatcccgttcatcccagatgcagccagctgtatcatcccaagtgcacaaccgccatacggcagacctcgttctccaggaacggcgatgtactgatctgcgtctgtgacgatgggaccgtttggcgctgggacagaacctcgtagactttgggcggcctgaggggatacttttgctatttttccattcacctgtgtgtgtatttatttttaagagtcgattattaatacaattgtaaaattaat

SEQ ID NO: 524 - DNA, 717 bp, Aedes aegypti
gtacttttcagtgctactaaaccaacggcatcatccaacgatgagggttcctgccattcctttgccggaggccatgtctacccccaggaagacgtccgatcggcggaccataagctccagtggaccaaagccgtgatatcccgtccggctccgaatttcgaagcgaccgccgtggtggagggagccttcaagaagatcaagctgtccgactaccggggcaagtatctggtgttcttcttctacccgctggactttaccttcgtgtgccccacggaaatccttgccttctcggaccgggtcaaggagttcaagaagctgaacgccgaagtcattgccgccagcatcgattcgcacttcacccatctggcgtggatcaataccccgcggaaggaaggcggtctgggcaagatcaacattccactggtgagcgacattacgcacagcatcgccaaggactacggagtgtacctggatgacctgggtcatacgctgagaggactcttcatcatcgatgaccgcggcattttgcgacagattaccatgaatgacctgcccgttggacgttcggttgacgaaacccttcgattggtgcaagctttccagtatacggacaagcacggagaggtgtgtccagccggatggaaacctggccaggatacgattgtgccaaacccggaggaaaagatgaagtacttcgagaagaaccataaatactag

SEQ ID NO: 525 - DNA, 2943 bp, Aedes aegypti
ccattgggacagttcatatctacctacggctaacggttgccgcatagctccaaggcttttcgagcgctccagacgagtgtaccacggattaagacagtgaaagcttatttattgcccaattgttacgtttaataatttgattgacaataaagtgtacttacgggagtccaatggaccaaggtgtcgcttggagattacttgccgatatgttgtgatttatgatgatcctgtaaactggaaaacaaattgtgctagaagaacaatgatggtgaagatggaaagtgaattatagtaattattagaaaacgttgtagctgattggattaacctgaagtgacgaattattagtgataaaccgtgagaaaatctgaatcgatcaaaaatggtgtcctactacaatcactttgctatgtacccgaagaaccatagcggcaatctgccgtattctgcatcagcgggatggtatccgggaaactaccagcatcaaccgccgcatccgcagttcatcggcgacggagagtcctccccccagcccatgtattacccacatccccacgtattccaccagtccagtccggactggagcgggcacgaaaatttctccacgccgccccaaacgacgctgcttccccatggggcaagttccggaggtctgcatctgggacaaacgacaccgggcgccaacaacaacaataacaacaacgccggtgaacactgtcccgatgccctgcacagcataccgtcgccgccgattaccgtttccggtagcgatatgtccagcccgggagccccgaacggatcgtcctcgccgcagattgcctcccgaccgacgccggtgaaaagccccttcgagtggatgaagaagcagtcgtaccagtcacagcccaatccagggaaaacccgcacaaaggacaaataccgggtcgtgtacaccgaccagcagcggctcgagctggaaaaagagttccactacacccggtacatcaccattcggcgaaagtccgagctagcccaatcgctgcagctgtccgagcggcaggtcaagatctggttccagaatcgtcgcgccaaggaccgcaagcagaagaagaaggccgaaaacggtccggtgtcgctgaacggccaatccctggtagtggcccactcgcagcacaacggtgcccagtccatgtccagcctactggtggacaccaagccgaaactcgaaccgtcgcttcatctgtcccacttgcaccagatgagcgccatgagcatgggaatgagttccatgggactgcaccatgcccaccacgccctgcacccacatcttggagtgccctcgtctcagcatctaaatcagggccccggcccgcaggttcccccgggctccttaagcataatgtgatgtggttcgttcgagtaacttatttctttggtttatatagattctagcgtgagctagtctcgtaaattatcgatcgtgtagcctcggcttgaacatttatttggtaggaaatgagatgatgcctaattgtagctagaatcgacgggtaaaatgattttctttggatgggttcaataaaagcgcataccctagaagcatttctcatttttgtattatttttcaaagttgcagagctgctaggccatggaaatggatgaaaatgccttattagagtcgaaaacacgcaatcatcaagtcactttgaactagaaaaattttagtcacgaaacagtctgaatatttcattccatccctcgaggagggagcaccgaatgctttttatgaataatttatgaagcaacacgcccggtcccaaattgcgttcatgtgcctagagaatccaccaaacactccaaacatgttttccgctgaaccccatgaataccgttgagttgtagtgaattttagggacagtccaacctcgagattgattccaaaccaaattgtaataacagaacagtgtttgaagttttgatagccccaacaagtgggaagaatataaaaacaactaagtgcaatgtaaaaaatgatatatacttttaataaacctaaatgtagcaaataagaattgttagtttttttttttcataaaggccacgagtttagcgaataagtacgaaacaaagatggtaacaatctttgaatgattaggggagtaaaatctatgtaaaaaggatactgcagcatatgctagctttacactgcgctacttaactagattgattgcctgctaagtattaaacaacgaacgatacctttaaggagtcacagaacggatttaacacaacagacacaaacctaaaattaacgcaacccttcttagcctgcatacacaaaacctctagccagagctatatttctgtaaatatcaaccgcttattcccgttcacctccacattatgtgtacaccctcaaatcagtattatcttattgtttttccattttgcgttttcgctagggcactgtgtgagagccttttcgctatgtctgagtgtagaaatagaggttttaattgttcccgatgacccgtgaacccacgaagaaggtgctaattgttccacggatggcggaatccgaaaggatcaatttgcaatcaaacaagatggagggcaattatgcacctattacactctagaaggcgaaagaagacccgtcgttgtgcttttgttgtgttttgggtaataaaccgggggttttcccacgattattagcaggttggggatttgtttgaacgaacaaaaaaagtgctaaaacgagattatgctacaataagaattgtttttttttatcatttcaaatgttgtaataatttgctcagaaaatcatatgcagtcgttcttaacggtaatttagttagtagcctattatttagattatttccggaattttgtttatctagcgaagaaagaacacttaattattataagtgacactgaaataaaggaatcatgcttaacata

SEQ ID NO: 526 - DNA, 2373 bp, Aedes aegypti
atggcgaagaaagtattgctgctgagcctctactcggcggtgttgtctacgtggttcgggttcggatatgtgcagtgtaaactacccacttcaaggtctgaaattcccaattttgattatacggttgctcaacagccagatcaaagcgacgcatgcgaacaaaatgaagtctgtatggtgtcagtcgagtgcattttggacgccaaaaagaaagccatcttgaagccatgttcaactgtgcccagcgtcgatggagtttgctgcccgtccagcgagtataatggaactagtagccgtgttcagcaaaactctgaagaacatgccgctgatcacttggtactgcaagctattcacgaaggtcgtcgcgagtacgacgagaagcttcgatttgaagatgaacaccgcgcggtaatgactgccaaggagaaaccagaagccatgttccaccgtatgtttcttcccggcggtttgaagacccatggtaaggaagttgtcgatgcggaagagcaagccaatgtttacgggcatgttttcgccagccgaaaatacgccgagttgaccaatatgaccttgaaacagcggcaaggtgataggtttgcgagaattccccgggcaattcggaaacgctgtttgccaccagtaccttgcaacccacactcccgctaccggaccatcgatggttcatgcaacaacccgttgccggaccgcactagttggggtatggagggttatccttttgaccgggttttggagccagcgtatgaagatggcgtgtgggcaccaagaatccattcggtgaccggaaacttgctgcccagtgcccgagtaatctccgtagctcttttcccagatgagtacagaccggatccgcgcttgaacatcttgttcatgcagatggggcagttcatatcgcatgacttcactcttagtcgtggttttacaacgaagcacgggcaagccatcgaatgctgtactccaaattgtacggcaccgctttttggtccgcatcggcattttgcgtgcttcccaattgaagttcctccaaatgatccgttctactcccgcttcggagtccgctgtttgaacctggtccgcattcggctagcgcaaggccctgaatgtcaactaggatatgccaagcaagccgacctggtgacccacttcctcgatgcgtcaactgtttacggttcgactaatgatgtagcagcagaacttcgagcatttcagcagggtagactaaaggactcgtttccgaatggtatagagctgcttccattcgcgagaaatcgtacagcttgtgttccttgggcacgggtatgctacgaaggtggcgacatccggacgaaccagttgcttggcttaaccatggtgcacacgttgttcatgagggaacacaaccgactagctgtgggcttgagtaagatcaaccctcactgggacgatgaacggctataccaagaggcgcgtaggattcttatagcagaataccagaatgttgtgtacaatgagttcttgccgatcttgcttggtcatgagagggtacagcaattaggattagccgatccatttgatacgtacacaaattactatgatccaaatcttcgtccgatgacgcttgctgaggttggggctgctgcccatagatacggacattctctggtggaaggtttcttcaggttccttacccgggaatccccaccggaggacgtattcatcaaggatatcttcaacgatccctccaaaaccctcgagccgaacagcttcgacgtcatgatgttctcgttcaatcagcagccgatggaacaaatggatcgtttcctcacttacggtctaacacggttcctcttcaaggagcgtaaaccattcggatcggatctggcatctctcaacattcaacgaggtcgggactttgccgttcgaccatacaacgactaccgcgaatgggccggattaggtcgaattaccgactttaaccagttaggtgaagtgggtgcactcttggcacaggtttatgagtctcctgacgatgtggatctgtggcccggaggtgtgctggaacctccagcggaaggtgccgtagtgggttcaacatttgttgctctgttgtccgctggctacactcgttacaagcgtgccgatcgatactatttcaccaacggtcctgaggtaaatccgggggccttcactttgcaacaactcggcgagataagacgtacaacgctggccggcataatctgcgccaatgcggatcataaggaagatttctaccaggcccaggaagctttaaggcagtccagcgcagataatgttcccgttccttgcacccgctatgacaccgtgaacttaggtctgtggcgagaggaaggtttttaa

SEQ ID NO: 527 - DNA, 2367 bp, Aedes aegypti
atggcgagggaagttttgctgctgagtctctacttggcggttttgtgtacgtgggtaaatttcggtaatgttcagtgtaagctatcctttgcgagatctgaaattcccaatttgaactacacggtcgttcaacatccggaagaagacgatgggtgcgaacaaaatgaggtctgtatggtgtcagtcgagtgcaccttggacgccgaagtaaaagccaatttgaagccatgttcgacggtccccagcgtcgatggcatttgctgcccgtccagcaaactcaacgaaactagcagccatcaccagaaacgctccattcaacatgccaccgatcgcttgatacaaaatgccattcacgaaggtcgtcgagagtacgacgagaagcttcgccttgaagatgaacatcgcgagcttatgactgccaaggagaaaccggaagacatgttccaccgtatgcttctccccggcggtttgaagaccaaacacgtcctcgatccgcaagaggaagctgatgtttacggacacgttttcgccagccgcaaatacgccgactcgaccaatatgaccttggaggaccgccaacgtgaccggtttccgagggtacctagggcaatacaaaagcgatgtctgcctcccgtaccgtgcaatcctcatcgtcgctacagaactatcaacggatcatgcaacaacccgttgccggaccgcaccagctggggtatggcgggttatccgtttgaccgagttctgtatccagcttacgaagatggcgtgtgggctccaagaattcattcagtgaccggaaacctgctgcccagtgctcgagtgatctccgtagcacttttcccggatgcgtatagaccggatccaagattgaacatcttgttcatgcaaatgggccagttcgtatcccatgacttcactcttagccgtagttttacaacgaaacatggtcgtcccatcgagtgctgcacacataattgcacggcacctctgtttggatcgcatcgacactttgcgtgcttcccaatcgaagttcctccaaacgatccgttctactcccggttcggagtccgctgtttgaacttggtccgcattcggctagctcatggacccaaatgtcatctggggtatgccaagcaagccgacctggtgactcatttcctcgatgcgtccactgtctatggttcgactgatgatgtagctgcagaacttcgagctttccatcagggtagactacgtgactcgttcccgaatggaattgaattgcttccattcacaagacatcgtgaaaggtgtgttccatgggctcgggtatgctacgaagctggcgacatccgggtaaaccagctacttgccctgactatggtgcatacgttgtttatgagggaacacaaccgactagcatctggcttaagccaggtgaacccccactgggacgatgaacggctgtaccaagaagcgcgtagaatcctcattgccgaataccagaacgttatcttcaacgagttcttaccaatcttgcttggtcgcgagagggtacagcaattgggcttggtcgatccatttgatacgtacaccaactactacgacccgaatctacgcccgatgacgtttgctgaagttgcagcagcagctcaccggtacggacattctctggtggaaggtttcttcagattgcttttccgcgacgaaccaccgaaggacgtattcatcaaggatatcttcaacgacccctcactgaccctcattccgaacagctttgacatcatgatgttctcgttcggtcagcagccaatggaacaaatggatcattttatcacaactggtcttacgagattcctcttcaaggagcgcaaaccgtttggatcggatctggcatctatcaatatccagcgaggtcgtgactttgccctgcgaccatacaacgattaccgcgaatgggccggactgggtcggataaccgattttagccagttaggtgaaatgggtgctcttctggcgcgagtttatgagtctcccgacgatgttgatctatggccaggtggtgtgctggaatctccaacggatggtgccgtcataggaccaacattcgccgcgctgttaaccgccggatacactcgttacaagcatgccgatcggtactatttcaccaacggtcccgaggtaaatccgggtgccttcactttgcaacaactgggcgagataaggcgtacaacgctggccgctataatctgcgcaaacgtggacaataaggaagacttttaccaagccccggaagcttttatgcaatccagcaaggacaatgttcccgttccttgcaccaattatcgcacagtgaatctgggtctgtggcgagaggaaggattttaa

SEQ ID NO: 528 - DNA, 2322 bp, Aedes aegypti
atgagcgtatgtagtgcacggcaaaagaagttggtggtagtggtggggctgtggagggctttgaccttcctgctaggggtggtgcggttgctacaagccgtcccactgttggacaacgattcgtcctccctgtcgcacatagtgaccgaaatggacatggtctcttcgtcagcaatgatgaggttggattcggtattgccgctggacggcaatcacacactgatgctggagccgaacagcaccttgccacaggtgcacgacccgaccgtattgagccactcgaagcgagtctgcaaatgttggaactcgacggatgagtttctggaggaagtccattgccgctgcgagggaagctccataatgcgagttccgcagaagttaaccacaatgcacaagctcacgctggagaaggtcggcatcaagcgactgcgggagaacgccctgtcggtgtatgccaacgagctgcaggatttattttttatctccctgaaggactttcaccacatcgaggcccgggcgtttgccaagctgcggaacctgcggacactatacatagcacatgcacccaagctgcagtttctggagtcgaacgttttcgagggaatttccactaagctgaagacattgcgcatcattcattgcggactgctggcggtaccggacatgcgaatgctctcagttcacataattttacacatggtagatttagacggtaatcagatccaggagatccacgagagagccattcaaatcaagactgatgaattaattttagataataatgcactcaccgacatccatggtgccgctttcttcggttcacaggtagctaaactcagtctgaagctcaacttcaaactgaaacacatccacccatccgccttcgttggaatgcgaaacatcagagagttggacctatccggaacggcattggaagccatgccgactgaaggcctcagcgagctggaggttctgcggattcagaacacccactcgctgaagaccatcccgtcggtgtataatttcaagaacctgcaaacggcgtacctgacgcattcgttccactgttgtgcgttccaatacccggcccgacatgacccggacggccacgaacaagccctgcgacgattccatgaagtccagaaaaagtgcatcgctaaaggttattccacaccgaacgtgaaacaacaagacggtccagcagcggccggttctggagcagacccggacgccagtcttgcgaagagcgaactgggcgaaagctactttcagcccatcaccggcctgcccatgggaagcatcctgcaagaggacgtatccgatcttggaaccctcgtcgatggaagcgatctgcggaaaccttacgcccacgttgttaagtgctacccgatgccggacgcgctgaatccatgcgaggacgtaatgggatcccactggctgcgtggttccgtctgggttgtggtcctgttggccgtgtttggaaatgttgcggttctggtggtattgttctccaacaggaccgatttaaccgttccgaagtttcttatttgccatctggcctttgccgatctgtgcatggggctgtatctgctgctaattgcatcgattgatgcacattccatgggcgagtacttcaactttgcattcgactggcagtacggtttcggttgcaaggtggctggcttcctaactgtctttgcgagccatctatcgatcttcacgctgaccatcgtcactctggaaagatggttcgccatcacccacgccatctacctgaacaaacgcatcaaactttcggcggccacctatatcatgattgccggttggatctactccgccgtaatggctgccttcccgctgtttggcattagcaactattcatcaacaagcatatgtttgcccatggaagcccgggacacctgggatattgcctaccttctgacggtgctgggaatcaacggattggccttcatcatcatcgtcatctgctacgctcagatctatttttcgctcggcaaggaaactcgccaggctgcccgatcaactcacagcggagaaatgactgtggcgaaaaagatggcacttctggttttcacaaactttgcctgctgggcaccgatagctttcttcggactgacagccattgccggatatccgctgattgatgtgaccaagtctaaaatattgctggtgtttttctatccgctgaactcgtgtgcaaatccatacttgtacgctattctgacgatgcagtaccggaaggacttcttcacgctgctatccaattacggtttgtgtacccaacgtgctcaacaatacaaa

SEQ ID NO: 529 - DNA, 771 bp, Aedes aegypti
gattttggaacacaattttaattattatttcgaactaaatgagtgatgtaacttaagctttacagtactgaaacaatgttttctataataaaaaatagattaaaagttacaactaatgaagtaaactgtttggcacccgcggtgcaaagtaaaccttaccaaactaaaactgagatcatcttccttggcaacgaacggaagtggctgattatgtgttttggaatttggcgtagttcccgattccaaaccgttttgaattgggaccaaaatacgtgaagaaataaaaaccttagaaatgaagttgagtgataattgaaaaagatttaaacctaaaaaaactgaagtattttaacagctgttcccaataaaataatcgataattcgcattactgtattcatgaaaatgtttgactaaaagttttaaaatcgaaagaatgattattcaattgtgaaaagctctaaactgtatgacacaaattataagtgaaaatgttagccttgaattttaaaatagttgcttgatgcaactttttttagttcttgatcctaatatcgacaatacgcattttttcttatcgaagtatatattctaattgattggatactaaactagaataggttaaaataaaagcaggaaaatatctacgttttgatgaaacttttactaaactaatccatttaactgaagtgacgcacattaaaatattgaaataataactttgagcgcttaaaattccatttactcctcatttttctcctaaactatctaaa

SEQ ID NO: 530 - DNA, 2163 bp, Aedes aegypti
gatacttgcgctaaaaatcaagtgtgtgttgccgacgtgaaatgcaaggctgatcttctcgaattgacgccatgttcgactgcagacaatacgatcggcatttgctgttcaacaaacgatccaagcgacaaactgtgggccagcgctgtggaagatggccgccgtgaattcgaggaaaaactcggccatgttgaaaaacaccgacacgaaatgaccgccaaagagaagccggcgtcggtctttcataaactgtttaaaccggagggccttgaaaaagatgcaaccaaaaccgatccaaaggagcgagccgatgtgtatggaagtgtttttgcaagccgaaaatacgccgaaatggccaatttgacgaaagaggaacgtcaagggggccgttttgcacgacatctcgtagcgaggtggccacgacagattgagctcggtctagcgctgtgtgatcccaattctcggtaccgaacctacgatggaacgtgcaataatccgatgccggagcgcgccagttggggatgtgccgagtatccatttgaaaaacttttagcgcctgcctacgaagatggagtgtgggctccgagatcccactcaataaccggtaacctgttgcccagcgctcgcgtcgtttccgccatcttgttcccggatgttgaccgacaggatccgcacttgaactacctcttcatgcaaatgggtcaggtcataacgcacgacatcgctcaaagccagggcgtaacgcttgacaacgctaaggaaatcgactgctgcaccaaggaccgatcgcgagccctctccggagaaaagctacactttggctgtttgccaatcgagatcagtcctaacgatccgttctattcccagttcggagtcagttgcatgaattttgtacgcatcaaactttcatgtggcaccgcatgtctcggttatggcactcaagcgaactctgtaacgcacttcatcgatgcatcgttggtatacggaaacagtgaagctgtggcagcttccctgcggacattccagcaaggtaaactacgatcttcccactcagctggaattgagctgcttccgttgagtcgtaaggcaacagactgcgtaccatgggctcgggtatgcttcgaaacgggagacttccgggtgaatcagctgctagcggtaactcagtttcaaacgatgttcctcagagaacacaaccgccttgcagttggactaagtcacatcaacctccactgggatgacgaaaggcttttccaggaagccagaagagttctaatcgccgtacttcagaacattgtgttcaacgaatatcttcccattctacttggcagcgagaaagctatgcagtttggtttgactgatcccttggaaggttatggctattcgtacagcccggatgtaccaccgataaccctggcggagagtgctgttgcagcgttccggtttgggcattccaccgtcgatggattcttcagactactgcgacatggcacagcagcggaagccgtccccataaaagatctctacttcgatccctcaaaaattcaagaaccgcatagtttcgatagtatgatgtactcttttggccaacaatcgcagcagctggcagacaactccatgtcagctggtctaacccaccacctgttccagagagaaaatccgttcggtttggacttggccgcactcaacattcaacggggccgtgacttcggtttacgtccatacaatgactatcgtgaattggctgggctgcctcggatcaccgatttctacgaactgggtgagatgggctcattgctggcacaggtttacgaatcccccgaggacatagacttatgggtaggcggactccacgaaatgccctcctatggggcggtagttggaccaacctttgcccatctgttagcggaaatgttctaccggcttaagcttggagatcggtactacttcgccaacggaccggaagtgaatccgggagcttttaccctgcgacaactgcgtgaaatacgggcaaccactctggcgggactgatctgtgcaaatgtggataaccggtacgatttctaccaaaccccgaacgcattctttaaggccagttgggaaaatgagccgatgccatgtgtcaactatcggctcttggatctggaagcctggcgggaatga

SEQ ID NO: 531 - DNA, 1740 bp, Aedes aegypti
gcggaattggcaacgagtgcgttcggaagtgcgaccggtgggggcgcgagtggcgatggggggttcggtccgaaattggaagtttcgaaaacgatggacgtgatcgggaacggtggtggtgttggtgatggaagtgattcggtcgggtttggcatcggggacggcggcgcggccacgcaactgttgattgccaactggcaggactgtgtcgttgtgatattattttgcttactgatcgtagtgactgtgatcggcaacacgctcgtgatcctgtcggtgattacaactcggcggctgcggaccgtcaccaactgcttcgtgatgagcctggccgtggccgattggttggtcgggattttcgtgatgcccccggctgtcgcggtccatcttttgggatcgtggccgctcggatggatactgtgtgatatatggatctcattagatgttctactgtgtacggcgtcaatccttagcttatgtgcaattagtatagatagatacctagcggtaacgcaaccgctcaactactctcgccgacggcgctcgaaacggctggccctgctgatgattctggtcgtctgggtactagcactggccatcacctgccctcccattctcggctggtacgaaccgggccggcgggagctcacccagtgccggtacaaccaaaacgagggctacgtcgtcttctcggcgatgggatccttcttcattccgatggccgtcatgatctacgtgtacgtgcggatatcctgcgtggtggcatcccgccacgacaaaatgaccgaaatcgaaaaaagtcaccgaacgcgtgatgccgacgagccgtgctaccactacgcttcggagatggatccggcccagttgagtcccaagcgaaagcgttcctcatcgcagctgtcgacggcaaccacaacctacgtgacacaactggggccaggcgggggcggaggctcatccagctttacggccctcagcggagactgccctggaggagattgccttaagctggggggaggcggcaccagaaagaatcacaagaatggacattacgagcttgtcgacatcaattccatgtccaaaaccacaacttcgttcgtgggcaacggtggaggtacgaacggagctggactcgatgaggaccatatggactcgggtggccagcgagagtcaccgggagctaccggaggcataaaacgcaactccaccatccactacaagctggcctcgacgacggagctttggtcctcggccaataacgttttcaatcaacagcagaaaccacaaacggcaaatcaatcgggcggcttgaggcgtaccaataccattagtaactcaattacgtcgtcgaccgccacggcatcggcctcggcagtggcggccgggcgaaatatccggatccaccagaagtcactttcgtcgcgaattttgtccatgaagcgcgagaacaaaacgacccaaacgctcagcatcgtggtcggaggcttcatcgcgtgttggctgcccttcttcatccattacatcattacgccgttcctgccagaagagctggctgcacccaaactgggggagtttttcacctggctcggctggatcaacagtgccatcaatccgttcatctacgcgttctacagcgtggacttccgggcggccttctggcgcttgacgttgcggcgctttttccgcaacagcgagaaggcaccctttgccaacattcacaacatgtccatgcggagataa

SEQ ID NO: 532 - DNA, 1006 bp, Aedes aegypti
atgtgcggaggatttcattgctccaaaaatgcattgattgcattgaacgtcctttatgtgatggttggcttcctgctgatcggcgtcggagtctatggccgcgcttcgtccattgtgaccaacttgcccatcatcgggggcattctggcctgtggagtgattctgatcctgatctcgattctcggtctggtcggagcggtcaagcatcaccaggtgatgctgttcttttacatgataattctgttcatgctgtttctgattcagttctcgatcgcctgctcctgtctggcggtcaaccagagccagcagcgggagtttgccgagcagggctggtccctggcgccgatcgacatcaagcagcaggtgcaggacgagttcctgtgctgtgggttcaactcgaccgtgaccgacgaccatccgtcctgcgcgattgttaatgccaaatgctgcccggaaggatctccggaatcctgttcctgttcgccgtgcatgcccaaactcgagagcaccattgactacgcgttccgtttatccggtggaatcggactgttcttcagcttcaccgagattattgcagtcttcctgacgcgtcgctatcgcaaccagcaggatccggaccacctgccagctcgggccattttccctcagagtaactacgtctactagttccgtcaggaggagtaggagcatccaaagaagccgagaattagcgcgctagggaattcaattcagggaatatccacaattgatcaattttggctgtaatcagtagatcctgctcgcctagaatcccaaatatcgaatactacacgtgaacactcgaacaggaatactacaatactcaatctcatgtggctcctaggctaggattatcaaagaatcgaagaggaatcgaaagacacgaaagacagcggttgtgctctaattgtaattagttcatttttttttcgcttaagtttttcaactctagactgacaggggaaacagggcgaatttaaaaacagga

SEQ ID NO: 533 - DNA, 1256 bp, Aedes aegypti
tttccgagtcgaaacagcttgtcatcttttgattttaagtagggttaagtaggtcatttttattttactttttactctgggtcagttaattgtgtgcagatctattcattctgggttaaaaaaaatgtgataagcttcgaacaggattgtaatctcgcctcagaaatctcctttgagtatgctaacagtgtcgccctctgtttgtgaaatgctcgcatccgaattgctcacaaatagatggcgctgcttttttttggcaacactcggaaatcttgaaccaaaatcggtatatccttgtatcttctaaatgtagtatacgtatctgaaacaacttttctcaaacctagtactagtaccgtttcgttgaaagtttcttgtgataaatacaatagaacatgcaaaaacagctttaaaccgaatttattttgctcaaacaaaacaacttgaaatgcttactgtgtatgtagagaacttgattttggtttccgtttcgccggaagccctttctttatcgtaaggctttcgattactagactattcccgttagatctaaccttcagtcttctttcgtaaatattttggattaaatagaccttttcaaagctctggtagcaaagtgttctttgcaaatcctcaagcaaaattttcaaaaactcaaacaattaaatttcagtttaccaaaatataaaaaaataaattaattttaggagtttgatttttcgggaatggtcaccaatacgcatcactatttattactgcactattgttccgaaacgatcaaagacatttatatatttacaattcaaaagtgatgcacataaaaataacaaaaaaataaatagataagtgtaagtgctccagttaatcttaatctacagataaaactatgatgaacgtccagttttggtacgttgccatgctctggcgacgatgcattctctaatggcgaccacacaacttttgatattggcactgacaatcgtgagcttgagcaaaattgtagaattgttccaccgcgccaggctccatggcttgacgcgccgtaaagtcatataattggaatcgtttcacggagctttattttcaatggaattcaccaattgaggttagaaattacaaaaaaaaatattctgtcaggaatattcttgcatgcagctgtaattaaacttctaaaatgaaccatgaaaacttgtaattgagtaggctatgaagtgtagtagaagaattatctaattatatggaaattgtgatgtgac

SEQ ID NO: 534 - DNA, 1213 bp, Aedes aegypti
tcgacgattgtaaacaaacgccgcccactttacgtctcacgcacgcacgataaagtgataaagtacctaagtgttttccaccatgtaccaaacgaatctcaatccgatcgcagttctgaacggtaccaaagtgttcccgtcgatatcgcaaccaaaaatcgtgggatgtttcagcgtaggtcccggaagggaattcattcctacgggcgataatctgaagtatctaagtttaccgcgcgacgacgatcggctacgaatcgatctcaacgaaggattcgaaatccgggtgcccaaaccggacagtgccaagcaggagcgcattgatcatctgttgcggtttattgtggggaatttggatcggttacgtgctgaagatgagcctgggcgaggatccaaaccgttgatctgcgactttgtgtgcttccggggtttgctgaggatggtgatgtgcactccgtacgagaggaggaccagttggatcatattggctacctggtacaagggaacgatttacctgtgtgcgaaggatacgccagagaagttgcacgaggaggcacagcaaaccgaacagcagaagcggttctgctactacgggttcaagttcgagcagcacgttcttacggacgacctcgacagccccgcacctgacacaacggcccctgtgcaggaatcggaagaattctgcgccatgttcagcaccaccctcgaaggtaaacgactcctgtacggagcggaaatggatggcattctttccccgaacaagccaatcgacaaggacaacccatcgccagacgttctgaaccggttggaattcgtcgaggtgaaggtgaagcgacgcgaaaccaatcaacggcaggtcgataatttctacaggtttaaaacgcgcaactggtggtgtcagagcttcctggtgaatgtggggaagattttcgttgggttacgagacgatcgaggtattgtggacgaaattcaggagatgagcctgaaggaactggatcgggaatcccggcagcattggtcggcgtcggtttgcgtgaatttcgggtcgcagtttttaagtcaagtcgccgacgttatgcggggagtagactctaaagacacggtctacagatttgagtacgatccaaacagatttagaaatgttttctatagtgtccataatggatatgaggagtcgttccttccggattggtattgcgctgttgttaaatga

SEQ ID NO: 535 - DNA, 1352 bp, Aedes aegypti
agatcttgaaaaatgttaaaagccggcggcttcttggtgcttctaataggggtgctggtggttggttcccaagccgcaactacgcacaagcacacccatcatccatctggtggagcgaaagaacgcatggaggatggaagctacgctcctcgagatgcccatcatatggaaggggacgaacatcattcggaatttgaccacgaagccattttgggtagtgtgaaggaagcggaagaatttgattcgctaactccggaggaatcgaaacgacgattggcattgttggtgctgaagatggatctaaattccgacgggttcatagatcgacacgagctgaaggcatggattctgaggtcattcaaaagtttactcgaagaagaggctgccgatcggtttgaggacatagatcagaataatgacgaagtgattacgtgggaagagtactatgccgatacatatggcatggataacgaagacgaagatgccgaaaagatggaattagatcccaataaggaggaagaacgaaaactgatggctgatgacaaagagatgtttgaggcggctgatagcaataaggatggaaagttagatatgaatgagtttgttcagttcatgtcccccgaggaattcccgcaaatgtttgctgttgtcttgaagcagacattgcgcaataaggacaccaacatggacgggaagattgacttccaggaatacgcggcggaacactctagggatcacgacaaagagtggctgataaccgaaaaagatcggtttgataacgacttcgacaaggacggagacggttatctgaatggcaatgagattttgtcttggattcttcctagcaatgatgaagtggcagaggacgaagttgcccatttgtttgcatccgctgatgaggatcacgacgatcgtttgtcgtacgaagaaatcatcaacaagtacgatatctttgtcgggagcgaagcgacggattacggcgatcatctgcacaacattcatcatttcgaagacgaattgtaaactatctggtcagaaagcatttaactttttactttatataggccctgcgttagtctagtctgtcgacaagtattttaatttcggaacaaaattgccattattgacataaatttaaattcatttacaattttgagtaagttttcggtcaatccaaatatttgcacaaagtggtaacgattcttctgtttaaataataccaaataattatttatttttcgcgggaatctgtagactaatacaactaatactaatttatgcatttattgtcgtatcaactcgaaatcgttttaaagtatttataacaaatggtttagatacaaaataaactg

SEQ ID NO: 536 - DNA, 2198 bp, Aedes aegypti
aatttccattacgaaaagatcctgttttttttacaatgctgcggataaaaacggaaatgttgcttctcatctttaacttcgcgaatgaaaaatctaataacgattccggttttggctaccggtgacaaaacattggaagaacattgcatgtaatgttacttggaaatgggaatattaaagtaaagaaaacaaagtgttgcaaatagaaccttaaattatcttactgtttttctgcggagaggttttgagctaggtaggagatcaaataagtaaaaatttcaaaaagggcatagtgataaaaaccgttaaaaacctctgatttagactttcttcgcaaaatcaagtgaaagtgtccaaagtatgttgattaccttagtcacatttgttcttaacttctaagcagaatcgaagaagcagcggaatttcttcgtttagaattgataatctaaaattccaataagaattttaggtatcaacgctaagctatcaaagtgtcttttcgccaagctgatcgtaaacgtcattgtggtaaaatgttttgaatgctttggcactcaaatagttcgttttttaaataaataaaagcaaatattaagtttacacaatgaaagaggtaatttacattactgataaaattttacaaaaagaaatgttgaaattgggcgccattggaaatcgttccgcagtcgttgatgagctggtcagatcctatgatttactgcaattttgcaaagttataagtcccaagaggggtactttagaggatttgctgtcctttcatagctcagattatgtcgagtgtctcaagcgttataataatgaagacgacatcgaagaggtaacggatgagctacaggaatttggattagcttacgactgtccaatgatagaaaaagtgtatgattttgtttcatccgtagtcggtagtacattgtcagcagtcgacgccatcctggaaggtgcttctatagctatcaactggcatggcggttggcatcacgctcaaagggacaaggccgctgggttttgctatgtaaacgacattgtgattggaatccacaagctacgaactaagtttcaaaaagttctttacttggacctggacgttcatcatggagacggagtggaagacgccttcagcttcagcaaatacgtcatgactgtatcgttccaccagcatgaaccaggatatttcccaggaactggatcagcatcgaatataggatttggagcggggaaaggttacaccgttaatgcaccttactcgagggacatcactggccagatgtttgtgccatatttccaaagtgtcgccacggcagtttacgatgcatttgaaccggacgtctgcatcgttcaatgcggtggggacgttatggtgggagaccctttaggtggaacgaatttgattccagaggattgtatgaagtgtgtcgagttggtgttgagctggaatattccaattgtattcctgggaggaggtggatacaacgtcatcaatacagcaaaatattggacccagctaactgcccttatccttggacagtcaatttccaacgacattccggaaaatcctttcttcccggattttcgccctgatttcacattggatatttaccgaaacaacataagagatagaaacacaacaaatggtttattaaaaaatgcgctgtttattaaagaaaacttggaactttatgtggcgagcacgaaatgacacgtaaattatattaattacattaaagcatcattcagttcagggtttcaatcggatgacaatcaccttgcatttcaaagttcgtctttttggtcttccttttcagcagaatcacttgcgtcggatttcgcttccagcgtttcgtacaaacactggtggtcgtttgctctcagtactcgatcttcgcacaagtacttgatgagcggaatttcttcctgtttattgaaataccacttttcgatcacatcctcaaagttttccaccatcgtttcgcattgcgtcttcatctgcgttatttcagcggacggtttatcccacaattcgtaggggatgcccagatcgaccttgacccccttgttcaccaatccatgcagcgtttggaaggtctgcgacatgcctttggcgaaccgtgtgctgtccttgcgctccttgtggatgttgtactcgaggatccgatcacagacgttctccatcgattcca

SEQ ID NO: 537 - DNA, 1434 bp, Aedes aegypti
atgagcggtgctctgctggcaagacgcatcagcggcattcaacgattcacatcaaggaacatgtcgtcctccagtggtgccctgcgaaccggttccagcccgaggattgccatcgctcagatgcgctccaccaacgacaaggaccacaacttggagcaggtgaaaacgatcatccggaaggccaaagaccagcaagcgagctttgtgttctttccggaatgttgcgactacgtgggaagcaatcgagaggagacgctgaagctgtccgagcccctaactggtcgaacggtggctgagtacaagcagctagccaaggacaacgggctttggctgtcgatgggaggcgtccacgaatcgatagcggaatcggattcaaaatcaaagaccggagatgttcagaacatctacaacactcacattgtgatcgacaacgaggggcagctggtggcccagtaccggaagttgcacatgttcaacgttgtgacgccagagttcaagttccgggaatcagaaacggtgcgctcggggagtgagctggtgcccccgatcgaaactccaatcggacgagtaggattgcaaatttgctacgacgtccggttcgcggaagcaagcactctgcttcggaagcagggagcagaaatccttacatacccctcagccttcgccgtctcaacgggtcgagctcactgggaagttttactccgggcgcgggccatcgagaaccagtgcttcgttatagcggcggcccaaatcggcttccacaacaaaaagcgggaaagctacggacacgccatggtcgtcaatccctggggtgtcatcctggggcaggctagtcagcaggacttggatgtggtcgttgtagatctagactttgataaactggccaacgtgcgccaaaatatgccctgttttgagcatcggagagacgacatttacaatctgtcctaccggaagggaaccgccaagttggagaaatttgatgaaaagtacaattttggcggatacgacattccaaatgatacggttttctactcttcagagctgtgctatgccttcgtcaatatccgttgcgtcgttcctggacacgttctcgtgtcgaccaagcggtgggcagcccggatgccggacctgaccccggcggagatcaacgacttcttccagacggtgtgcaaggtgcagaaggtggccgagagtttgtacggtggatcgtcggccaccgtcacggtccaggatggccccgatgccggacagaccgtgtttcacgtgcactgccacgtgatgccccgtcacaaaggggactttcccgagaacgatcaaatctacggggagctgaacatgcacgacaaggagccggaacggccacgtcgaccgctggaggaaatgcgcgccgaagcggaccggtttcgggaggagtttgcccggatgggactgtga

SEQ ID NO: 538 - DNA, 1151 bp, Aedes aegypti
atgctcccgaagaaaacacaacagctacaagagagcaagtgttcttccagactggtgacaaaattcgtgggcaacaaccacgtaattatttcgggaaatccagcttctcatcatcatgctccggattctgcagcggttgatgagttcaaattccgcaacaacctcaagcggcaagcagagcatgattccggtcctccagccagaatcattcgaaaagttgcagctgagttttcggttggagttaatcaacgcttcaccaataacgcgcagaaaaaggtgatccagcgccatcgtccatctgctcagccaccgccaaatccgggaaatcaagaatttgtgattccggaaaagagtcgagtgacatttgaaggcggactattttatcgaggtgaagtgacagacgacaacggtggaaaggctttcattcgcacggtcaacgacttcttggctgaagaggagaacaaagataaactaattggcgtgcactgtactcatgggttgaatcgaacaggatatttcgtctgtgcatatatgattctagtccagggtctggctcccagagctgctatcaatgcattcaatgacgcccgagctcatacaatggagagagccaactatctgaatcacttacgaagtttaacaccggcaagctacgactcgaaccttccagcacacaatgatcagcaagaagtgatacacgacgctaatcactctcgcgacagaaacagaagagaggccagaagtttcaaccgccatcagtcggataggtatgccggtaactggcgggaccgatctcgagataatggcaattggcgtaatcgttcccgagagaaccgcaatgggttccttctggatggcgctggtgacaactggagagatcgggaagtggtcgatgatcgtcgttacaacagggatgatcggagacaagatcggtcgcgcgacaactacaggagctacggtcgccatgtaaatcatcaggacgcatcgagaagtaacggcgaagaagcgtgttcttcttcaagatatgaacctcatcacaacagatacaaatggtcgcgtaagaccaaaaacgatgcggacaactcgtgaaagtaacaactgtacctgatgttggtatttatctgaataaagcagtaaagttccgttgcaat

SEQ ID NO: 539 - DNA, 612 bp, Aedes aegypti
atgacgaaaccccgatccggtcgagtaaaatcccgtgcaaaacctcagaagaagtccccgtcgccacagaaaaagaactatcccacccacacaattcctcgctccaagctgaacgcggcgataaagttcctggaaaagaaaaccccaccaaaagcgcggaatcccatgacggattcctgcttcaagagcatcctggacaaggtgggtgccacccaatctcggcgagttgatagctacatgaacgacacggccaacgtgctggaagtggcccggaactgtgctctgaggggacgctggtcggatctgatgaagacgttcgccatccagatggagagcattcggcggtacgacctggccgcggcgctgaggaatgccctatttgccatcatagccgacccggccctgaacgatccgtcctttctcgaggcgtatctgtactccaatccgtactgtaccaaccagagcgatttgaagtactgcgtggacaaaatcctcgaagttttccagggcgttaccatccacacgaccaaatggaaaccagccaaggagaatgaaagtgagactgagattgacgaaagcagcggcgattcctcatcatcggatgatgattag

SEQ ID NO: 540 - DNA, 1760 bp, Aedes aegypti
atgctcgattactatcctctcgcaattcgcgccttcaaggacggaatgatggaacgccgccgagggcacatcgtagcagtatcgtctacctttggtatcgtcccatttgggcgcaccgtttgctacagcgccaccaagttcggagtacgtggcctgatggaaggtctcaacgaagagttctacatgaacggctacagcaacgacatcttcgtaacttgcgtctatccgggcttcgttgccaccaggaaagagttcatggagtacctcgaacagctgggctgtcgtgtacctatcaacacgccggatgaggtggcggatacagcaatcgatgccgttttgcgaaatcgttgcgaggtcattacatcatcccttatcatgcgaatcatgctcaagttctacgccgcaacgcagtcaagctttggacgcgaatcgaaacagatggccctccccaaagaacgcagcatggcttttcgagagcagtacttccaacacgtggacggagcctacgaagccgccagtgttcgacgcaaacgtcccgacaaacctcttagccttgacaggctggagaagaacgttcgatttgtgttggtggaagtgtttcctaaagtggccaaagtgttgcttctgttagttcctgtactggtgcgcgattttgtgcagtttttattgccggcgaaaaagaaatccataagcaatcagctggcactggttaccggcggtggcaacggtttgggccgagccctttgtttccgattggcgcaggaaggctgctcggtggccgttgctgacattgacctcgtcggtgcgcgtcggacggccgaagaagtgcgaacacggttcggagtgaaggccgatgcgtttcacgtcgatgtgagtgactacgggtcggttacgaagcttaaagaggccatcgaatcttcgctgggcaatgttgatattttggttaacaatgctgcactgttggctatgctttcgttgtccgaaggaaagccggaagacgttcagcggatagtgaatgtcaatttgctgtcgcatttttggactatcagagcattcaaagatggcatggttgagcgacgccgtggacacattgtggccatctgttctttgttaggtatcgttccttttggtcggaccatcagctactgcgccaccaagtttggagtacgaggtctcatggaatcgctggagaacgaattctaccaggatggcctaaaaaacgacatacatacgacatgcgtctttccggcaggaattcgcacccggaagggatttgttgatctggtcaaagatatcaaattgacggtaccactcagctctcccgaatacgttgccaacttaatcgtcgatgcagtgagggccaacaaaactgaaatcgtacctagtacatgggaaatgaggcttgtagctgctatatacccgtacatgccaaaatcgttgattttactcgtagttgacacagtgttgggagtaacgccagttctcaccagtagagaataagcagctagatgttgatattatactattattgtaaagttagttctgatcggtgataaactgtttgatttagcctagccggacatgcgtgtggataaatagatagtttttcggagcatgcatgatgtgatcagcagagtctaacggggtgacgcagcgccatcacgtgcaagtggccgctctatacattaaaattgcagcccatataatgacatgttgcagcgaaagtcgatctaattgaaatggtgcatgcaagcatggga

SEQ ID NO: 541 - DNA, 4125 bp, Aedes aegypti
gaacaatccccatatttttgaaacaaaatttcattcaaaattttaggccccattttcgctctagctgcttatcctttttccagcggaccacagaaaaaaaaatctgcaagtgaatttcagttcagcggatcaacctcgaacgcgcgccagtgcccactccctcggttcgactacttttcgcccttgatttcgcccgggcgctttctttcaccgttggaaatttttgttagctctggctgccatcccgattcggtgctgaaagtgcagtgaaaattcgaattttattgctttatttctggcggaaatcgtttcaatttgtggtggagtgttgaagtaattacggggaaagtaagaaacgttgaaagtggtgcgattttccgcggaaaagtgttttgtgttggagtttttgttgttgcttgttgctgttatggtttaacgcttttttctgcttgcggggattgtttgacgagcttggatttctagtgtgtgaataattgcgaagcgttagaatggatgatctgttgcacaaattcaacgaaatcatcctgcaaacatttgcagcggaatctcgtctggaggaagaatttcagaaaagtacgaaaaagttagatgaacatgtcacgcaatcgatcaccaatggaacgccggttcaaagtaagaaacgtccgaaacggttggaatcgatggaagagacaggagaagctggggatgacacgttcgcctcgacgaatagttccttgcatacgtcgagagctagtcagaggaagaacagcactcaggccaagggacgagacaaggtgcgatccctagtggaagaaatgacggccgttgctccggcgtctttgcctccgtcggtttctccggtggttgaggaacagaaccaggcgaatgccaaacctcaggaggacaatgagaggcgtccggctagggctgctcgggtcaaggccacgcagaatttgaaggaacccagcttgcatatgaagatgcgacagccaagcatcacgatcaagaaggagcggatttcggaagaaattcggaacgagcaacaggtggaaccgatggaaacggacactgagaatgatggtaatgctttgaacgttatggaaaaggtcgttgattcggagaagcggaaatccaacgatgaaggattcggcagcacgaatgagaaggacaaggagagcgaggaacctcccgcgacggaaatgtccataattctgataccgaaaccgattccaaaagtggaagtgctgtcggatgatgaggataccggtaagatgcctccgcctatgatgccaccgccgccagctcctaaaacgaaaactcgtactaagaaggcagataagtctaaagttaagacctcaaatgtactgccggtcaatataaagcgcgagaaagatgccgacgagacgtcatctagttctgcgatttcgtcggcagattcttcactttcgaccacttccaacaaaacttctactcgtggtcgaaagaagaaaacaagctcccaacctgaaccggccaaggttcatatcaaaacggaaaagctttcaagcgaaggcattcgcaatgacagcaagtccaaaacagtttccactaatagtcccacacagtcggagaagtcagtttacgaagacgctctggacggagatgcggttatgcgtccggtggccgtggcattgggtcgaattccattgattgccgatggcgagaaaaatcaaaccttcgccatggactcaaacggaaccttctcggttcccacatcgaacggaacgttcgttgttccctctccagcgaatggaacattcaatatcaagtctcctgaaaatccagcaaacggcactttcgatgtccgtcagctcccagggccaggcaatagcactttcgtaatggacaaaccaaaatctgctgaagaccagcagcgtgccctaatcaacgccagcatcataaccgaagataattcccacatcgaggaaagtccagaaaagccaccgcctccgaaagccaagaaaccagttgtggccaaaaagccccaagcagcgtccaagtccaagaaacacaacgaactgttctccttgcaatcccccatcaaaacccgaatcgaagccttcgagaaggccgccgttggttctccgttccattctcgtactgccgccaccagcaaaaacaccaccccatcccagtccaatcgattcccctcgaaaacctccaccactccgctcgcctcccagcgatatccggcctctgccaaagcgagcacccagacaaccccaatcgcccaaagcaccctccccctcaccaagggaatctcctcgtccgcctccaagttggcccatctgcagaagaaacccaccctggcctccgcaaatcttcccaaatcgcaaagtctatcccgcgaacccagcattgaccggggcaccggaactctgtcctcggcatcatccaccacgtcgctcgccatggacgagaagaagaagaaacgcgaagagaagcaacgtctagcgcagcaacagcgtgagcagattgaaaaagaaaagcgtgaaaatgccgaacggttgatgaaggagaaggaggaaaagcaccgcaagctggtgcaggagaaggaagataagctgcgggcggatttggttaagaaggccaagaagatggaggagttcgaaaaacggcggcacctggaggagctgaaccagaagctgctggcggagcagaagcgcgaggagttggccaaactggagcagcagcagaggaccgaacgcgaacaggccgaactgttcaaaatcaaccaggccaaggaaaactacgaaatcaaactgcacaagcaaatgtaccagcagaagatgcaacagcagcagaaactccagcaggctcaggtcctccaacagcagcagcttcagctgaagaaattgaaacaaaatggcaccgttgccacactggaaaagaatctgttcacgttcgatatgatcctaacggacgattccactgacgacgaaagcaccagtgctagcaaaaaatccaaacgtcccccgctgccggcgtggtgttcaaaggaggaacgcaatccaacgatccggacgcagcgcgagatcaagctgaaggtgatcgaccagttcttctcggtggcgccgatgacggccgatctgcgggagatattcccctcaatcgacgcccggaaattgaagcgaaactcgagtgccgtctggcggacaccgccgcggtactcccagatgcccaagtattgaggggactcggcatttgccttagttaagctagctactaacctacctaaccacacactccaattgtaccatcgtcgttaagtttagcgcccaagatgattgattgctcccagccaagcgtaagtgggtaagtgtgcgaacgattttatgttttgtgtgttattattgtgggcgtttcggaatggattcccctccaagttccaacggatgaactttgtcgaatataagctatgggttatgttatgtggctattctcgaatgaagcgaatcgaatgaagcgaactatcgaaagtatgtaagatgaaacttgagtttaaaccttgagcgaggtgttcggaatagattagaagcacctatctgtgcgcatcaacagcgatcaataactaaccccgtaattataggctaataatgagtttgtcaaacgcaaacgaattaaatttcgtcgtgcaaggctttcggttcgaactggtctgaagctgcgatcaacaaaaatgatgattttactcattgcgacactcttttgttaaatatgtttcttacttaaacatcgataaataatcaatctcacggtaatcactattctaagcaaattgaaacgtattaagtattagaaataataaaatttgaatgatttttttttgtaaataatttaatatatcgaagtgtggtttcttgaaagaacaaatcgccctgcaaatccaggcgggttcactgtattctagatgtcttgcttaaaaccaagccattgtctctgaaaagatacgtatctagttataattagtacttttcttgctgggttaggtggccactcgacgacacaccaaaccaagtctcatcatttccgggcgtattgtaaagctccatcttcgtcggtctttggcgatacttctccagt

SEQ ID NO: 542 - DNA, 2525 bp, Aedes aegypti
gtgtagtgagagctcgcgggtcgtcttattctgtcctgaacttgccaacatggcgttaaacatcgctgttccgctgacgaccgttggagatctgatggaaggcttcgggctactgtcgccgatttcaccgctcagtgtggactgccgtgctgttacgactaccggaagccacggtaagaagcagctggtctcacccgttggcagcgaatcgagtggcgtcagctctctggattctgatgagattaagaaaccgtcctcgccaccaactacaccaacggaggaagtggagaggccatcgactagttctccattgccaccgtctgaggcgaccgaaccggaaacgactatcgtaacggatgctaccgaagcaaaatcgtccagctgttcgtcgacacgttcgtcgctttcgtcaacggatagtatcagcagcagcgatggcagcagctcggatgaatttgctgctaccctaacgcaagatgatctgtcagaaccagaacccacgattccaaaagtggtcaaagtcgaaatcggtggccgcaatgtactgaatcttctggacaacttgacctcgccggatcacttccgtttgcaattcgctcagctgccggagaatgataatattcatttctttctggacaatcgttcccagtaccatcgtttgggagcgaatggccacattcaggaatacacgatggtaaagtgtaaatgttgtgattttcgatatccggtcaatggaacctcaccgacaaatggaggaactacggcaagcatgggacaggccaacttggccacaattttccagcaacagacacaacatcagcagcctcagcagcaacaaccgttccagtggaacagcttcaacaattacgatagtatttcaaataagaataaggtgggcgttaacgttgcggtcagtgcatttaacaaaacattcggtggtagcagcaatagcagtcagtatttccggagccacattgccgctagtcttggaagggattccaaccgcaccaacaacaacaataacagtggcggcaattttctcaacagcaccagcacgtacaataaccataaagcatatcagcaaggcttcggttcatcaaacaacaacggcagcagcaaattcaattcacaatatggaaactatcaattccagcagcaacaacaacagcagtcgcagcattcgcaaatgttctccaagaatcaacagatgcgctatggcagtggcaatagcaacggttcgagcgcatacaacgcttccccagcgctcgctgctgccgctgctgctttggcaaactataacatgccgagcgccaacagttacaatggcaagttcaacaatcaccataacatgttaacgtactacaaggctatgatgaactgaagagtatccaggagaggagaacgttattccagtacaccgagaaagtaatcggtgtcgtagttcgatgattgtgaaacgattgttaatattcagcaccacattgtgtctccttcatcgtcgtcttcattttgtcgtcatatcgttggacgtgcgtggaagttgggtggccaccccctgtgtgttcgggcgaattgtagttccttttgagcctgacaaatccttccaaaatatcagcgtataagagataaaagaaacatcgtgaccagccaaatcaaaactaacgaatgaggaatggaacgagaggttgctaatcagaacatcaaaattaaagttttttttttacttcaggatagttaatgcaagcaagcaaaatccgttgtaattattttacatacaaacatacaagcttacatatatatattttagaataattgaccttgcataagaaatcaatgttgaattttagttatttattattaatatcaatgtcgattgtatttccaagcaaaatcctaactagatcgagctccttaaaaagttagatccgatttacctgtgctatcaattagtattttatcatgcatctagagatggactcccaaaagcaagcaaacatagagaataaatcgatcgattgtcgtcctatttttactggaaatatgatgatagagaatttatactactagacagaggaaaggatctcatagtcaatcagttggattaagaccgaaacactacaaacaaacgtgttgcgtttggaatttgtgtatcaagtagattgaagtggaacagatagtgggtgtgcggtattcaatggtttaagacggtgatgctagtggaaaattgaattatatataatattgaatataatttactataaactacttcttacacaaattccaaaaatagcacacgaaccaagaaatgtaggttaaaatttaaggcacagcctttagtatataaagaccgaacgcaatgtctccatcccgtgtctttttgcgctttattataaaatatcattcttgaatgtgcgatttttagtcatgtaggcaaaagcagaaaagatgaataaagaaaaacttttatcactaaaatcccacagccaaacaaaagcaaatgtgtgtgtgctgattagttttgaagc

SEQ ID NO: 543 - DNA, 561 bp, Aedes aegypti
cggacggctcggactaacaagctgccatttttattttaccgcaaccgatgaatgctgtttgtttggaaaatcatcgacggcaatgttatacattgtaatcagcattcttaaataaagaaacatctaaatcagcctacaagccatagagaacgccgtcaggaatgaatctgcgagaatcgggaaaatgccagatcgagcgaaaggaaaacggttcgagtacgaaaaaccgccacaaacaccagatcagcaggtagtccaccaaatgcgttggcaccaactacgtcccgcctgctgcacttcggaccagcgatggatcggagatcgtgctacggtagccgctcgctgtaccatgttgcggtaacaaattctcgacctcgaatcatccggaagaacaaataaaaagaaagtatcactggaagatggagatatctatgtaaacaacttcccccacagcaacgttccgtcaacagataccgggaaactcaacccgtttggatgaagataacgattccatcgcaatagcaccggtcaaagcgaatcgtagaatcaaggcggtggttc

SEQ ID NO: 544 - DNA, 960 bp, Aedes aegypti
aaagtgcgtttgatttacaaatttctcgtataaaatatttaaataagttttaaaaatgactgctaaagtgaaaacctctaaaaaaatgcaaacatcacatccggaaccggacaccgacagtgccagtgatcagtcggatcatgaagtggcagatgaccagcacatgtccgacgaggagtttccgatgtccgacgatgaccagatgcaagcggattccgatggagaggcagaggaggaaaaggggccatcaaagtgggcactaacgctggcaaaatacataaggaagtcggatgatgcacagattctgtccaaagcggtaaaggaagtcgatctggaaaagaggcgccaggaagcaaaaccaacttacaaatttgaagtggtaggcgaacagaagaagccggcagaagcgggagatcagaaggatgaaaagccggatgatctggaaatggctaaagagttgctgcgccagaaagcgctgctcaaaaaggaacgacaaaaggacatccttggtttgcggatcaaaccctcgattggacagtatgaaagggaacgggcgctgaagaagattgccacccggggaactgtgcagcttttcaacgccgtccgacaacagcaacgggacgtgagcaaaaagctagacgaagccggaaaactggagtacaaacgggacaaagtgctgaagaacctgagtaagaaggaatttttgaacgtcctgatgagtggaccccgggcaaagtcggaactggtggacaatttggtcaagaaggaagaggtcaaggatgaaatcaaatccgaggacgaatccgacgatgacgagccaaagtcgacgtggggagcgttgagagcggattttctcactgggaagaaatcagggtgggataaggaggacagtgataaggacgaaaacgttggggatcccatggacgaaagttctgattcggattaaattgtataaatgag

SEQ ID NO: 545 - DNA, 3628 bp, Aedes aegypti
ggagaaaaccaaagaagcgatgcaagaaaaggagaaaaacaagaaaacggttacgaacagtaagaatatggataagatagaggagaaaccccaaaacaaaacgacaacagaggaagaagtcaatcagcagaaaccgtccccgaagaaagttgccgcggagctggaagatgatgatgacgaagatgtaatccagctttgtgacgatatttcggacacatttcttgaagatgatgccatcggcagttcggcaggtccgacaaaaccggaaatttcctctcaggcaaagattgaatccgagaaagcacgaattctcagtgaaccactggtcaaacagttggtcataccggagatttgcgtgtctgatgaagaggacgacagatcggtaggtagccaggaatcgctgagcttgcaaattgatcactgtgtggaaaaggctgcggaattgatcagtgaagtggtggagaatgggcgaggcaaaaccgatccgtcaaaagctggcggaacggttccggcgggtaaaaatggatcggcgttgaacggaagcaacgctagcgagggcggcctctacgggtgtcatcaggaggatccggacgtgttgaagttaaagctggacctttaccaagacatgggaggtatggattacgaggccgaagataaaacggaagacggtgaaaagttgacagtgataaggatcaaggaagagccttgttcgccgagaaatcttttctcggaaaatgaaatccccaccattgaattgacctcgacggacgacgaagtagtaacgatttccatcagtccgaaatcgaaggtaaaaaccaaacagaacaagaaaagcaagaaacggaagtctaagaagaaaggatccacggaatatgtggacctcagaatggattcatcggaagattcctttccaattgtggtggattcatcaacggtttcgattgattcccggaataccgagatgcattctgaagagtctgaaaaggcaaaagctttgcataatcgtaaggtcaccacaactccggaggtgaacggtgttggtaagaaatccaaaactgcgcgaaagagatctgtagatgctgatttgatcgaaccgccagtcaaaaagaagaagaaagttgatccagccatgatgggataccaaaagcgccgcagatccgttggtcgatcggcatcgaaatcgagtatgctttcggtcacgtcggttttgtcatcgattccggatgaggatatggttgtgatttcggcgaatgacgtcttgctcgctgatccatccatgattgttacaggtgaaacgaccaatattgagaacgataaacgacagagtgaatcaactgacgagataaccgatggtaagttagcaaacgattcgaaagaggaattaatgcactcgctagatttgaaggaagctattacaaaagaattggtgcaagaggtctcgctgaacggcgacaagaatgagaatgagtcggatgagcatagcttcccattgccaacaacggatatagcgctagaggacatgcttgagtcatttatcgataaagaagcgaacagcaaacattccgaactagttttccactccatttccccggaggaaaagtttttgatggattcgctgtttgcagattgcgagaagcagtcgcaacaagtccccagcgaggatcacctggaatccctcaaaaccatcatggatgacggaaagcctctagttgagccccagaaagtaacggaaccaatcgctataagttacacaatttgcgatgaaagtattcagccggaaactgttcacatgcaactggagacttatgctcccgaaggcgaatctgtaccggatatggccaaaggaccaaaagctccgaacatcaaaatcatccagaactaccagaaatatccattccaatctaaacctccgaaaaaacagaagctcaaagataacaattccaatggccaacagcgtaaggggcgaggacgtaaaaagcgagaagtcaaagatgacaccgacgaagaatatcttccatcaaaggtacgcactcgcaatcgcggctcaaaaccacgaaagcgtaaaaattcaaaaccccaattggaagaagaggagctcaacgtcgtggatcaacaacaacacccggaggatggacctctcatttcggagcattctcttcccaaattcgacaacggagacgatgacgacgacggaacggcaactacgtccacggtgtgccgtaacatgccaaccctggaggaggatttggcaatgaccagttcggatgagggtgaaacgttcgaggctaccagcaaggaattgattacgacgtcgccgtcgaaaattagctcatccagtaccgaaggaagtggtggtggtacaaagctgaacgatgatgggaaaaaggagagagacgaacgacaaccaattcggatcacgaagggtaacgccaagaaccccaagacagctggtggtgtggccaaacgaggtcgaccgaagggcagtaagaatagaaagatttctgatttctatccttcaaccaacgatcgcaaagaaacaattgaaccgatagaggaatcacacaaagaatctgcctcacaacaatcactatcgacgattggaaaaggggacaaagtatccaccaagccgacacaaaagcgcaagcgtaaacgtgtgattagcagcagcagcaacagtgaagttagtaccgctactatcagtaacagtgtggatactgaaccagaactacaactgagcgcatccactatcgggtcggaaactgaacaagctgcagaaggagctagtttggaaacaacccaagtcgctgccgacaagatggacaatcttcagattgtaatatcgccacttaccgaggataagatacgtaaaataaacaccccgcaaaagtctaaagggcttaccaaagctagccaaacggaaatttccggcttgacgtggtccatcgatctacaccagatagacttccgatcggaatactttgagaagcttcgaatcctgttgaacaacggggcacggaccggtggtgaccgttccttcaatggcgtggacattccgagtcgatcttcgctgcagcgatgtctggtaatgtcacctaacccgagacaacaaccggcccgacctgttccagatggtcacaacaggagctctgcagaggatttgttgttccaacgcgccctcaatgaagtcgaattgggtgccaacaatacggaggaccggtcggctcgtcaaagattggagcgagtagttaacagcgtacggtctactttccgtataccgaaggtgaagaagcaggcttcttcatcaccgcaggatgtaacttcatcgacgccgcatgttgcggaaccagtctacagagatgatgatcttggcgttgaacagcttccctcaacttctcgctccgtagatcgatctcaacaaagcaacgggccgtccagcagtctgagacctccggaaacagctggcgtagtgcaacggaccattacaaacgactacgtagatgagaatagcgagaactcggataatgtcagcgccatgtcgagagaacgacaacaaatcagacaaaacatcatgttgcaggacagatttgaggtgccggcaaacctaaacatgaatgcaggccgagtgtaa

SEQ ID NO: 546 - DNA, 1644 bp, Aedes aegypti
atgcctccatcaagcgcagaaaacggacagctggaaaccgggcgcccccttcctaatcctgaccctcgaccggcccgcgtacccccgatttcgctggaaacccagtccggactgccgagtcgtgctgagttactcaacgtccgacgaacgattcgcaacgacgcaccaccgccgctacaacaacccccgcagcttgttctgcccgaagttccgccacccatggtccaacagttccttccggaagcgaagtacaatcctcctcaggcgaatgctccttttacgatgtttggtggcttccaaccggcgcaatttgctgtaagtagcaattcatttaacagaacgggttcgttactcggttattctgggttggaaacgccttcgatgtttagtggtgatatgatgagcctgcagcagcaacagcagcttaggggtaaccccagcaatatcaatgattttctgaccatgctgtgggaacagtttaggcagcaacaacaacctattcgtcagcaaccgttgatccagccctcattgcagcctcctgttgcaccgttagcccaaccacagattgtcccgatgccgccgagtagttcgaatcagcaaccaattctcagccagatgttgtctcagatgaatcagatctcaatgcaaccatcagtcccgcaagccacgccattcgaacctcaacgcgccaacgaacaggtggaaatcatatgctccattttcgggtgtttcgatttcctaaacgacagatgcatcaaaactcactgtcgttatccgcatatcctgccgagagaagaggaggtcttccagaaactcctgatgcaaagtcgtgacgttatcatggcgagttatcgatttgtggccggcagagatgatttgttcatcaagtacttcccggcgtacgccagcgtcatgggacgcaacaacatgcgccatcagcttgtgaatactatcacggattgcgagcagtcgaaacgaccgattcagtactacaaatatatcgtggaaggtctcaaagttagtggcaccagtgcggtacaagctgtacagctgattctggagaaacacacgaagaaaagcttcaaccagatcaacgttttgatcgaactgattctggacaccggtgagggtataccaactttcctccgcatactggaggagtttttccacgtgaaagattactactacgaaatcccatccgttaatcgtttgctcgagttcagcgtgatatccacccttccaatcaacgagttggccacgttcgtttccaaactgatcctgaaggttcccgctggaggggaacagttcgtaaacacccggatgttgttggagtttattcagaaggtaagactagatccggcattggctctggacgtagaagatatcgttaagaagtacggcagtgttgtgatgaggccgtaaccgtaagattcgttatattccgatttatatgaggtggtgggaaagctttcctgcatatttgattttttatgccatgcagtcggtacccatgttgagtacacttgacaagaagtctgtattgttttttttgttttcatttttgggaaacgattacttgtaagatggaaacctgttgatcattatgtgatgatttcgaagagagaaataaagtgcgtagtccgg

SEQ ID NO: 547 - DNA, 1521 bp, Aedes aegypti
gacgaggaatgcgacatcatcggggacctgataggcgactacggcaagtggcagtttgtgatgaccttcctgctgtcgctgttccaggtgcccaacacgttccacatctactcgcccacgtttcaggcagcagaaaaaagccactggtgccgacggccgtcgcatctcaacgacatctcggtcgatctgtggcgaaacgtgacccagcagcgggagaactgccggatactgaactacgattggaactcggtcggatccgagcagacgctgcgaaatctgagcataccgggcaatctgtcacatgtgggttgcagctcgtgggagtttgatctcaacgataatctcggcaacacgtgggcctcggagtggagtctggtgtgcgacaaggaatacttgaaggatgtggcggagatgttctttctggtcggagtggccaccggtggcattaccagtggggtgctgtccgataaattcggacgcaagaagatgctgttcatttcggccgttttgcaggcgatcttcggccttgcgttgtatttcgtggattccttggagttcctgttaattctgcgcgcgctactcggcatcgtatccgtttccgtcacatatgcaggactgatcctggccattgagtacgtggacggtaagtggagaaccatcgccggaatgtacaacttgttccccctgccggtgtcctacatcatgatctcgggtctcgcctatctgacgcaggatttcagaagtctgcagctctgtatcggattaccgggagtgtttctctgtttcttgtggttcgtacttccggaatccccacggtggttgctctgcaaaggtcgcatagcagaggtgaaggaaattgtgcgaaaggccgccgcctttaacaatcgccccctaccggacaatttggacaaactgctcaaacccccaaccgacgaggaagagaacgtggccggcgtctgcgagctgttccgttccaaatatctgcgtctggtcacgttctgcttcctgtgcatttggttcacgatgaatctcgtctactacggactggtgctcaacatgaacagcttcggcggcaacatctacttgaattcggctctggcaggtttggtggaaattccggcaatcgcaatggcaatgtacatcatcaacagaacgggcaagaagtggctcttctgtgcgacattctttgcagcggctctggcgtgctttaaaaatggtccccctttttatccatcagtcagaaatttacaacaaatactaatacttttctacataggtaaattcacaatcagtgctggcaacaccataatgccggtttacacggccgaactgtacccaactgccatcaggaacgttggcgtgggggcttgtaatctcgcggctggattcgctttagtgcttaccccttatctttccatgttggtaagttgcacgccaaagatcgaggatcatcttcttatgtccctgctcacggcttggtgtatatttggagccattgtgattgtattcctgccggaaact

SEQ ID NO: 548 - DNA, 1430 bp, Aedes aegypti
caagagcagagtacacaggaggggcttacatccgttcccactcgtaggataagatttttgaaacattgggttatagtaatcacctacgagagtaatgagcagttcaacagtgatgtcagaggctgaacttcgtacaccggatctccatcccatgataagatacattgagctgcatgatagaaaaaataatgtaaccgaggtggaaattccgattccttacggcaaaatcgctggcaaatggtttggaccaaagaatgttcagccgatactgtgccttcacgggtggttggacaactgtggaacttttgataggctcattccattgttgccagcagatgtgagctttcttgcgatcgatttccccggacatggccactcttcctgggttcccgatggtatggcatatcaccagttggatagcgtcgttcttatattgcaaatcatgaaggaatataagtgggataaagtggctataatggcacattccatgggagccatcatcgggttcatgttcacagctatgtttccagaaaaagttgaatttctcataggcatagatgctctgaagccccacagttactaccctggcaagttccttatgattgctgcaccattgctatccaagttcatcgaggccgaccagaggaatcgtgagaagtcggaacctcccgcatatacatacgaagagatggtgaataaaatgtatgatgcaacatttgagtctgtgaccaaagaaacggcacctttcttgctacagcggaacatcaagccctcaaaaaagtttcccgggaagtactactttgatcgcgacaacaaagtcaagtacaacaatattcccggctggtcggatgaggtgaactgggatttgggcaagcgagtgaaggttccacagttgacgatcaaggcgaaagattccccgtacccgggatcctggcagggattcaaaccaatggtagaagtgctaaaggagcacaatcctcactttcagctggagttcgtgaaagcatcacaccatgtgcacttaacagatccggagctcatcgctccaataataacggaatttctgcgaaagtattggatcaagcgtcaggatagcttagttagtaaactgtgataaggaatatggggattatttacatggggtataacgaatttttaaggaactagtgataatctcgggtggatgatttgaaaatttataattgttacattataggtattacatatgcatgtaagcacgaaaaggtaaataaagttaattcaaattgagctcaagcgattacgtatacatcactataaaatacttctgtgagataaaaatctagacagataaaagaataaactgaggaataatttcataagtatggacattttctttaggaaaactgtatgtaaaataaggcttgaaataaaaatcacagtcaatatct

SEQ ID NO: 549 - DNA, 552 bp, Aedes aegypti
atgtcacagcttgctgacaacgtcctcgtccttactccagtacttgctgaggaatgccgtgacgatgggcgccacctgttccggattcgtcagatgtacgtgatgccggccctcaactacacactgctcgaagtagggattgtttgtcttcagcaagtcaagcacctgttcgtagtactttttctcctcgaaatagggcgactgtttggctttgatgaacagaaagggcattttgatctgctttgccaggtccagaataacctcgtgcgaaaaattcattcccatcgagtacttcagtcgggagtctcgcgtgaaataatatttttcgggatatttcaagcttttcttgatgtttcgatgcagcaaataaggacacgtttctcgactaatagagttgtaggttgcttcgtgcaatttgtctaccatttcagaataggtgtaggatggaggttcagacttttgctgattgcgaagatcagccaccatgagctggggaatggagttcgtcaatcggtagattatattttccggcgaagaaacttgcggctttaa

SEQ ID NO: 550 - DNA, 3251 bp, Aedes aegypti
cagctgttgagttctcggcaattatttttgccggcctcgacgaaataaattaagtgtgtatagtctgcagaaaattgctggtactttgcgtttaacttaaccctctaaaatagtaatttcgaccgcaacatttttttttgtgtgtattttaattccagagtaaaaattgtaccggaacccaaagtttcaaaattcaacttgaaaaccagtcagccattgcgatatttatctttgtgctatggcaaccttgtccttaataatgttaaagtaaaaccgacaacaataaataaaccatttttgaataaaacaacttttcgtgttataccaaaaatgcatctcgtttatttttttcactgggccctccgatgtaaacacgcatgatgcacctgctctaacctcactcttctcgcgcacggtcttgtaaacatgtcaaaagccatgtgcggctcggccagtttctgagtgcggtgaaaaatcgaagtttttctggtgaaaatcattagcaaaaatcttggaaatctacgcaaatcatggccatagataccatccataaggctggtgcgctgaagcaaaccaacaaggcgcataaacatggaaaacatgcatctaagcgatcgctcgatagagtcgctaaaggaaagacaaacttgaaatccgccactaaaaagtcgcaccgagagctcggccgggaagatcgtcgccggcaagcgaaccaaattcgcaaaaataagcgccaggaagcgattgcgctgaagagagctatcggaggagcaacgacggcaccgtttttgacctgtattcttccgttgcacgccaatgtggaccccaattcggctctggccattgtggaggggtgtgacgacgaggccaccgtgttcagagtttccaacaggattcgatacatgaacgttcccagattccgtcagaggttctcattcatcacccctgaggttggacacggtcatgagctttcagttctggatgcgctcaaagtgtgcgattcaaccattttgcttctctccgccaccgaagtggaagatgatatcattgataaaaatggtgccaaaatcttaaacatggctcttagtcaaggtcttcctacgccaatggtgtttgtcatggatatggaatctattgccccgaagaagcgcggacaggtgaaaagcgcaattcaaaaggcaatctccgacgttctgccggatgaaaagatcatgactttggattccaacaccgatggattgaacttgttgcgtcgagtcggtggtcaaaaacgaaaggtcctccacaataaagccaatcgtccgcatttgttcggagagaaggttgagtatgtaccggagatgggcgaaggaagtgtaggaactctgaaggttactggttttctgcgtggagttcccttgtcggtcaatcagctggtgcacattcctggtttaggtgacttccaaatgtcggaaatctacgcccctgaggatccgtacaaattgcgaaaaggagacgaggaaatgtcgtcaggagagtgcaagctgttggccaaggccgatgagcagaagcaaacaagcctacagaaggagaacatccctgatgagatggatgctgagcaaacgtggccaacagaggaagaaattgaagcttcgaaaaatgagaacaagaaaaagctgatcaagaggattcctaaaggtatgagcgactaccaagctgcctggattccagatattgaagaagtgtccgagaatgacgatgacgatgaggatgatgaagacgatgacgacgaagaggaggaagattacatgtcttgtgaatcagatacggaaagcaaggcagcagagcaagaggaaaccgaagaggatgatgaagaatatgaggaagtgagcgtttcggatggccctgtttcggctgaaaggtacgacaaacaaatggacatggaagaagagaaacgcacacttgcgaaactacaagcagccaaggatgacgaaattttccccgatgaaatcgacactccggcaaacattcctgccagagaacggttcagaaaatatcgtggcttggaatcgttccgaacgtctccctgggatgtgaaggaaaatctgccactggattacgcaaaaatctatcagttcaagaatttcgatcgcacgaagcgacggatcatcaaagatgctcaggaagtggatgatggagttatgcctggctggtacattcaaattcacgtgaaaaacgttcctcaagatgcgtggaatgcttatctctcggcaggaaatggcgaacaggttgtagtgtacggcttgttacctcatgaacatcaaatgtccgtcatgaacgtgtgtttgaagaggacttctaactctaccatccccattaagtccaaggaacgtcttatcgtccagtgtggcttccggcggttcattgttaacccaatattcagccagcataccaacggcgacaaacacaagtatgagcggtacttccgaccgggaatgactgtggtggccactttcttcgctcctatacagtttcctccggcgccggtagtgtgcttccgaaccaacccagacacgtccctcggaatggtggcctcgggtagcgtgatcgactgcaatccggacagggtggtgctgaagcgtgccgtcatcagtggacatccgttcaagatacatcgcaaatcggccgtgattcggtatatgttcttcaatccggaggacatcgagtatttcaaaccatgcaagctgcgcaccaagttgggccgattgggtcatatcaaggaatcgctgggaactcacggtcatatgaagtgcatcttcgatacgcagttgaaatcacacgatacggttctactgtatctgtacaagcgagtgtatcccaagtggacgtacgaggactgcattgtctcgtgtgctgctggtcacagtagtaatactggttccataaccagcctgaaggaggacgaggaaatgcaagagtagagtgctgacgtggtaaaggtaagttatgtgttgggaggtgtagcattggaagcgcagagttttgttgcattctatatactataacaggagttataaccaaaagtagatattatgtattgtgtgtgccaagaatttgaacgaaaatcccgaaaatcttcataatgtcttggataatttttttgtcttatgcaggcagttgtgaatgggtgtggtggttgtgtggtgaatgtgtgttttttaatttgccgtcgataccctttttgtgattttcgttcgataggtccttatttt

SEQ ID NO: 551 - DNA, 886 bp, Aedes aegypti
aaatttaataacaaggtttatttgtcttaattaatagaaaatttatcctaaattgattcaattttaagtcgtaaccaggtgatttccgtttcacttattaattctttacatttccgtatcagctcatgtgcttcgataatactcctagtttatatcaagaaggattgccattgtgtgtgtgggattcttatagtttaaatgctactgtaccgcgttgtaaatcggggctggcgtgatgtaccagtatctcactattgagttattgataatgaggaagtcttgtatcatattgtaatggagcacacgggtgtatcttactaacagaaaattcagtcaatcttttgatgtcacaatttaaggttctggcattccaacacaaacaactgcactatggtacctcaacttaatacaaaaaaaaatgttgcaatcctccgtcagcggaatttttgtcaactgtaaaagaaggcacacgcgatcgtacgcgctttagttgtaccgctaataatttgttcggtttttgcacgacaaacaggtcattgcttagtgggcgaaatcctagccataatcgcacttatttcgtgacgcgggttttaaaaggtgtgaaatagtaattttcaagtaaaacaaaacactggagaattgaatagcgctaattttattcaccgcacgccaacgcatgtattggaaagctattttcaagtaaaaaaaagttataaataatgcattcaggattaaatttgtaaaatatatcaatttaccccttgtcccttataattggctatttttggagttttttttgtctatttaacaacagaaattggatgttttgagttgaaaatccagcggcagtatcgaatcatatgttaaaatcttcatactagccaat

SEQ ID NO: 552 - DNA, 1122 bp, Aedes aegypti
atgcaacccaagcgttccattagaattttcccggcgttagttgcgctgttttgcggactactgacggttttccccaatcaagcaacggcggaaatgtacgagggcgacagttgcaagtcgatgaaagatatgcccggtacctgcaggaatcccaacgagtgcccctggattcaggtgaatgtaaaccagaaacggctctatccgattaaagctgttccgaggtgtggttttacggttcaaagtgttctagtttgctgccccaacgagagttccatcaggaaggccgaccaagcgtgtcgcaacttcgcacgtggaagcacttatatcgcgcagcacattattgaaggcaaggaggccgacgaaggagaaataccgttcatcgctgcactgggctacagctcgttggacccggccaaggagtacgacttccgctgcggagccagctggattgcgaagaagttccttctgaccgcagcccactgtgtgaggaagaatgaccgaccggtcgtggctcgcatcggaacgatcaacttggacgagaccgatcggacacgttttcaagattcggaagtaaaggaaatttatctacatccgaagtacacacccaaaagtaaatataacgacatcgctctgattgaactggctactcctttcgagtatgacgataattccaaccgagtttgtctgtacacggatactcacgatctggacccggaccacgttctgacagcatccggttggggcgtgccagcaacggacacaactttttcgaatgttctgctcaaagtcgacttgaacacagaatcgctggaccaatgcgcggaccactaccaaagtcaggttggcaaactttctggtaaattgtccactggcttaaccgatcggcagtactgtgcgattggcaagctgggactgtctggcaaccggggtgactcgtgcattggagattcgggtggtcccttgcattttaagaacgaaacggcggatcggttctacctggtgggagttacgtccttcgggaacgggtgcggtgcatcggctggggtctacacccgagtggcttcctacctggattggattgtgccgatcgtatggccggacgaagactctctgctggattga

SEQ ID NO: 553 - DNA, 366 bp, Aedes aegypti
gtggaatttgttggccgatttcgatccgccatagtgatttggaaggagtctgttgaggtgccagttcgttggaccgaccggagtgccatccgaagattttgtgggagagtgaggagcgaacgctggagtgtcccgcctttagccagccggctcgcgaccagttcgacaccagaccatccggagaagatactggcgagctacgttgtggcccagtcggctgtccaccgtcgccgccccttccatcatccaagtatcgaacgccctgtttcgaagaatgtggagcctgctcgactgtctggctggatctggtgccaaccgtcggccttttactggactcgctcatcattgagaaccatggaatggtaa

SEQ ID NO: 554 - DNA, 174 bp, Aedes aegypti
atgatcaccggcttcattctccggttcggtctgggaagcgtccgttcaccggcccgaggaaaatcatcagcagaccgccgtctagcatgcgttccccgccgtttggacacagccatggcagcccacgtgaagcccatcctgcggttagtcggcaaaaatctactcaatacataa

SEQ ID NO: 555 - DNA, 2199 bp, Aedes aegypti
atggacggctatcacgtacaggctcaggacggcagcaacaacacaaacacctattcctatcaccaccatcaacagcagcagtcccagcagcagcatcaccatcatcaccaccatcaacagcagcagcagcagcatcatcagcaaaagtacagtcatcagaatcatcacttgcatcggcaccacagcaacaactccaacaacagctacacgacactgaattatgccgcctcggatgcgggcttcgtatcgccaccgccttcgccccgttccaacagttcgctagcttcctgttcgtcttcatcgtactcgtcagcttcctcgtcttcagccgtatcgtcggctgcgtctacatcgtccggactgtcatcggctgggtccgagaatggatcttcatacgaaaatctggacaattcagctcaacggctagcagtgctgtcgttcgagcaggtcaaaaagctgaacgatgtgatgaacgaacccgttgccatccacggtcgtggaaacttcccgaccctggaggtcaagctgaccgatctggtgaacatcgtgcgggagaagttggaggccgacattggatccggtggggccggtatgatcgtgaaggatattcgcctgaatggaggcgccgctagtcacgtgctggcttcagaagcacagccatacaatgatctggatttgatttttgctgtggagtttagctcaaaccgacactttgatcgtgtcaagtctgctgttttgtcgtcgcttttggacctgttaccagagggtgtagtcaggcggaggataacgcagtgttcgctcaaagaagcctacgttggcaagatggtgaaggtgaacaacaacaacgatggtgatcgctggagtctgatctcgctgggcaactccccagggcacaagaacgtcgagctgaagtttgtcgatacgatgcgtcgacagttcgagtttagcgtcgactcgttccagattgtgctggactcgttgctgctgttctacgactgtactgagaggcccatgatcacggagaatttctacccatccgtcgttggagagtcggtgtacggcgatttccaggaagctctataccatttgcagaagaagctgatatcgacgaggcaaccggaggaaatccggggaggaggactgctcaagtattgcaacttgttggtgagaaactatattccagttgatcaacagaagatcaaaacgctggagcgttacatgtgctcacggttcttcatcgactttccggacattgatcagcagaaaatcaagctggaaagctacttgaggaaccacttttggggtgaggtggaagaacatctacagtaccagtacctgatgcatttatacgatgttgtcgaacagagcacagtctgtcttatgggtcacgagcgtcgtcaaacgctgatgttgatcgaatcgctggccatgcaggtactctaccgtgaccatcctcaaaatccacagacaaccatcattacaaccacgagtacggtaccgcagcacaccgcaatgtcgctgcaaccacttcagactcaactctcacaactgagcttacagcctcaacaactctcaccagttcagcagactgtcatccaccaccaccatccgcagggtgtgccacagacgcaaaccctacagctccagcatccacaggccatcatgcaacagcagtctcctcagcctggacaagctcaaccgcagcagcaaaccatctcgcttgctccacaaccagccggtctactctacgccaacggaatctactacgctccagtcatcccgacgacgctctgcacgtgcaacgccacgtggctgacgacgtgatcggcgcttacggaacccgataacagcaacaacaacatcaactgtaccaatccggcggcaccactactagtgggatcaatcatcagcgtcaccactacaccgatcgtggccacgttcgaaccgcagtcgcatgcaacgtcaccgtcgacgacgtcatcgtccatctgctgcagtagcaactcctacaacagcaacaacatttacaatgcagacaacagcagcaacaatcgttactttactaatattttagtgtcggatagatgattactagaacagtaagcatgatacacgttttcctctccacagctcaacagattcaaaccatgtaaaccacacagaacactaacacaaattgcgtccgttcgaaatcaactg

SEQ ID NO: 556 - DNA, 4462 bp, Aedes aegypti
acaaatatgcagttatgggcagccctggtttgatgcaacgtgtttttacaagttacgaattaagtaaaataaaactctaaaatataacaacatttacacagttcatgacatattatctattatcatttattggccttagatcgtttttaataggttacttttaaatcatcgcatctttttttttaattcctgttgcatgcatcatatttaatatttcaaatgtgtatctatatagcatattttatatttctacataactatgatgtacagaggtacgatatcccaatgtagtgaatgtggttttgaattttaggtattttaatcacttctaacatggttttcaattattttattattttttttcttaagtttcaaatgttttgcgacattttctatgtttgtgtatgtgttttttaatcaacctaaccgtatatttaatcgctacaaaaatttacatgttattttgtcgtggtagaaataagcaatataaaaaataatatattacgctgttagaattatttatttgaaaattaattctgtattttcgttttgatctaacagggtttcaatgtaatcatatgatcttaacatctattcattataccacgacaaattcaaccaaacatgcaattacaagctccatatgcaaaactcatacaaactcatgtattataggattaaattaaagcgattcacatatcaataccacatcgtctgaagattttgtttccggattgtgatgcgaatagtggcattaaagaagaattaactgtgtgtaaacctgtccattgcacttttcacataaagaattacattccagctaaagcagtaaatatgcattcccaactcgacaataccaaccagctagatgctacaatgctacgaaacactgatccactatgcatttacgttcaataccacccaaagcgtttcattcatgtattatatgagttgagtttcattcacaatattaaattatagatacattaatcgagaaataatcatactgtattttaaggttatgaggcatgtaagatacacaacatttaagcatcagattcatttgtttccagcataattattagaagactcgatgttatacgttacttgaaaatacaatcaatttagggtttgttttttaaagcaatttaacgatttgtaaattaatattaatgcgatactaaacaatgaaaattgtaattccaccacttgaaaactaaagcaacaacgttccagcagacaaatatagtctatttaacaacaaaacaacaaccaataaatcactacattgtaactactacataatgacacctattacttgcctaattattctaatgccgccattaacagagcaaggaagccgggattcgcaccctggtagctcttgacgatcagggaggtgagtcaccatacaacacattactacctattcaaactatttgcccttacccctttctatctctatctccaaaaaatcacattttcttccaataattttcatccgcgactacattgaactgttaatctcaatatatttcgaccctctcgcatctcctctattcccattatttagaattacaatcgaagtatcgatttttgccttagttttataacaaacacaagtaaacttcacccaaaccatctcattccttctggtgttcattcgtgtatcagatatgaagggtatattattcgcctaattgagtggatttcagtaacggtacactggagtaacgagatatggcaatgacaactttgcgatttaaataatttttgtttatttaaatgttcaacttatcaagttaatgtcttcgcaatgaaagttctcatcaaagtatgatattacgaggattttcagctattttatcttacctcgacatattcaactttctccggtgttcctttaggtcctgaaataccatttcagtgtttcagtttagtttagttcattcagataaattttctgtttggatgccatacaatctgaaacaaaatgagagaaaatagttgtccgacatttcgcaataacaattccgcgatttgtatcatttcgcggtttagcgttttgcggtcagcaccatttcgtggtatgccatttcacggtctaaatggaacaccgcgaagtgggttaccgcaaaatgttatacaaccgagaaaataacaatagtttgacctcgataagcagactcgtgcaatgaatttggaaacagattgaaattctatttacttggtaaacattactggcaattcagaatagatttttacctatcttgataactgtttttatgaatgaataataaataaaatatattcaaactaaaattaacaatatcagcgttacggaataaatggacgctgcctcagttgtttcacaactgtggcctgactgtacgataaattaatccctacataaaccataaaaaatatataatcataggcgaacattagccagcacttttttatttgtccttcagtctatgtgtatactgcacgatcgaacatatttattccctaaacatttccgctaatcatccatagtcattgttcctgccacaataaacattcactccttttattcggtagagtacctccatttcatgcacgactctcgtaacgcactttaaaccaaaaaaaaaatcatatcctccaaattcgctatactcaaacttgttttatattattgcaaagtttacaaagtgttgagcgatatgagtaattttcattatataaaatcaattttcatgggtcgagataaaaagcatgaacatttttgaatagtgtggttgcctaagggtcgtttgatcatacagtacacatatatacaactgcagtataatgagaattcctacatgttgcttcgaagctttgctgattagaatgaaagtttatttacactagtgcgtttgttcggatgaatagccatgtttgctcactgttgtttatactatcattgtttctgaagtcctaagtagtcgcttggttatttccgtttcatttattgtggagcaatatcatttccagttacacttacagacgaaatttgttttttctacaaaggaaccctttcgaaaacttttttatgcgcttgtcaatctgtttatttgtttttagtacttgaaatgcgtgtccattgaaggttgagttacaaatcataaagcggttctctctattggagacgtcatgaagtatcaaatattatttcaaatcattagttgaatagagcgaagaagctggagctaaaactacaaatatgttaaaattacaaggcgagcactgaagtgggaatgcgtaccatcgtcatgctggacgaacaaggagaacaactggatcgaatcgaggagggcatggaccagatcaacgccgacatgcgagaagccgagaagaatctcagtggaatggagaaatgctgcggcatttgcgttttgccttgcaataagagcgcatcatttaaggaagacgacggcacatggaaaggtaacgacgacggtaaagttgtgaataatcaaccacaaagagttatggacgaccgtaatggactaggaccacaagcgggttacattggaagaataacgaacgacgccagagaagacgagatggaggaaaacatgggccaagtgaacacaatgattggtaacttgagaaacatggccctggatatgggatcagaacttgaaaatcagaacaggcagattgatagaatcaatcgcaagggcgacgacaatacgacacgacttgaagaagccagcaagagaactggtcagctgttacgaagctaacgtggaaaggttcgttattatgttttgttatctttgtcccaattttaattgtttagtggtgcttttattttctcgaaactttgtatatcgacacgcatataatccgtggccaacataagctttcaatattatacaatccaatgcctaatattatacacactgatagtaatgaaacatgagcgaataaatgcagcatcctatgttatatttgtgaaacaatttatgcattgcgcgtaattaagcaggttaataacattatatacctttcaaatgccactataattttcttagaattttcaattgaaaaacgataaatacaaatagccatcagttattggattgaaaagtaagaaccatatcatattcaatacactttatactagaaaacaagaaaaactattctgctttgcattatgcaaaattctgaaaaaatgttcatttttgtaattagattgccacctttcctacggcttgttgttcaagtattaaaaacttttgttttcaattgtttttgtgtcaaacactgcaattgtcagagtagcattcgagtaaaaggaatttggtccattaatgctcacgtcatcctggacgtagaatatcacttcccttaatgtcgcactttgctagcaataattatagtaaaatgagaaaaaaaaaacaaacaattgtgataaaagcgtaagagg

SEQ ID NO: 557 - DNA, 2735 bp, Aedes aegypti
atgtcgtccaagcagtttatcaatattaacaataaatatgaccgtgttgtagtgctggtggatatggattgcttctactgtcaggtggaagagaaattaaatccggaaattcgtggaaaacctatcgctgtggtgcagtacaatccctggcagggtggaggtatcattgcggtcaattacccagcacgtgccaaaggtgtcacccgacacatgcgcggcgatgaggcgaaacaacactgtccggatattgtgttaccgcaggtgccgcaagttcgcggcaaggcggacatttccaaatatcgcgaggcaggcaaggaagtggccgccgtattgcaaacatttactccgctgttggagcgcgccagtgtagacgaggcttatctggacattacggagcgcgttttggctcggctacgtgacatgaacgagggcaaatttcagctgcttccggacaagctagccaacacgtttgcagttggttacgacagtattggggaatttgtgcagaaaatatccggcgatttggacggcagggttagctcccaagagttggagagtgaagaggacagagttgcttacaagaaaagcgatatcaaactgttgattggggcttccattgtgaatgaaattcgagcagcagtgaaggagaaaaccggttatgaatgttcagcaggtattgcacataataaaattctggcgaagctaactgctggattccacaagccaaataagcaaactattttacccctgaaatgtatatccaaaatgtacgagacactgtcgttgaaaaaggtaaagggtcttggcggtaaactgggcgatcaagtttgcgagcttttgaagattcaaaccatgagtgaattggctaaattccccgaaaaagttctgcaaaatcattttgatgatcgaatgggatcgtggatgtatctcatggctaagggaattgaccttgaagctgttacgccaaagttcaattccaaaagcattggctgctgcaaaagatttcctggcaaaaatgcaataagtggcatagctaccctgaagcattggcttggagagttagccaacgaaatccaagagaggctagagaaggatttggacgagaataatcgtacagccaaacaaatgacagtaagctacgcacagcaatttggacaaaatgatgtttccagtacgagaagcgttcccctggttggctacaatgctgaacggattgctgccgatgctctggaggccatcaaacgaaacaccgatgtgttccttaaatctgatagctccggtgcgttgaacaagcctatcaagtttcttggcatcagcgcaggaaaatttgacgacaacgtttccgggaggaaaagtgagttaatacaaatgttctcaaatattgctaacaaagcgaaagaaggtgaatcttcaagagaaactgtaattcctcaaccaacccatccagcaaatccgcaggaaaagaaaaatatgaaatatttcttcaagccacctgatgaagtgaacgaaaccggaaacagcacaactcaagacaataatcaacttaatgtcccactcgaagaaaagcagggaagcagtaatacaaatgccaaatcaaatccttgtactattgtgagctttttcgagaaaacttccaaacaaaacgctgcagttgagaagcccgaagaacctgatgataatttggctgatagacaacctacaattgcagaaatggaaacccaactgtttgaagatctatcagccccgtatttgaacgacacacagcctatggaaaaagcaagccatgttgtggaaaatctgaacacgctgcagccgtctccatctgcagcggtccttctggatgcagttaatggccaagagagtacatcggtagcggccgataaatcatcattcttggaggtgaagtccgtagagaccatcaatgaacaggttgatattgtaaaggtgactgaagaaccaccgatgaacaacgattcgtcccagttagactaccgccaaacatacgccgaatttagccgaccacctagccttcctaatccagtacaaaaaccatgtcccgaatgcggaaacaatgtacctgaaaatgaactgcaatcgcatctcgacttccatttcgctctccaactcagtcaacagcaacgggaagaattccgcagtgaaataaaaacgaaatatgtgtccccttccacagcgaagcccaaaaccgtatcttcgactctacgggccaagcctaaagctcctctaatcgataagttcctgaccgcagctaacgcatcgaatacctccactgacgacgtgacgaaagcctgttccgaatgtggcaaactcatcccaacggcaaacatgccggaacatctcgactaccatgctgcaaggaagctgcaaattgagctgaataaattggaaatgcacaccgtgaagtcaaacaaatttgtatctgtcgttaacaagagtggcaacgtttccaatggtggcctcaagcgaaaacgaccaacatctggcgataaaagtcaaccaactaaaacaaacagtttgtcgtcgtacttcaacaaaatgtgaactcaattaacgaacgagtctcacgtgccatgttaagtctctctttgttccattataatattcgtagtgttatgcagtgcaaaatgttacgttgaatattaagtttttattgccatagttcctaaatcgtaaatatatccttctgtctttagtccaaattgggcagacccttcctc

SEQ ID NO: 558 - DNA, 2185 bp, Aedes aegypti
atgggtaacaaatgttgcagcaaacgccaggaccaggagttggccctcagctacccgggcgggtacaaaaagggcgaaaactccttcacatccaacatgtccggcccgaagcacagcaatggaggcggagggtcgctggactcgcgctacacgccggaccccaaccgagggcagctcatcaagggaatccccaaggggggagttgacatcatccgaccgaggacgacaccactgcaccccggtttgagcacccgacggatagtggtggccctgtacaactacaatgcccgcgaggaaaccgacgtcagctttgtcaaaggtgaccggatggaggtgctggacgacaccgaatcggactggtggcgcgtggtgcacctgaagacgcgccaggagggcctgattccgtggaatttcgtggccgaggaccgaagtgttaacagtgaagactggttctttgaaaacgtctcgcggaaggaagcggacaaactgctcctggcggcggagaatccccggggcaccttcctggtgcgaccgtccgagcacaatcccaacggtttctcgctctcggtcaaggactgggaggaaagcagaggctaccacgtgaagcactacaaaatcaaaccactggacaacggtggctattacatcgcaacgaatcagaccttcccctcgctacctgcactggtgctggcgtattcaaagaatgccctcgggttatgccacgtgctgtctagtccatgtccaaagccacagccacaggtgtgggatctgggtccggagctgcgcgacaagtgggaaatcaaccggaacgagattcagctgattcgcaagctgggtcatggcaacttcggtgaggtgtattacggcaagtggcgcaacaatatcgaagttgcggtcaagaccctccgagagggcacgatgtccacacaggcgttcctgcaagaggcagccatcatgaagaaattccgtcacagtaggttagtcgcgttatacgcggtctgttccaaggaggaaccgatctacatcgtccaggagtacatgtccaagggcagtctgctggactatctgcgaacgggtgacggacagttcctacagtttgaagaccttatctacattgcggcccaggtggcatccggtatggaatacctggaactgaagcagttgatacatcgagatctggcggcccggaatgtgctgataggggagaacaacgtagcgaagatctgtgattttggattggcgcgggtgatagcggacgacgaatactgtcccaagcaaggatctcgattcccggtcaagtggaccgcaccagaggcgatagtgtacggcaagttctcgatcaagtcggacgtctggtcgtacggtatcctgctgatggaactgttcacctacggtcaggtgccgtacccgggaatgcacagtcgcgaagttatcgagcagatcgagcggggctaccgaatgccaaagccaacgaatcacaccctgccggacgatatctacagcctgatgctcaagtgctgggatgcaataccggagaagcgcccgacgttcgagttcttgaaccactacttccagaacttcaccgtcacctcggaggtgccctatcgagaggtgcaagactaatgggcctctgacgcggcggggttcgtcttaagtgagaatgagtctgagcgatcttttcggtttagttttagcaagtttgggttttgtcgttctttcgggtagatcgtcctactctctaattgctacactagaacgttagaatttgtaatcatcaccttggtaaacgcattgtgaagcgcgaatgcacacatacacacactgagacatatacacgaacacacaaacaagcggaaacatttacaacactgctagaaggctaatcgtatgttcgtaaacgtaaaaaaactgtagcgtgaaattgaagcgatcgaaaacagccaagtttatttcattagtgggctagatttttagtaggtttggaaatgacgcgcgaaaagacagtcgaagttgtgggaggaaaacgaaactagtggatgtaccgtaaaagtacgtcaggggtggttgttatgatagggtcgttcacattgttcgttagcgttacaaatttctgtcgatgaaagttttaaataaatccgtacatggagattgtggctgtttaatcaagtcttctggagctgaaatt

SEQ ID NO: 559 - DNA, 910 bp, Aedes aegypti
gtgaacgcgaaacgaaaacgaaaccggaattttactttctgtgatactcgctgattatcattacataaaaaagttacttgctgttcaaatccactacgacgcaatctagcgacaatttcatacggcgacggttccagctatgtcttgtactatagctgaactctgttagccatcgcccttaaaaccctgttccaaatgaggatctcctatctacactatcgcagttcgatcagttcaatgacctacgtagacctcttcgatgaactatgcttagcaagtggcttaccatagggttcgtagccctgattctagcattcgcaacggtgcaaagtgccaacatccaggactatcgccaaccaggaaacccccgcgtattcttcccgctcgaagtgaacgttccggatgtgatcaacgggttcctgtcagccttccggttcctctggggtcgcctccaatcaatcgtcggctacagcggatcttcgcaaatcattggggccaaagatcctccgaaacccctcccagcacctctaaccccttcaccagcccttcaagcagttccgctggccccggaagaagtgctcaaatctccggttcagctcgtttccgtagaggtcgatgacccggtgcgacacccttcagtgtatcataaaacgaaaattcggcgcaccaagcagaagccgaagaagaagaagaaagggaagattgccccctcgctggtttccgagtgggagctgcttgccatggaggagggctggatctgaacgagaggaaggtcgttaaacgtcggcgggacttagtgaaaagtgtcgctttttgtacatagctcgggtagaatgtaggtgtcgttatttatctagctaatttatttgatgaccagtgaaaataaaagtgaaatgatgagaaaaagctg

SEQ ID NO: 560 - DNA, 1642 bp, Aedes aegypti
aaacgtcaaatccaagagtgattcgtgaaaaaacaaaacaaacgatccgttgaatctgcccgccaccgacaaatagaaattttttttagttggtacagataaaatattttcagccgcagaaatcgatgtaattacctcataagatggccttctcgtgcacaatttgtaccgatatattcgtgtcgtcggacgatatccacgtgacgccctgtggccatgcctttcactacctttgcattctgcagtggctggagcgatcgaagacatgcccggagtgtcgaaacaaatgcatcgccacgagcttgaccaaagtatacatgaacatcaccaccaacgtggacaatcccggggacaacgcaatgctgatgcagaacttggacaacctgaaactatcgttacgggagaaggatacgaagctgaagaacctggaggattcgcaagccgctcacaaactggaacgcaaaaagatgaagaaactggtggcttcgttggagggtacgatcaaaggtcaagattgcattctttcaacgctgaggcacgaaatggacaagctacgggccgagcagactgcccatcaacgactcaaggaagatatgaaaaaaatggagaataagatgcagctgatgaagacggtggaaatggccattgggtcctctaccaaagagatcgaggatctagtagcgagcaatagcaatccccaaacgctggccgtgttggtgacgtcgttgaagcgagaactgcaggccagtgagttcaaaaggaacgagcttcgcgatcggatcaaaacgtaccagaatgatctgcacaaggagcgcgccaagtgcaaggacctggaagacaaactgtccacgtcggatagtgagatatatcgactgcaacgagaggtggacgcgttgtccaagcgaaaggccgataccgacgaagatccttcggatagcagcgtagtgctgaacacacccgatcaaccggtgaagcggaagcgtaaattcgatgacttcgatatgaacaaatccactccggtggcggataaggtgcgcaacatcattgcttcggattccccgtttcttcccatcagagcatccgccttcggtctgcatccggtgtttcggaaggggctcagtgcggcagcgttgagtaggaaagaatccaccaccggaacggccctcacgaaaaccactagcgacctgagcgataaggtttctggaagccttcagccagcgaaacacttctccattccttcgagctccgcctccaatctagtggggggattgatgaaaaaggaaaatgcaccaagtatgctggtgccgctcaccaccggccggatcgtgaccatcaaccgagggatgaaaaagaaggcggcctctagttcgaacctggccgcctcaaacaccgctccggatgatttcctggaacttgatttggacagctagctagcacgatacaaatagttaggcaacttcgaaattcgacgtagcatttaataagtatttaagtgatacaatttacattctgacaaatgttccaggtacaataacacacgcttaaagcagtgagagctgacgttgaaagtttttaataaacatttgttcaaccaattgttacactgtttaaaaaaaatagaccaacactgactcaaaataaa

SEQ ID NO: 561 - DNA, 556 bp, Aedes aegypti
ggaacttatgatgatagaggtctgctccgatgaagccacccgcgatgatgacgaggactccgaggaagaacctttacgcataggtggccgaagcagcagcgctgtggtgtcgctcaggatggcagggtttttgttcccactgcaactagaggaagacattgaacgtttggaggcgatggtcaggaaagatctgaccgtacgagagcaatacattcgattcgttggcgccacgagggtaggcgaccctcgaaacattgtgacgtgcatcaaaaggttcttcaccgacaaatcgctggtgaactacacctacaatggcgtcagcaatccccaatatcctcggaaagcaatgaaggaatacgatatcttcacgacctgtttattggttgcctgggaggaagatggcatcacggcggacgtcctccggaaatggctcatcaaggcaacacagcgggcgaagcagcacctgtcctcggcccggtactaccaacgctatcgggaacagctgctggacaagcggaagagcaagtggaggaacaaaaggacatccaccgagtga

SEQ ID NO: 562 - DNA, 1452 bp, Aedes aegypti
atggccgagcagaagaaagttattctaatgtgctgtttgacctcactgagtacgagtttcatgcagcaatttcaaccgcagccgctcctctcgtcgccacagtttagctttaaaacgtcccagcgaagcggtcgccatctgctcgtcgtcaatggggtgacctttttccgaaatcgacaccgtaacaacaagcagtactggaagtgcaaccagtactacaagtgcaagtgtccgtgcatcgtcgtgatcgatgaaatcaactcgcgcatgaacgtgaagcacattcataaccacgatacgtccggagccagcggtggtagtagaagaaatagtctgctgccgcccattctggaccctgggagttcaaccttggcgggatcttttctgaacgatagtctactagttggaggcaatagcgcgctggctgctgcggcctcgttcgcccaatccgtgcaatctaggggtatgcaaccggagtccgatatggaggttgccatgttctggctcaacaaacgaaaagctaagaagttgctctaccgaagcacaagccgaatgggtaaagcgatcatcacaatcgacggttacagctttcggaagtcgtgtgccaaggagaagcgcatctactgggtctgcaccggtgtcaaaactaaaaagtgcccggccagaattaccacctgtatcaatacggaaatcgaaaggaagtaccagaatcctctggctcatcatatcagaataccgcccaacgtagacgatggattctaccattcgaaagcccagcttccgctggatctgcgaatggtgatgggccgcacgggacgaccgacgctgctgatgggtggccacgccttcacccggaacaatactcacaaaaacaaaacgtactggctgtgctcgaagaaaaccgatgacgacgagaaagcagcggaagataacttctacttcgtccgcaccgctgacggacgctatacaattcaggaagatggaacgagctcaccgaaggcgaacgaaaaaccaccgccgccgaaagctcttcaaacggggacacagattcgtgctgggtttatcttccccatcaccgaaggcaaggaggtggaacgtttggagacccttgtggcgaaagatcccgccgtcaggcaggaatatattgaagtcctgaaacgcaagcctaagggtatcaccatcgtcgcctatatgcagaacattttctcggacgaatcactcattggctacaactacaacggagtaatggtgctcggaaagcgcaaacgtgctatgagagtgtatgaaatattcactaactgcttcatggatgcgtacgaatcggaaggcctgacacagttcgagctcgccttccagctgacgttggcaatcaagcaaagtcgcaaccgaatgagacagcgaacgttccgtgcgagaaaaactattaagaaaatttgcgaaaagcgaaagtaa

SEQ ID NO: 563 - DNA, 1589 bp, Aedes aegypti
agatccgctcgatcccaaccttaaccggttgctcttcgtgaaaggacgacgagggccgaagcttatcttcgatggattttcattcaaccggaataaaggccacgggcaggccacgtactggcgctgcacgcgacatcactcgcacggttgccgtgccaaactggttacttcgaacaccggccggaaaatatccatcggcactccggtgcattgccacaaagcggactacgtcgatttgttatgagtgggatgagtgatagaaaaggacgatgcacctatcagattgttagtggaaagatacattctctatcacagctttttaaagatcggttttgtacaataaattctggatcgcgtccatgaaaaattaaatgctgtactagagtcgagtttaaaagtttattttccaatgccaaagacatcaatatggatggaaagtaggatcgctgatgcaaatgatgcatcaatggatgaaaggactagcatccaaaactaaataaagacatagtacccaagtaactaaatagtgccattacatagcagacaagtcctatattagccgtataatagccttataaggccaagaaagcggtagtcgggctcagaatggataccacttctagtacttcattcgatcccttggtactgcactcggtatctaagtgtgacataccgcagtacaattctcacaaaattctagatgtagctctattacctcacgcgccaaaaaaatttgggcaactacaatggatacgaagattctctcgcaccacgatcaaacaccactcggctactgttcatgatgggacaacgtgggccgaagctcatctttgacggattttcattcaccatcaacagaaggaataagctggccacgtattggcgttgcacgcattcacgtgagattcggtgccgggccattttggttaccacaaactagggcaagatagtatccaccggtgcatagccacctggctgattatcccgaattgatcgaatgaatattgttgtgcgggatcaaattcacgccaaactagtagcagacatcgtgttcatagttaacaatcagggtggtattcagctgagcgtcaatggatttccatacatccgttcgaagacgaacgacgacgttcagtattgggcgtgtagtcaggccaaagtgttgggctgttcggctcgtgcctccgttcgccgccgagagccgggacaaaaaccggccgtcaagctcagcggctgtcacaaccatctgatcattacggaacgtcgcaggcatggcgagagtgcgatgctgaagatggcccgtggacggaaagtgctgccggagaaaagacaacgccagaagcgagcaccgaaagaataaatctgtgggaagagctttgtcttgatattctagtactgcgctatatttaaactcgtctgtattttaaagtagtaatgtaaaacagatcaaatagatgcagtcgatggcctatggacaagaagtattgccggatttgatagaataaagctgagggaacgttttatgttaatattctagtactgctctatatttagtttcgactgtatttcaaagtcatgttaaaatagat

SEQ ID NO: 564 - DNA, 420 bp, Aedes aegypti
atgcagcaagaagaaaacctgcagagcacgggccgtgacgcgcaacggcaaccagatcaagctcggaaagtcccagcacaatcatccggtgtcgcggatggcccggggaccgttggtcatcccggccgacaatccggtgacgatcgtctacaaggacgaaccgctcgatttgaacgcttcttcgtaatcttgtcatctaatttctacgtgcggtacgtgaccgggttccgggggagccgcaagctgaaggtgggcgaattcagcttcaccaaaaacaaggagattgccaacaaaacgtactggtcatgtgcccgggccggcatgaacaagtgcaaagcgcgggtgttgacgtacacgctgaaaaatggcgaggagaatctggtggtgcggtatcccacgcacaaccacggtccgttctag

SEQ ID NO: 565 - DNA, 712 bp, Aedes aegypti
gcattcacagatttgttgataccaatagagatgccagagcggccgccagcgacgacgaagacgacaacgacgatgactaaaaagcttttccgagtccagcagaccagaccaaccattttttctgccgtggaaggattcgtgtttccgctgcaatcggagcaggaagtagatcgtttggagtacaccgcccgaagcgatcgaatcattcgcgatcaatatatagcgcttctacaggaagtgaaaccgcaccatcaggatccgtccaacgtgtttgcagatctgttctccgacgaggctctgctagggtacaactactacgggaaaaccaatcaggccaagaaaaagaaagccatgcgcaagtacatcatcttcaccgaatgtatggttgatgcgtggcttgcccacggtgtcacggaagaatgcctgaggatagccattgtgaaggttattgcccggttgaaccacaaagtgcgaagccggggatatcgaaggaaccttaccagcggcaccacagcacagcaacaggttgaaggcgaagaggaaggctattgagaggagttgttattctagtactacccattccagaacgtcgcacgggaaatttagtttaaggattaattggagggtagaagcaagtagtcttctgttaacgaagacactgcagtactagattggttcaataaagaatcgatttaatgtttgatgagaaact

SEQ ID NO: 566 - DNA, 597 bp, Aedes aegypti
atggtttcactaacgaaaggtttccagcagctcttcatccatgggtacggcttcacgaggaagcaggtgcgcaagaaaaccatccgctggcggtgcgctcagttcaaggctttgcgatgtacggcccgggccacgtccgtcaacgatctcgctggccaggtcgtttccatcaacggcgagcacaaccatgaaatcataggagcgcgacgccggaagggcgatctccagcaaatcatggccgagaggcgagccgagcgttccgccggcgcaaaagctaacgtcgtctacgtacagacaaaccgtggtatgcgactgtcaatcaatggatatttgttcactccgtggaaggcagtgaacaaagttggaatatggcaatgtctacagtcgaaggaaacgggctgctcggtacaggccaataccgaacggaccaagagcggaaagcaggctcgaatttccatccagggacagcacaatcatccgcccatcagggatcgtcgcaagtgcgagaaaccgtcgataagaacctacagcagaacaaaatcgaaagctcagacggaacaacaaactgcttcagcgattgatgttgacctaacctaa

SEQ ID NO: 567 - DNA, 4510 bp, Aedes aegypti
atgcacgatacctcgctcacggcgcggtctacttatgggatcttatgggaacatcgaccccatccctcgcccagctcgcgtttccatgctgagcgcgtgaaaaaagccctggcgagtgatttgtacgagcaagttttctattcgctggatctgatcgagaaggattacttcggcctgcagtacaccgatgccaacaatgtcaagcactggctcgatccgacgaaggccatcaaaaagcaagtcaaaatcggtcccccctacaccctccggttgaaggtgaagttctactcctccgaaccgaacacgctccgggaggagctcacccgatatcagttctttctccagctaaaacaggatctcctcgagggtcgattggagtgtccggacccacaggcggccgagttggccgcccttgccctacaatctgaactgggtgactttgacgagacggtccactcggcggtaaccgtgtccgagtttcgattcgtgccgaatcaaaccgaagaactggagctttccatactggaggaataccggaagtgcaacggccttacgccggcccaggcggaaacgagttttctcaataaggtcaaatggctggatatgtacggcgtcgacatgcatacggttctgggcaaagatggctgcgagtaccatctcggtctcacgccgaccggcatcctcgtgttcgagggcatccagaagatcggcctcttcttctggcccaagatcggcaagctggacttcaagaagaaaaaactgacgctggtcgtggtggaggacgacgaccacggccgggaacaggagcatacgttcgtcttccggttgcacaacgagaaggcctgcaagcacctgtggaagtgtgccatcgagcatcatgccttcttccggttgcgagccccggtcaagggtccctccgccaggcagaacttttttcggatgggctcccgcttccgatactctggcaaaacagagttccagacaacgcagcagaaccgagcccggaggacggtccagttcgagcgacggccctcgcaacgtttcgcacggcgacagtcacacgtgcttcgcgaacggcagaagcaagtccagcccgaccagccggaacaatcctcccaacagccccccttattgtctaccgctgatgatgcccagcactccacctccggaacatcgacgccatccgcgaacacggtgatccacaatcacatctcggcctcggccagcagcgcttcggacatcgggctgcacgtggtgaacggcaatctgccgtcgctcagttctaacaagtcaatctcatcgagcgaggatgtcacgttcggcaagctggggtccttcggcaaggccggaatctcgtacaagcccgaagagccgctcggcaagctgatcgaccacgagaacccattcatgcgggttcccggtcaccaccacggcggttccttcggcaaggcttccatcagttccggtttcagcatcaaaaccacctcgtccgatcgggacagccacatcgacacgctgatgaaaaccattgccaaggatccgtcgccttcgctgcacggcgtagaactgaacgatgctagtagctttaagatcaccatcaacaagacttccgagttggagacgaacaacgacacgctgaagaagctggccaccggaagcagtgcggcggccgagaagcccaacaatcagatcaagctgtcgaacgctgccgtgacgccacttccacccgggcagatcaagtgtaatattctcaaagcacgcgttgaagaggaacttcacccgaagttgaccaaccaccagctgtacgttccgctgaacgacggtccagattctctgagtgcggccacatttgtgtcggtggtaagtgataagctaaccttgaacctaactgggaccacgactccaacggtcagtggccacaccacggtaacgtcgatgctgtccagtccaacggcggtcactccgacctcgccaacgcaatccctgaagagtttcctctcgccgatgactccaccgccctcgctagtatcaaccaccagcaccactgccgtccacagcagtcttcccgaccagggaacttccctgctactgaacggattcgcctccccaccggacaacgtaaccgtcacgcacttctccgagcagaagggcggaatcgtcgagaagatcagcgttccgtcccttacctctatggccaccagtcccaccgtagagaagatcgccaacaacaaccccttcctgaacatgtcccatccgtcctctccaaccgtcccggtaacccccggcaagtcatccaccaatcccttccacaacatctccacctcgtccaacagttccggaacgtccgacgccggccttaactccgccgaaaccgtcagcatccctagctcccccctcgtcctccaaacgcccgagttcaagagtagcaaccccttcaaggactccagcggaggcctgaacactactagcagtagtagctctcgagcccgcagcaagagtcccgccatcagcaaaacggccctcagcagtcggagcaacagtggcggaagtcgcggaacgtcccccatcagcaatggacacctcacgccgaatgtgatcgaactgaagaggaatcccagtctaaggagatcggtggccgaggcgctcaagacggcggtggtgtcgacgagttcaacggatgccacggatacggcggcggcagcggtgacagctgcgtcggccctgagcaacggtattctggcgacggaaagtaacggaaaaaccggaaaaccgaccaaggaagccctgaaggagaacatcaaaccctactcgatggacatctcgccgtggctggtctcgtcggatgtggttaccgggtcgagcaaggccaaggaggccaccatcatccggaagtcggtcatcaccacgcagctctaacttttggggggctcggacggaagctgttgcttttttagatttttaggtgtgtaaaatattttttccgatagaagagatggacgaaaattgttgtttctggattactagaggttcaactagtaactctccgattcggtttcgttcaagtaagtttaagttgtttgttgttagaggttagatgattcgaagtgactagatttttttgtttgttggagaaagggacgagtattctttcttgattttagccaacggtattgattcgttttttaaaggaaacatttgaacttgctttgcaatagaatattgaagttagaatggagttctttttttttatttctacgaacgtgaagatcaaaaatggcatattcagcatctctgacttatctccagtgttgccaaaatacttaattttgtttcatgtggactaattttcaataaagtttattaataaagaattacgtttgtacaataacaaatcatgtagaacatttactttacttagtcgtgaatttactaggctcaagatccgccaagcattatggagccggaaggctggatctggcggaaacagtccattgacaagtcgggattaaacatgcattaaatggaactaaccgcaacttctgtgtaacctgcgtagtattatgtgatctcaaagcattccaacttctgtataacatgttcctccggaaatcattgaaccacgacccaagctgcatgcaggtgtatcgctattttccttatgaaatcgtttgtcttcatattagcctatgttttcaacagcttaaacgcaactcatatgacttaattgtgtggatgtcaatccaagtacttaataccgctttgatgcagctcaaatggtacttacctagtagtgtgatcccgaaaaataaaacatcgaattagttcttagcctcatgtacttttccattatttgcttcaactacccggaacctattgggaagcctttcaacgagcactgaaattcaggtgccatgattgaaacagaagaacgaacctgaataactatgaatcgataacctttaaaaaaagatagaacgtagaaagttagcccaactgttcgaacaattcgacagaacccctaactgctaagtgtatttatttgggagtgagttggatttcgttcgaactcgtaataattttaaaaattattatccaccagatgctagtatatttgcgctagagaggaaacaattttccaaacgtaatcaaaacgaaaactaggaacaaaaagtgagacagagaatcaaaattttaccgccgccgtatccatatacaaccagattttaagtagatgtctcgtgtagttttggaaaacgcagagtctttttatacatatacatttatgaggggaaagctcgtgttcatctacggcacgaatcaattgtcaattattgtgtgtctgacgaacaataaaaaactagtgcctgatcgaacagagtgaagagcccttcctccgatgcggaggagaacagaagatagtagatttatatatttgtgtatttagaggattttttacaaagaaataaaatgcagtgatatcattgtggaataaatgaacgtgaatataaat

SEQ ID NO: 568 - DNA, 544 bp, Aedes aegypti
gtttgtttcgaagaaattaatactgccgtcgagaaaaagatattcaatgcaactggcttcctgtttccgaacatcttctgtgtgcacaaacggttcagatttattagcactttatcaagatgaaatatcatcgaatgcctatcgaagattccgaacgagctttccgaattggtcaatctcctgatctaccatctgtgtatcgatatattaaagagaccgccaaggggaccatgattgacgaacaacgatcgtgttcctccgcaagcatgccacttctctgagaaagattgagccatgtacggctgcgccaagtaggtctccactgatgatgaaccagaagatcgaaggagacagacagagggacaacaggaatccggtatatccatcggaagatatgctaaataaatatggatccgtggttgtatgtggtgtcagtaaaggcaaaggagctgaggaagctacggaggagtcgtataaaaagtagtgtgtcagtgtttgctaatttttgatttttcattatgatttaaatatatgaaaactaatg

SEQ ID NO: 569 - DNA, 1824 bp, Aedes aegypti
atgatagttaactcagtcagtcagttactgataacatttttgcaggtatcaacagaagaccgcattagtcaaaatatctgcgctatatgtcgtatacgattgattgaatttcaacagtaccgtctgagatgccaagaagtacaaggcgtactgcaggctaggctgcaggatgaagatcatggtaatagtacaaaatcgaaagcgcaatcgccaattattgcagaagccaagaaaagtgctccaccgattcaatgtgaggtctgccataaggtgttcattgttcaacgacaactggcggatcacaggagggttcacaggcctaagaatgaatgcaaatggtgtggaaaagcttatgtagaacgtcaacggctggagaagcacctgaaaactcatgaaaatgaaatacttgaggaacaggagagaacaaagtctgtggaaaacgtgccaattgcagagaaaatccaaacagttgagtctcaggaacaaaatgttgagccaagcactgaattagaacaaaataaatcctctgaaaattccaataacgggaatactgaactaggttcaaaacaggtgaaactggaaactgattctgctagttcgtcatttgtgcttgatacggacgtcagtgttcgcgatgaagagggacaagacgaacggctatctggtgttgatgatacgattgacgtagaggaaacgaaaatcgaagtacgtaatgatgaagatgaagctgatgagttagaaccggacgaagttgtttcatacgggccgggaaatctaccagatatctctgagaaaactcaaaaagacgataattgtcaaggccaacgattcccgtgccccgtatgcactaaaatgtgtaaatccagacagtcactgtggtgtcacaataaggttgtacatggaccgaaaaactatccttgcaccgtttgtggatttcgttttgttacagaaagagatttgaactatcattttcggagtaagagacatttgaagaagatgcaggatacacacgaagaaagcgttgcagagagtacgaacaaagacatggaacatagcagtaaacctcatgaaccagatagtgatatcaatggtgaagccgaagctaaaactgattctgcaccagatgagccatccatcaacagtgataagcctgattcaccgaagctttcagtgaacagtgaatcgcttgcacaagaaattccggatgatcatcctatgcaagacaaagtggttcctgatcatagttctaatgtcgagcaaagtggtaacactaataatagtgatagtagatatgtatgtgaaaagtgtaatcgttcattcaatcgacaatgtcagttgaagaatcatatgaaaattcacgatgacgaatcgatcggtgtgaatgatgcagagtctagcttgtctgaggaagatgattcagattatggacaacgtgcttcaaataatgaatatttcatagaaggagctaacggtgaactacagttgcaatgtgacttatgtgacagagtttttcaagaaaggaagagactattggatcacaaacgacacgcacatggaccgaaaaatcatccatgcaccgtatgtggaaaaccatttgtgctgaggagttctatggaaaaacataagctaacgcatcaacctgagcgtaagaagcgtcgtttgaggacagttgaggaaagatctagcgttgccagaccgttcaaatgcgatgtttgccagaagacttttgagcgtagcaggaacttgatagatcacaaaaaatatatacatggaccaaagaatcacgagtgtgaaatttgtggctttcgattttctttgcggtaa

SEQ ID NO: 570 - DNA, 2128 bp, Aedes aegypti
atgtctgatttggaggaaattggtgatatgagcaatttcgatgcgtggctagagaaggatttcctgagcaaaatcagccggctggagacggaatgtgaggattcgagagaaaagatcaagacgttggacaaggatctgaagaaaaagaccattgaatgtgatattttgagggcaaaagtaggcaagctggaaacagtgccgtcgaataatgcagcttccactgaaaagatcgagattttggagaaagagctcaagaggaaaactatggagctcgatatcctaagatcaaagctgtctaacgccgaagcaaaaccagagggatcgcaagacctggctgaaagggtgaaacagttggagaaggaattaaagaagaggataatcgagaatggaatactgaggggcaagcttacagacatggattcagaaccccaaactcccgaagcacaggaaaaagttgatgaactggttcgaggtcttcagcggacggaaagtgtagtgctgaaggagaaggttagagaacttgagggcgaccacgaggcatcagagagaaccggcgagcttgaacgagaactaaagaaaaagaatatcgaaagcgacattcttcgatccaagttgaagcaatttgaaaacacccctgcatccggtcaagagtcaagcgacaaaatcagagatttggagaaattggtgcggaagtatcagatcgaagctgatattttgagagccaaagttacatctatggaaagcgatgccgccaacaaggatgaagacgagtctaatgaacggattgaggatttggaaaaaggtcttcagaggagcacaaccgaaggaaatatgctgagagccaaaatgcgaatgttcgaaagcgaatccagtgctgcatcggattccaaaaatgagaaaattgaggagttgcagcgtggtttaaaaaagagcaccacagaaagtactatattgcgttcgaaattgaacgagttggaaaacaagcaaacagcatccggcgcaagcatctacaaggtagaacaacttgaagctgagctaaagaaaaagaacattgaaaacgacattctaagatctaaagtagagcagttggaacgagttccactagcagatagtccagcgaatgcaaaagttgaggagcttcaaaaggaggtcaggaagctgaagattgaaaacgatattctgcgttcgaagctaaatcacgctgaggaagagccgacagagtcacaagaatcgacagatcgcataactggtcttgaaaatgaattgaagaaacgcgttattgaaagtgatattctcagggcaaaggtcactcagctggagtgtgaactgtcgcccaccaaaaactctggagaacgcattgaagaccttgaaagtgaactgaagaaaaagatgctcgaaaacgatattctcaaatccaaggtcacccaactggaaggggaagtacttgcaagtcagtccaacggcaagaagggcgaatcacaggaattgaagaagctcaaagaaaaacacgaggaagtgttgaacaaagccaaagaactgctgttcgaacgcactaagacagtgaaaactcaggaaatgcaaatcaaggcactccaaaatcagatcgaaaacatcaaggaagtcgtgacggttacgaaggatatgctcaacattcgaaatatggagcacgaacagttgcagacccgcttcgagaacattgatagtaaaatgaaggctgaacgggagcgacagacgcttcttgaaaagaaactggccgcctcccagaagctgtataacgatctgagggaagaatataccaagcaggtggatctcttcaagactacggcgcggcaagctggcctagactttcccgtagcaaaaaaataggtctctctcacttgtcattctcgcactccgggatacagcatcgatcggagaaaaacgcattcggagcacccactaactaccattactacttcttactatactatgtgtatttactagcgcaccaaactaccacagccacatactacgtgttattattagtcacgctctgccaaccaacccacttgcttctgcatcttgtagcatcgtgtggaatggtggtggtagatggacgatgcaaataaaatgcggtatactgcaaatg

SEQ ID NO: 571 - DNA, 1768 bp, Aedes aegypti
atggaattctcccgtcgaagccggctacgaccggaagctaaattcggcttggattcaatgctggaatggctgattccacacaacgtagctttgtacgcgatcccgccgatggtcgatctgtccattacggagctgcaattgttggccctggaacggttgaaggtgctccgcattctggagcaggccaccaacaagaacctgaagctgtcgtcggacgagggacgcgaaagcgtattcaatgagatgaaccatgccggcttgaagcactatgtgagattgtgtcagggtaaccattccaaggaacaggacattgccgctaggaagaaggattatctgtcgcatttcattctgcgattcgcttactgcagtacggaggaattgagaagatggttcatcacccgagaaatggagctcttccgtctgaagttcgccgggctttccgcgcaagatgtgaaggatttcgttctgaagtacgaaatgggttactccccgctgactccagaccaaaagaacgaaataaaggatggactgtacgacagcaccctctaccacagcattgttcaaatcgaatcgatggatttctacaaggtgcgtttcacggaggttctggacctggttcgaagtcgaaaatgttatctgaggacaggctttgcctacgttggagccagcgatttcgtatcgattatcgccaataagcaccagcagcttttggaggacggcttacaggctcacttgcgactgctgcctgaaatagaaaacgacgaaaggttcacgatgatactcaaagaactgcacacgtcttatacgggtaaggactatagggtgtccaaatcgggacaggtccccatcgaaagcttagatcagttgtcgaagaaatccttcccgttatgtatgcgctactgccatgatacccttcgttcaaagcaccatctgaaacacggaggtcgtatgcaatatggtctgtttctcaaagcgatcggggtaacgatggaagactcgttgcgcttctggcgggaggaattcactagaggcaccgttacgctggagaagttcgaaaaagagtacgcctacaacattagacataactacggaaaggaaggttcacgtgtgaattacgcggcctataactgtatgaagatcataacggcgagcgtaacgcctcaggatacccacggatgcccgttcaaaaactgggaaccatccgtactgaaaacgaagttaagctcatttggtttgagtgccgcccacgccgaagaaatctccggctttgccagtcgaggtcactatcagattgcctgtgggaaatactttgagatttcccacgacaccaaactggacgaaggcatcacccatcccaatcagtacttcgatctaagtcagataacggtgggagcaagggcgccaaaggtcaagcctcagaaccagaaccgacgcactttcagtagtcaggatacatcgcacgtggttcgcaacacgcaggacacggccacgttgaatggcgatgacgataacgagctgtgggagctgatggagagcaacgaaaaggaagggggagtcaagcacgagagtatcctgttggagctgccggccagtacacaagagaaacccgcatcgcggccggcggtgccaacgtccgaatggggagatgacgaggatttcgatgtttcccaggtggaaatggcttagcaaacgaggtaggtaagaaaagttatttcctgtaagcttttgagaaaaaaaaaacttggcaaaatatgtataattcaacttt

SEQ ID NO: 572 - DNA, 2465 bp, Aedes aegypti
gcagaagcagcagcaagtggttaaaaaaatctccaggcaaaggtcgtcaaaattaacattttttttcgaaagtatcagccagctggctgggagttgtgcagtgaagatgcgtgccatcggaatatcggtcatcagccttgcgctgactggcctggttatcggaaatgcgtactatcagaagaagcagttttacccatctgtggtctacatcacgaaatcaaatccaagtatggcggtcatctacatccaatcgcttgtgctggtcctcatgctggggaaactgatgaagaaagttttcttgggcaccttgagagcggctgaattcgagcatttgatggaaaggttctggtatgcgctcactgaaacttgccttgcttttaccgttttccgagatgacttcaatccgaagtttgtcgctttgttcactgtattacttttcctgaagtcattccattggttggctgaagatcgtgttgattatatggaacgaagcccagtcattggatggatatttcacctaagagtggcaggcctattggcctgtttgggtgtcctggactatgaactcatctcgtatgcatatcagtccacaattgaaaagggagccaccgtgcaattggtgtttggcttcgaatatgccattttgatgaccatggtgttaaatacagccattaagtacatgttccatgcagccgaattgcgatccgacactccttgggagaacaaggcagtatttttactatacacggaacttattattggcttcattcgcgtggtactctatgttattttcgtccttctgatggtcaagatttacacacttccactgtttgcattccggcccatgtattacacgatgagaaatttcaaaaaagccctaaacgatgtcatcctgtcgcgtcgagctatacgcaacatgaacactctgtatcctgacgccactccggaagaacttcaactatcagacaacatttgcatcatttgtcgcgaagatatggttagcaattcgaagaaacttccttgtgggcacattttccacaccacatgtttgcgatcgtggttccagcggcagcaaacttgtccaacatgccggttgaacattctgcgaacacccatcacgaccgctgcccccgccccagtgcagccagttaacaatgaagcagcaaatttggccaatgcgaatgaaggaaatcgctccagctctgttggaagtggaacggtgcccccacaatcgaatgcttccccattgcatgctacgaacactactgccgtacctttgttacctggagcgccattagtacttcccccaattccgtttatgggtattccaccgtacgcgatgcccttgccaccggtgccacccgctttggatacgctcaccgacgaagaattgcgggccatggaaggcaatgaacgacatcacgtcgaagaacgaatcaagcatcttcaaaatattcgcacactactagatgcatcggtggcacttatgaatcagtactccgcgttggtagcacgtttacctccggtagctgctcctgcagacgccactgcaagtaccagccaaaactccacatccgctgttccggtttcagattttgctactctaataaatccatctgcgtccagttccaaacaaaaccaaactacaacagacaacaccctacaaccaaaagttgtcccgacggtggcagccaagctagaagatctcggtagtgatgatgattctgtcaccaagctcaacaaagagcctttgccgagcacaagcaaagaatttcttatcaccccagatcagcagcaaccagtgccaagcacttcagcaaatagtaatagtaatagtaacgatgctaggcatacagaaagttcagaaatgagtgaaattcgtcgtagacgactggaaaagttcggttccaggatgagctctgattagatgactaattaacggcaatttatgagactggatcgagtttgctgatggtttagattggtgattaaaataaagagaaaaaaacagctaaatttttgtaattagtcagatatattcaatctactttatgttcctatacaaaagaaggaaaagaaggaagaaaaaagggcttattttattttcattcaaaaagcttcaacattttaactcgttccaaattatttgcattttagttttattcctgtcgtgcaaatttgttatgaataagggctcgttcagcatcactgcactgtgcgtttgtgcgcgtcgtatgcaactcgtacagctgagcctcgagcggaggtgtgtatcataaacaacagtgaaattgataatatagattgtaatcatatttgtaactgaatatgacacaaaggtaatatagtggagtaagcagcagcaaagcatattgtttatttaaagtgtactaactagtactggaagtcgttcactatttgtatatgtaaatattcctacatttcaataaatgtataaacaaaaa

SEQ ID NO: 573 - DNA, 474 bp, Aedes aegypti
atgctttccgtttcgttcctttccatttccactttcagagtattcggctcgagacgatgttcgaaatgtctggcttcaattagttcctccgagttagttatgcgagctcgacacctagttttccacatacggtgcttctcctgcgcgatctgcaataccctgctgaacaagggcgaccacttcacgatacgggactcggcggtgctctgtcggtcccatatcgacatccctccgctggatccgggtgcaccgatacccctggccatgcagtgccagtacccgagccagtacggaacctcccccagtgcaccgctcagcccgagcgactcgaccggaagtagtaaaatgcctccggctgggtacttttcgccccaccacaccgttaccgccctgccgcagcaaccccgccaaaagggacgaccccggaagcggaaaccgaaagacatcgaagcaatgaccgccagcttaggttag

SEQ ID NO: 574 - DNA, 1728 bp, Aedes aegypti
atgtctaaccatggaagtggtaaggacatcagcaacaaggaagcgcctggtggagcaccaaatggggcagcagctgcagcagggaacccaaatgggatacacgcccaggagcactcgtgtgagatctgcggtatgtcgggcttatcggatgacgctatgcgggagcacacccgtcagtgccatgtggagggaagtgcccaatgtcccttttgtggactcagcggagttccagcggcagagttgttgctgcacgtaaatcaagctcacctcgattacctaacgccggagaatgaactgatgagctttattgacgatcagacaccaagtattgacggtgattctgattccatttctgactgccgtgggttttctccatcgatcacatccgagcttctcacaccggtttcaaataccaacagcaaaccaagcatcagcaatggttcttcaacgaccaattcatccggacagcagctcccgaacggtaccagtagtcatagcaaaatcagttcttcgatgagcacctcggcgacgagcacctgtagtagatccagtatcggtagtcagcagaacggtattagtaacggtagtacgagtgcaagtagcagtagcaataatcacatgtcaggagctagcagtaaggtcaatcaacagcaactgttgaacaatcatcaacatcctgaagtgacgataactagtacaagcaacaaaagctgtgatatgctgaacgacggaaaggaagtggtcatgaatggaggtggtgcgggttgtacgagtggtgttgtggccggagcaagtggcacatctaccgtcaatggaacgggtgcgggtgcgggtggacaaggttctccactaagatcgcaactaggactcaagcttaaatcacataaaccaatcgcgactaccactacgaaacctagtccgttgcagtgtctgttatgtccttacacaaccgaaaacccatccgttttagaagagcatataaatcgatcgcactttgacccgctaagtcctagtataaataatggtgccagtggaaactcccacgtggatacgctaagtgcattgcagtgtccaatttgtgcgcgaacattcgaatccggttcggacctggaactgcatgtgaacattgagcatcgtgatattctgagtccggcgaaagctgatcgacaaaacggaggaacgcctgctgccgcggctgtgaatggaagcctcaccggtagcctctgtccggtttgcggaatttcgttcgatcacatgaaaaccgcggacatggaaattcacatcgagaaacatttcagcaaaagcccccagaatctgaacccgaaagaaccggacttggagaagcaagcgcaaaagctacgcgaacagcgagagttcgaaatgctacgtgcgcagtacggtatggatgatcaggggaactttcgagagcaatcggctgctgccatgcagagagcggtttacgctggtgagatgagcgttgcggattactacgaacgccaagtcggattacgcgcggcggagtcccatggggttgatgatggttcttcttgtaccaaatcggtttcacctcgcgtattggcactgtcgtcgtcttcgcctaacgtcctgaaaacgtacgtttgctccagcgtcgatcactatgcgtcgagctacggggacaaaggatggggctgcgggtatcggaatttgcagatgatgctctcgtcgctgttgcaggcaagttgttag

SEQ ID NO: 575 - DNA, 1515 bp, Aedes aegypti
atggaaccacgtaaagattactttgttgttgtccaaactaaggaggcaggaaaacttgttttaactgcggtcccgtatcgttggattcgtgatgggtttctgttttggcccggtaaaaatgcaaacagattgcgtatggacctgaactcagaaccaggcagtggttggagcaaaatcgcttgcagtgtaaaacggaagtatattccatcatacgaggaggccgaaatagaagctgctgagctatcaggacaaaacacggaaagctcagattcggcgccacaaaactccactacaaacatgcaaacgaaccaaaatcaaagcaccgggccggaacctacaagggcaccaatgaattcacagattgttgtcgattctcaagatctcccggatgtagctccttctttgctctgttctgccggcgtgaaccaggtggatgagacattctccacacatcagaccgtcgatcactcggtttacctgacaacattgcccttctccgtaaatgaacagcagacgacagatgaaatgcaaaaagttgccacggagggcgaatcggaatacgtatattttcagcagccaactgttgatatggattccgtgattaaagcagtttccggaaaaattgaagaagagtgttcaaaaatgcaagacaccatcctctctaccatgagcacgatgatggcctcattcaaaagtgacatggacgtgaaactggcagcagctttacgtgcgcaagctaaaccgtccgatgatgagaaattcacgttttccccagtgtcatccatcgagcaaattcacgagctggagaaaaatctcgcagacgatgcatacgctgagcgtttcatttcttacatgaaaaagatcgttggatatgttggagataattgtaatggaatgaacatttcctacacattagtggacctctttttcgaacgtaatgtgatgctgaaatgttcgtggagtggtgctagtcgcagttctatcatcaaactggccatcaagaattgcaccaaaatcctggacatcttttttacaatcgttcgtagtgtcaatattacgttctcccggcagcttttggcacaattcttcaaacaagtcacacgaaatgccaagaaaaggagtgaagcgaagggtttgcgacaaccgacaattcatcgtagagcaaagaaattgaacaacacacgatgtcaagcggacgttcctcctaccacgacctctgacggaacgaagagtgattggagcccttcgacagaagatgaatcacaatcgagtaaatcgtcttcgagtgatgagtcagatagtgagatgctagtgagcaaggtggaagagtctgaccctcgtatcaattcatgctaatgattttacacttgatttgactttctatatgaagataggttttaagtttgttctaaaccgtttattgatttacgttttttgaatacctatcgaatagaaagagatagacgaaactggaagagttgcttatacgtttttcgacaatgtaaacgctatcga

SEQ ID NO: 576 - DNA, 727 bp, Aedes aegypti
cggaaaagtaaaattttgctgatgttgttgtggaattttcgaagatttttcaaccaactttgttaaaaaaaagtaaattctacaacaaagtgagcattaatgaacaaaatctcatttatttttccgtgtaggtagtgacactcagagaaaaatattcaaaaaacaagaactcaatggatttaaaaacatatgtagttcttctcagataccgcaaaatttctgtgaaaatttgttttgacaaaacaatagaacgacgatctacattttccaattaagacaattttgctgatatttgagataacagttgtgtgcatatattgagcttaaaaaaaatattttttgaacatttccccccgagtatgctttgtcattgcactggcatttgaaaaagtctgaattcgtgatccgtgactacctcccgtcttcctcgttgccgttcgcggtttgctttcggatctcgtgttactgtttgccaccataacaaactgcaaaaaaaagcgagaaaaataataagagcagtaaaactgtaccgaccgtacctaaaaccagtcccggagcagtcgcaacacaaccataaacagggggtgttatgatggttggaataatgcaaaaataagaatcgaagcaggccgtggtgtagagtagagagccaaaaccagtttggctggtcgccgccgcctgcttcgtatgaagaaactgacgagaagaagccctgagcgtaaataac

SEQ ID NO: 577 - DNA, 834 bp, Aedes aegypti
caaaattaaggaaacgttagaaaatacacacatacactgacaaaaaactgactactaattaagagaaactatacaaaaactgtgatttagtggaaagaacacgaatatttatattgctactgagcgagagagtaagaaaaaaccgacgagaaaaaaaaaatcattgctattggttttttaaaagaacttattttattaagcagcaacaaatgtgagaaaaatatgcaaatgtaaagagaatcagctaaacacacaacaacattaacaaactgtgaacacacgtgtaacttttaagggagatgcttaaaacaaaagaagtgtacaacatgcaaacacaagatgaaaaacccaactgtaaatattattaatttcgagaggcaaaaatgttatatatgtatagaaatgtaaaaacaaatgtatgaattgttgcgagtccccctcaacaaagatcggctgcaaaaagatcccgggaaagggcaccattttgaactctgcaagcctgtgtgtgcgtgttttgttccgtttgtgtgcgtgagctcacgttttcgctgagcttgctaccgtttcgatccgagtgtgcttgtatattttcctataattgtagtgcttagtctccccatcgtgaaaattttggggcttagtcgcttgcacagttcaaagttccgagtcccctttccctaatgcagcactgatccacccaaggggtctatgatttgccggaaaagaaatcaataaaaaatgcagtattttttgtaactaaacaagcaaagaaaaaaaaatgaactgaaaaattgtacaaaaagagaaaaattttataagaaaaccgcacgagag

SEQ ID NO: 578 - DNA, 777 bp, Aedes aegypti
attctctcaacattacagatgccaacaacaatacactttcaatagtaaatagtgtggctcagattgatatagatgaaataaaaccccctaaaccccgtttaaacaaaaaagcaaaagcaactctgatatgcccacaggagaagcaagcgccttttcagttgataccaactctatgcagacgaaaccgggactgtagaaaatcaggcaataattttaggtgctgcaatcttttcgggagtaaaagatgtgtgcaaggtgttcccaaacctattcccgaacctcctcatgatcccattttcgggattccaagacgatgcccgaagcaacctttgacagaaacattttgggaaattaaaacttgccaaaccgacaatgattgctggcctcgtgtgtgttgtccagatggagacaaaaaatactgccgaacgtctcaacctgtatttgaagagtcagataaccccgcagctagacaactagcatatcctattgaatcagtatcacaatatctgcagtgcacgcctccccctcctgttatatttgatattcatccgaagtcctgtaacagcacattagattgctttccaaatctttgttgccaagaatcaggcaaacgtcactgcagacctcctaggcgatcgctgttagcactagtaactggtctcacttcacgttttaatattggtgttattaaagacattactgataatttagttattaaaaaataaatctcctgagataaagaaaacattgtaatttttaaaataaataaaacattat

SEQ ID NO: 579 - DNA, 2060 bp, Aedes aegypti
atgtccattgcagagcacattcacataaaagcacaaaataatccgctaaatccttcagctattaaagacatcacacgagccatcaagaaggccgtcgtcgctggctcgctggatgaagtgcgctccaaagcagcggagaaattcaaccgaccggaactgcccaacattcacctagactcggacggcaccgaggtagacgacgaggactacttccaaacgctggaacccaacgccgaactgatagtcgtcttccccggtgaacagtggattgatccaacccactatgtgacgataacgacccacaaggaaaccggcgatactaccgacagccccgaagtggaacggatacacctgaagaagctggtcgcccagatgaagtccaatctgtgcaacgtgtcggtcctgagcgaacccgacctggagctgctgtccaacatggaccccaactcagtggcggacataaccgggcgggacttcatcgagcagctcaaggaagcttcaggcagaatcctgcatgaaaagcgacaggctcttgacgcaattgagctgctaaagttgatcgccaagcagaaggccaccatcccgagcatcgtgcacaacatcccggggggtgagcccaacgaggacgatgacgaagacggtgacgatgacaattacgtggagggttgcagcagtatgagtatcctgggagatggccatccactccctctcgccccggacgatgtcgatggtagtagcagtagtgccaaccaaaggaggagcagcagcagtagtatcagcagtggcaagcaaatcaccctcgaactggatccccgaacactagccaacttccatcaccagtaccagcaagaccctccaagtgcgggcagtgcttcgggaggaaccctggtgcatcccccggtcaaccccgcggcctcaacggatcttgcgaatgcttccctgaacagtggtgccaaccctggcgatacgtcgaatatttgatatatggtttatcagatcaacttttgccacaagtaagtttcgattcaaagttgctcaatttttttacacgaaatcaaagaacaatccacgtaaccaataagccgtatatctaataagtagctaataagcctttgagtaccgtaaaccgagggtaaaatgagcactgttttacaactttttatattatcataaattcaaatattgtcaagtctattctgacaaaaccagtactgtattaatctctattggttaacgtaattattgttttatgaaatagcataaaattaacttaaatattccaaattaaaaatgtcacactggggtggaatttatatatgatgataaaaggttttataaataaaaatttccttatcctgaatctaaaaatgacgacaaaattcttgccatttgtatatttgaacatttaattccaaaattaaactttataaatcagcagattacgcctaggtaaatgtacgacccaaaataggaaggagatgataattggtaccgacctgattaaattcgccaagtgaccaatttgaccccggactacggtagctctgtattagccttatataaataggtagcccgatatatggcttgtggttacctggaaaacgaaccacgttgtacaaattgttgttgttggggagcagtcgttttccacgcacagtgcaggaacgagctccacatttttgcagccaaaatgacgagaaaactctatgatgtttatcgcagtaaatcaaaagcattgtcaaaatattacaagcacgcagttgaaaaactatacgttgaatgatactaaaagtaggaagagaaaaccaacaaacgtgaacactgtgaacaaaatctctgcccatacggattgccttaatttagttggttaaatacgagaataaggtttgacacgacgtacacgattatcagtttatagaatacggtaacgcttggaagcagctcccatactacgtgatttgcgtttgaatgtttgaatgccactggaccttgcatgttttattacgaagctcttttttctgttagaattatacataatacataatataatatacaagttt

SEQ ID NO: 580 - DNA, 1098 bp, Aedes aegypti
gtggaaacttatcgaagcattgcataagtttagctcctgatttttggtcccgtaattcaggcgagagatattttgaagtatttagatcaatatctaaatttgaaattcaaaacactgcgctgtttggtcttgcattgcctattaattgagagaagaagaaaacatcagtaaataattgaaatgatgaagacagtggctattctcgctgtgttgtgtggaattagtgctgggtactcaattcccgcacaaaatgcttatgcaagctttcaacaaccaacgggcttcaggactgttcagcgcactatgtatggagttcacttccagaatttccagaacgagcaattaaggaaccaacgtgtgtctgattttgttcctggaacgcacccgaatgattgtcaccacaatgacgacgagaacgctgattggcctgttcagaatactaatataggttctgcggccgatgcgtatccttccgagcagttcccagtcgaggaagaacctcatcaagatgtcccagctatttacgaagacgagtccgaggagccaattgctgatgaaccatttgctgccccagctgttccagctgtagtgccagcttcagttcctgaaaagaagaagaagaaagttccagttcagattgactcgaacgaagaggaggaacaggttgctcaatccggacgtcgtggtgctaaagactctaccggttcaggtgctttcttccccattaactttggcagcactaacggaggagccattgccatcgccaattcgtacagcaccggaaaaggaggatcagccaccagcactgctactgcctatggaagcccagcaacagctgagctgagaaggaattctgccactcagctaagaagaaagccttccaaacttcgaagccgacaataattcattggtgttagcttttttggaatacacagcataagaagtgtttttccataagcttcatgctctaaaaattcgtatttagggtaacaaaaactgatagttgtaggtagctaatatttattgtgtaaatagcaaaacccttccataactctattcaaccttttctcgaataaatgaaacactcagtgtgcaaaa

SEQ ID NO: 581 - DNA, 3501 bp, Aedes aegypti
gacatcagcagcaacaacatctctagtctaccaaataaatcgttcgatatgctgccaaatctggaggaactaatcctctcccacaacaagatagagcacatcgacagtgaggcattcttcggtctgtctaatctaaagaagctggtgctccaaaactgcggcctcgtacggataccagcggaagcgctgcgtcgagttcgcaccatctcatccctgcagttggacagcaatctgatagccggggtggaaaacgtaacctttcgtgggttcaactatctgaagagtttgagactggaaggcaatctgctgcaacgggtcccgacggaggcgttgatcggattgagatcattagaagctttaaacttaggaaataatttattaactacaattaaggcaggagattttccgcttttggaaagtttacacattttattagttaaaaggaatcagataagtgaaattacttccggtgctttatcaaatttaactcgtttaaaagttctagaattagatgataatgtgttaagttcagtgcctgttggcttggagaatctcgtgatgctgcaggaactgtcagcatccggaaaccgtatccgatggatctcaaaggatgatttcccgaaaagtctagtcacacttgagctcaaatctaatccgttagttggcatcaaacctggtgctctgcagaatatgccacgactccgaaagctaatactttccgatgtacggggcctccaagaactacctccactagatggctgcacttcgctcgaagtgctgcggatcgacagagccaaccttaccaaactacctgatcatatttgtaagacttcaccacgcttaaggagtttaaacttgaagtccaatagattgcgaatcattccaaatgtgacaaactgtcgtgatttaagagttttagatttagccggtaatagcataagctcactccacggagcccccttctctagtctcagccagctgcacgatctgctgctgtcgcacaacgaaatcgaatcaattccgcacgatgcattcgttggcctctttcgattgcaagtcctcgacatggaagcgaaccatatctacttcatccaccaggacgccttcaggccgctaatcaaactggaagatttaaacctgggaaataatttgtttcccaatcttcccacggcagggttggcacgtctgctacacctgaaaacgttcaacaacccaaatctgagggagtttccgccaccagagtcctttccccgcattcagacacttgtgctctcctacgcttaccactgctgctcgtttctgccgcttgtggccagtgctccaaaagttcctaagcatcatcctatcaaggaggaggtccttttcccgactgacaacgagttcgatatgagcttgtggaacaatagctacaatgacatctggccacagttacataatttaagcaaaaagtttggaacgcagattaatgaactgctgcacgcttatggtcctgagtactatccaggaggaatgccaacctatccggaagagtactttgaagaggaaggcggcgtcagtcatcccattcccacatcacaaccgggaacgattcaatgtgtaccagagccgggacctttcatgccctgtcaagaccttttcgactggtggacccttcgttgtggcgtttgggttgtgttcctgctggcgatgctcgggaatgggacggtggtgtttgtgctcatcttctccagatcaaaaatggacgtgccacggtttctggtgtgcaacttggctgctgcggatttcttcatgggaatctacttgggatttttggcagtagtagatgcttcaacactcggggagtttcgcatgtacgcaattccttggcagatgagcgccgggtgcaagctgtctggatttctggcagtactttcatcggaactatcagtttacaccttggctgtgattactctggaaagaaactacgctatcacccacgccatgcatttaaacaagagactatcgttaaggcatgccgggtatatcatgacaataggatggacctttgctataacaatggcaatactaccgttgttcggagtttcagattaccgtgtattcgctgtatgtcttccatttgaagttacaagtggaaccggtagcttagcctacgttgtatttctgatgttcatcaacggagtagcgtttctcatattaatgggatgctacttaaaaatgtactgcgcaatccgaggttcccaagcgtggaattccaacgattcccgaatagcaaagcgaatggcattgctagtcttcacggacttcatctgttggtccccgatagcgttcttctcgctgacagccgtttttgggctgcatctcatctctctagaacaagccaaagtcttcacagtcttcattctacctctcaactcctgctgcaacccgttcctttatgccattctaactaaacagttcaagaaagactgcgtcctcatctgcaaggcaattgaggaatcacgtgtaacgcgtggcattggccgctgtcgccacagttctaacttcagcaaccgtcatacacctgccaacacaaattcactggtagagagatcctctcgtgaactgccgccacttctaccaggtcaaacatgtaactgttcagcgaagctaatggaacaggagaatctccgtcgacgtctccaacagcagagtacattttccaaaacgtggcgcaggttactgtgcaacctagggcaacgtaacgatggccgtcgtggaagacggaacggtgatcaatatgcgtaccaaatcgcagaaatccaacagaaacagcacaaacgggccggatcggtatcgtccagtgaaaacttcagttcatctcggtccgactcgtggcgacacgcccagcatcattgtggaattcctctgcggttgctggatccacggcggaggcacacttcgtggttgatcacaagaaaaacttcccaggattcgaatctgtccagctcgaggaatgattcgtccggatcaaccgctacgcagagtacgggaacgtggcgaatatcacggtccagtgccagcaattcggtagttctgcccggggtgaaaatcgatggcgtaccccatccacatcatacaagtggcgcacgccaatcaatcccaggtggaaagccccgtctcgtgcggcagtcagccgttcaggatgattcacaggagctgtcctgttcaccgccccgattgggtgtacgtttcttgcccacgattccgtcggcagccgatagcagtattcagctggacgacgacacggccgaagcccgctccagtccctcgtcgtgtcacagtgaacccgccatttgcgatgtggatgtggaagcggcaggaaccggaaccagtgccgaaggtgcccagcaacagcaatcgcagcagcaaaacatgtctcccgcccccttctatgccatccttcacgggagcaatcctcaggcaaccgtttctagtctcaaagataaaaccaagccgccgtga

SEQ ID NO: 582 - DNA, 2463 bp, Aedes aegypti
atgtcttcgtacaggaagaacactcttgtagtggacttcagtgttctgccgaagcgtccctcaacggatcaggtggaggcgttcctccgggatttcgtgaaaatcgatatgtccgacgttaggaacctccaactgcatactctaaaaaattgtgtattcatagaaatgcacaatgcaggattacccaaccgtctggcaaaagagcaccatcttcgacactcgtttggacgcaacggtgtgttctactacatccccatctacgtggacggtcctactaccacaataaggatccacgacttatcgccgcagctgtccaacaccaccatctccgatcacttacaacaatacggcaaagtcatctccatcagcaacgaagtttggaaaaattattttgctggtgtaccgaacggggtgcgagttgtacgcatgcgaatggagaagacagtgccttcatacatcacgattgacaatcaatcttctctcgttacctaccccaagggcgagaaaactgcacacgagaataaagctggccaaaaacaacacccagaacaaacatccacctctgttaccaatatcgatcaatcattccacagtaacattccattcggtctgcacgtattagctctggttagaaaggccttatgtgtcgctactacttcgaaggtcaaagcagcagaaaagtcaagcagcccggaaccgaagccgaatcagtcgtttatgatgaacatcttcagcggcaaattgcaaacctcgcaactcttcccatatccagagcctctcaacgcagagcagaaagaatacattcaggcgttcatcgacccagttactcgattttttaatgagaccaacaaccgcatcaagaacgatgaaaccggcaaagtagatcaagagaccatggatatcgtttgggagttgggactcatgggtacttcgataccggaggagttcggcggtttggggttgtcgaacgtacaagctgcacgtttgagtgacatcagtgggggaaacgatcttgctttcacgatccatatcggagcacatcaatcgattggcaccaagggtattctgctgtacggaacggaagcccagaagcagaagtatctaccacagttgagtacgggacgtgtgtttggagcgtttgcgctgaccgaaccatcggtaggatcggatgctgcgtcggtgaaaaccagagctgtgctaagtccctgtggtaaatactacattttgaacggttctaagctgtggtgttctggaggtggaatagccgatatcttcacaacgttcgcccaaacagaagtagtggatccgaaaactggacagaagaaggacaaaatgactgcattcatcgtggaacgcggattcaatggagtgagctctggaccaccagaaaagaaaatgggcctgaaatgttcaataacaacggatgtgtatttcgacgatgtcaaggtaccggtcgagaacgttcttggagaggttggcaatggattcaaggtagcagttaacattctgaactctggtagattcggattgtgcgcaatgttgacaggaacgatgcgagcttgtattgagaaagcagcagagcacgtgtcaagccgagttcaattcaaacgcaagttgatggagtttgaaaatgttcaggagaaactggccaagatggctatgcatcattacgtggctcaatcactggcctacatggtttcaggaaacatggatttaggttcaactgattatcacttggaggcggctattaccaaggtttttggaacggaggcaggatggtatgtttgtgacgaggccatacagctgctgggaggcaacggttacatgcaagctccgggtctagagcagttcttgagagatatgagagttttccgaatcttcgaaggtgctaacgatgttctgagactgttcattgcattgaccggcattcagcacgctggcaatcaactgaaagggttacagaaggccatgaagagtcctcttacgaatctcggaaccgttttgcaggaagggacgaagcgtgtgtcacggaaaatgggggcaggcggtacggacttgagcggatttgtggttgatccgttgaaggattccgcaaagctttgcgcacagagcatcgatctcttcaatcaaaccatcgagtctctgctgataaagcacggtaaaaatatcgtcgaaagacagttccttttggcacgagtggctgatgcggctattgatatctacactatggcttgtacactatcacgagcttcccgatctgtccgcaaaggactcccatctgcggaacatgagattctgatgacccaggcatggtgcactgaagcaaactaccgagtgcaacagaacatccaacgcatccattccggagtattcaacgaaaattacaaacgaatgtcgatgattgcgtccaacatttgcagtcaccaaggtccagcccatacgaatcctcttgaggtggactga

SEQ ID NO: 583 - DNA, 381 bp, Aedes aegypti
atggcattcaaattctttgctctactcgccttggtaacagttgccagcgccgcagttcttcctgttgccctgaagcacattgaataccacgatgcccctgctgagtaccagttctcttattctgtccatgatgatcataccggagacatcaagagccaacaggaggaacgccacggagataatgtcgtgggacaatacaccctgatcgatgccgatggataccgccgaattgttgactacaccgccgatgaacacaatggcttcaatgccgtcgtccgccgtgaacctctgactcagaagatcgtcaaagctgtcgtcccggtagccaaggtcgctatcccagtggcaaagattgcatacccaacttactaccaccattaa

SEQ ID NO: 584 - DNA, 348 bp, Aedes aegypti
atggtagtttttgcgcttatcggagccatcgctgcccagcactattatcagcaacagcatcatgaagaagaacaccacgcccctgcccactacgagttccactatgacatccatgatgatcacaccggagatgtgcatggacgcaaggaatctcggaacgagcaccagacccaaggggaatactatctgatcgatgctgatggccacaagcgcacagtgacctaccatgttgatggcaagagcggattcattgctcaggtgcaccgtgagccaatcaagggatatcaggcacctcagccagtgcacaagattgttgctgttccagtgcatcacggttatcatcactaa

SEQ ID NO: 585 - DNA, 632 bp, Aedes aegypti
ggctagttcacagtgagcatgtatcaccgaaaatcaacaaggacgcgaaactagtttggcaaatgccgagcaaaggggaggtgtgtctgtgaaagtagagtgcaaattctgagcaagtttcaccagataacggtgtatgttgctgaactagttactagaaaatcagaatgcagtttattttagtatataagaatgatagtaacagcagaacagtatcagttgacgttcaagtgtcaaacgaagttagcaatcaaattcaattcacaatgttcttcaagacatctttggtagtttttgcgcttatcggagccatcgctgctcagcactattatcagcaacagcatcatgaagaagaacaccacgcccctgcccactacgaattccactatgacatccatgatgaccataccggagatgtgcatggacgcaaggaatctcggaacgagcaccagacccaaggggaatactatctgatcgatgctgatggccacaagcgcacagtgacctaccacgttgatggcaagagcggattcattgctcaggtgcaccgtgagccaatcaagggatatcatgcacctcagccagtgcacaagatcgttgctgttccagtgcatcatggatatcatcactag

SEQ ID NO: 586 - DNA, 2782 bp, Aedes aegypti
actttgacgtcacctgctgcaatcatcatcattcatcaaaatcgtcattcgcagtcgggttcggtcgcactgaacataaacaaaagagcgtgtgttgtgttttcccatcattgttttccgttgttttcctttgtttcgtcgtgattttcccccaaatttttcaatcgatgtgcgctccgtccgagtggtgtgaaaatttcagtgaaaatgttcagtgcttgacggtttctagtaaatacaacagataggaatctaagacggggaacccgtcagaacagaaacgatgccacgatcaaaatgttatgcgtcatcaatgtcgcttcggcggtgtcttccggtaatctgtttggtgattgtggcccgtttggtggaagcccagaaagggatcttcttcgggtgctaccagcgagatcgatccgggcagctggagctgctgaccgacagtttggacaaatgcgttggccactgcgagcttggcttcttcaggtacgcggcactatcggatacgcagtgcttctgcttcaacatgattcgtctgcgccagatagaggacaaaaattgcaatcttagctgtcgccaaagtgcggagcattcttgtggcggtgataatgcgcaaagtttctacgaaaccggggtggatgtggccggacccgttaagaatctcaaactggcagaaaaggaaacggaaagcacgatcaaaatttcttgggatgctccgtccttggatggagtgccggtggacgagtatgagatcaatgccgtcgcactgtccacctttgccaactatcgactgtatccgatgagctggagtgtccacaataactcgcagtcattcgaactggccagtttggttccgggtacgcgttacaacataaccgtgacgagtgtttcggaaaagggcgccggagggatggcttggatggtggcccagacggaaattggcgttccggatccggaaccggaagaaccggtgatattgcgacggctggattcgaccgttcagatccagattcagaaggccattaacaacaacggcccggttaactattaccgagtggtggtgcactacgtggacgatgatctggtgcaaacgttcgacgagaccctgctggatacgtaccaacggtcacgggagaagggcgttccgtactacattgctgccgaggtggagatgaaggaggactcactgctgttcaccgttggcgacaagcgacactatcgaaactacttcaatccggaaattcctgcccggaagcacgtgcacatctccatcggaatcgtcagcatcttgaacaacgtggtaaaggtgcggtacgctaccacgacccacgagcagcaccagcacccggatcaccaccacgtgaattctaccaatgctccggagcggaacgaagcgctgatcacggtactggccgtggcttgcgtcctcttcggaatcgtactgttggccagtatcgtcctgtacgtttacctgcgctataaaacatcgagaaatactcgtccccttcgggatcaccacgaaatggccctgcagggaccgatcttggaagtggagaacaacggcttcattccggacatttacgaacagcgcggattcgaggcggaactgcacgacatcattgaatctctagcaccgcaccagaagcatcctcggaagcatctgtcgctggagatcaataccatcctgggttcgggcaagtacggggacatactcaaaggaagcctccagcgcgagggcatcgaactgccggcccaggtgcacgtcatatccgacgacatggacaagatcgatcagattggcttcctgaacgagttccggcgggtcatcaagctggaacagcacccgaacgttctgcagctctacggggtgtgcgtcacgccggactggtgctacgtgctgttcgaggagatgcagaccaccctcaagcagacgctgctcaacgcgaggataccaaataacgtgaacagtccaaagttttccaccatctcggaggaaattgtcgtgaacattctgtgtctggtgtgcgacggcatgcagtacctggttgagaacaatatcgtcaacaagaagctctgcgcccgaaccgtctacgtcaacaccaagttcgaggtgaaggtaagtgccttcgggccgccactctacggggacgacaacggccagcaggtggacatcatccgttggaacgccccggaggtgatcaagttccaaaaccacactgccaagagtgacgtctggtcgttcgggttgctcatctgggagtgttgctgtttgggcgcgaccccattcgggacaatcaccaccgataatctgtttgccagcatccgggcgggcagtaggcccgaaaaacccagcttcgtctacgacgacctctaccagatgtgccttaactgttgggatccggacgcggcagaccgacccgagttcgacgacgtgagccgatacctgagacaaacgctgcccatgctgcgctacatgctgtcctttgaacggacccaaaacgcgcagatacctccgtacttaccggacctggagctgattccgtgatgaggtggattccgatccaacaaaaccaagatcaaattgtaaccttaggacaatattttaggaacgttaagtattctattctctgaattccgtccattttatcaaatcaaaagatattttttaagactatggaagatattttttatctagctaatagtgcctaacagtataaacgtaaattgttgtattagtttttttttacacagaaatatattgaacctttgaaatggagtaaaa

SEQ ID NO: 587 - DNA, 2318 bp, Aedes aegypti
tgtttgcaaataaccaaagcgcgaccgattaccttctaactccactaattagtgaaacagtgattttcaagtgaaaatgcagtgttttggtaggtgcataactcagccccggtcgaatcttggccgattgcggtttttcacccggggctacgcgcaatcatcccccgccgggcctccggcaaaaccacccccgggctcgatgaaaagaatgtggaaacgactcttcgggcggtatcttctagtcacaaacactatcagttccggactgctgatgatgctgggcgatgtcgtggcccagaagatcgaaatgaagcgcgacggaagcaaacaacgggagctcgattggtatcgattgggttgcatgactctcgttggtatctcacaaggaccgctgcaccactatttgtatttgtggatggatcgtgccctgcctggaacggccatcagaacagtattgacgaagatcggtatcgatcagttcgtgatatctccaatatttattactacttatctgtacagtgcgggtattttggagggaaatagcgtaagggcatgtaccgacgaaataacggacaagtttgcgacgatctacgtcgcggattggttggtttggcctccaacacagttcatcaacttttactggctgagtcccaagtatcgagttctgtacattaatggcatcacgatgctctacaatattttcctttgctacatcaaacataacgacgatttgcgaatcagattcgataaaagtgatagtgcaacaaagtgattagatcttaataggggatgggtttctttccgttaaacgtacttacaagaacacagttcaattttgtttgaaaatattcagtttattgcttcccttttactatattggcgtttccgaaatctccttgtatcgttaaacagtttgactcttttttatcttcggaatgtctggcaacatttaaattatctatctgactccactcactgtgacttatgcgataaactcttacagactagatatgtaaagatatgattatcattatgcggaatcttgcagagaaccatagaaatgatttacatggcaagtgaattatgggagtttgaagtaattgtacttttggaatatctaaattccttgcagagaactacgcttcacatcctcgaaatagcttaacaaacaatcaatattagggtttgcaatgttcgaatcttttttatcacatataattcaacggaagtcttatttgagccgacattcatgtgtccacaaaaatgtgtgatgtcacgtgttttacattccaacaatcatctcagtcaatcaatttcgcaccgtacgatttccattttccgatcgcagtcatattcacatacccccatttccacttttggttcggattatcgtcgctacaaggattaacaaacacttccctccgactgctgtccatatccaagcatcgattgttcttgccttgcttcagcatctgactttcaacgtcgtaactccacaattgatttccttgcccgccatgacaatggtacaacaagatcttcgcgtttggaacactttccgatacatcccagcacatttctccgaatttgatccgcagatccctatgccacgataattggaagtactgatttgcttgcggttgaaccttatccgaagcacacgagaataatccaacagtttgcttctccccgtgattcaacgtatcgacacacagagcagggtttgccacagactggatggcaccattggcaaagtctggcggttctattggaggatacttttcaaccaaatcgaacgccacgttctccatgaaccacttgaatggcttacactgcagcttttcccgaatggccaactgtttcgaaaggtcccctgcatccgtattgtcgtactttttacgatccctcatatacagatattctttgtactcgtccatccacacttctgccactcgtttgtaatttctcgacaggaagtcctttttcctgggatttccgaatggagcataaccacggtagatgtggccaaccctagaacaaggagcatcgtacatccgaccgccgcactgccaaatcttgaagctcagctcatactgctccccaccccatatgtccaatccttcgtcgtaaccgcctagctcccagaagaatttactacttatagcaaacagtcctcccgccataaccggactctcgaacggttcggtcggattctccaaatccttctgcaacagtggcaacctcttgtaaaagaacttccaatcgaatgcaccacgtgctccctcgtcctgagctcgatactcgaagttatcccagtc

SEQ ID NO: 588 - DNA, 2824 bp, Aedes aegypti
caatttcgtggtgcacaattttacggccgccgcatcaaattgttttagttcggattttctgttgtttaagttggtgtcctccaccttctggccaaccgcttggacaaacaaaatgtggatttaaaagcgttttccggcagaattcctccgcttctgcgcttgattcgaaaaaaggatcgtcagctggaatcggtaagaaaagtggcgtacaagcaggagcgagacaggaacgtatcggacggttccaagtgccagagcgagacgcaagacggccaaaaaaaccaacggaagaaggcgcaaataaaacaaaagttgaaatcctgtgacaaattctgttgcagaaatcggagaaggcctcggaaaacaatagcgcttgagataacaatcgaaattttgcataaggcaaaaacaatcagttcggcaggagaatggcgacttttcggattcacgaggatttggagaaggagaatcgtattctagcggccaagagtgcggccgggggcattgcggggaacaaacagcagcagctccagcaacggtcaacgtttggcgttttgaataatctgaccagcaatggacggacagaagtgcccttggctggggaaaaggcggtcctgaaagatcccaaattgaaaattaaaccaacagtgatcgccaaaccgaaagcggatgaaaatagcgcctcaactgtcgttcaagcaaaggccgcatcaaaaccaaccaactttcaagtatacgatgactccaaggagaatgagacgactgttgcgaaaaaggatgactctgtccacgaggccaaaagagcaccacttcaagagcttaaaaatgccgaacttctcgaaacgcccatgtcagtgggcgacagtttttcgcccatgtcggtggacaaatcggtcatccaggtggaggacacctccctcgttccccgcaatgatcgcgaacgcttcttcgaggtggaagagtaccaggtggacatcctggagtacctcaaagaggcggaaaaacgccaccgtccgaagccagcctacatgaagaaacaaccggatatcaaccattccatgcggaccattttggtggattggctcgtggaagtttgcgaagagtaccgcttgcagagcgaaaccctgtgcctggccatttcctacatcgaccgattcctcagcttcatgtcggtggtccgcgcaaagctgcaactggttgggacagctgccatgttcattgccgcgaaatacgaggaaatctacccgcccgacgttggtgagtttgtgtacatcacggatgatacttacaccaagacgcaagtgctacgcatggagcagctcattctgaaggtgctcggattcgatctgtctgtaccaaccacgttggtattcaccaccgtatactgcgtaatgaacgacgtgccggataaggtgaaacatatgtgcatgtacctctgcgaactctccctgcttgacgctgacccattcctgacgtacttgccatcgaaaatttcggccggtgctctagctctctcgcgctacaccctcgatctgcccatctggtcccgaatgttggaaacgaacaccggctaccgattggaagacctcaaggacatcattctggacctgaacaaagtgcatcagaagacagaatcgttggcacaacaagcgatccaagagaagttcaagggaaataaatacatgcaagtggccaccattccggccaccgagctgtccgaggaaaccttcgacaagatgtgcaaatcgttcgccgcgataacatccgctgcggccgaagcggaactcagcacagtgcccgactccgctctaaatcacaacgattcgatgcgggaaatgatgtcctcgttgttgtttgtgtagagatgcggactgaaacaaatccctcaatcatcaattgaccgattccccttccttgccgtttgttcccccccacgtacacgccccttcacgtttctatttgtgtttttttatgtgaataagtttttactgtcgggttattttttagattcctttttttaaagtttgttctcaatcgcgctttacgcaaccgtagcaaatgcagaacagtttgacgaaataatactttattataaaaagaaaccactcgcatcgatgcgctatctggaacagcacaaaagtgtgtgcattgggctgagcaacgaaaatgatgattgtatttagctactagcatgtataggcatacaacgatggatatgataacttttattttgtagctcttggaaggtttaacgctacttgtttaagatgattattcgaaagtaggcttacaaaatttgtattgaaggaatgcgatttctcgaaacagcacaattacacggatacgtagtagggccacgatggaaacgtaatgtaccagtcaagaatcttcattccttaatcttgtgtaatttaaaaattaataaattagtccaaatataactattcaaataaaattttacgtgttgtatgacggacaaggaagcactgatttttgttacagacctacttaataaaccctgcaccaaacaaaacagtcaaaagtgacacccctggacggcattttcaaccgaaaccagagtaaaattcagcatgatttacaaacgaaagttcaaaaaatgatgacctaacaatactaacataaaattacgcttagaatggatagacgtgattaggattagctagaaatggaaagcagcgaatagtaaattaagacattttttaaggaacatagataagttctaattttaaggtattttattcatgaatacttttttaccagaataaagtaacagaacaacaagaggtggctgcgttttaaggat

SEQ ID NO: 589 - DNA, 1104 bp, Aedes aegypti
caactgattcgggtgtattcaattagcgaatgaattaaaatgataatgaagtgacgatgccgatagctcgcttggaagcctgataaggaccggacgtcttttggatgactgcttgctgttgattatcgtaggcggttctagttttacgaagaaggtgatgattgtttcgaagaagggtcaaactttccttaaatcacctatggacaaggaacgttttctctgaagtacgaaccaaatcggtggccaataattgcgagattgcttaacagctcgttcggatttttctctttgatgtcttttgatgattgacaatttacaagccattttccacgaaaaagaaaactttgaattaattagctgtttactcttcattaaaacgcaaatgaaaaccggaccggctcgctggctgaatgagctaatcgtcgacaagagtgcccgatttcagaagtcctaattgacaagtaattgcggaaatttaccacctcttccagttggcgtgacactcaaaatggttcaccgttattagctcgacaaaaggaaacttttcgaattctaattacaactttatcaagacagaatctaccggctcatacggcaaataatctgcttcatcttcttccatggaacactgattccgacgcagaaaaccgacgacgacgacgacgacaaagatgggaaaatcctccggctcaaaactgttactggatggtcgattccaggcaaattacgaccacatatgggaagctaccaggggtttcatcgtcttatactgcataaaaccactagacactagagcagggtgtttcagaccctttggcttgtggagcacctttcgagtagcgtgaatgaatggtccaggatgaatactatcaccactgggagatagaggaggatcttctcttcatcgtagaattgttgaaaaacgtgtaaatacaatcgtatgctcggaaacaccaagctacacactcggttaccaatggcttttagggtgagatcacaggttatgcgagaattgtgtccctcgtgagtattgtttgatccggttaatcttttgcatgctcctgtagaggtagcaatgaaatcaaggtcttgtccggttcgcgt

SEQ ID NO: 590 - DNA, 1452 bp, Aedes aegypti
tcagtaagtcacgatgatcacatccaatctattactagctttgctagttcctgtccatctatctatcggaacgaaactatggcggaataatctggagttcaacgctgcatccaattggcagtccaacgaactgcccaaattcggccagccaatccaatatccggcgaaactaaacgcactggtggaacttcccaccagtctcagtgtggagtacatgattctgcccagcaccggtgcaattctcgtccctgaaacggacttttcgctgcacttcgacagtgaccgaaagcagcgcgaagcggctgtattcagaactccggtcaggaagccgtactattcaactgccaactggcaaacggtggatgcttccgggaaagttgtcccggaaccaaatagtgccacgccacatctggagcgcattccgtgtcagtatgaatctgtggcgtttggaaaagtcccatcgccgatcgacatgcagtaccattcggcgattgaggtgaaagatgtcagctatggaggaacgacgggcttggatgagtttcgtcgctttttggtctctgacttgggtcagtatgttttctacaacggggaagaaacactggttacggagggtaaatgtggtagtccagaaaagtgtccttgccaatcgacttgggtccttgatgcagtttgttccaatgaagtgtgtcctgtaccgctctgtttgaaccccgtcataccgaaaggccactgttgtgccatatgcggaagtgtgctcttcgtggatttgagcaatttggaggataatttggatttaggtgatttctcgcggaaattgaatcggaaaatcacatcatcagacgtagatcaatccgaggtagagtatcacattagtgttgaaaaccatgcgctgcagttggtgatcgtggataaaggggagtatgctgagcagagcgttcagttgatgaaaaatttggagccctatttcgcgcttcgatttcgaaatggtcataaagttctccatgcaggtcatccccacatcccgtatcaaagcggtcaactgttcctagttatgttcatttccctgctggttgtatcaatgttcttcaccatcctatatgcattctactacgacgataaaattgttccccatctgacggctatggttcgaaacagaacgttcttcacttcacctttcgtatttgcccgtttcgatcccaacaacgccaatgatgactcaactgtggatataaacttcaatccatcgggaatcgaaaacttgaactcatctttcaataatccaatgttcgaagaaaatgataaagatgcagcatcagcatcaacatccaatgcagcagaaaatactatcgaagaggaatcctacgtcgatgtagaattagatttgacaaagtgaattctgaatggtttttaataaataaaaatatcttcaggtaaattaaaattaaactttgt

SEQ ID NO: 591 - DNA, 3226 bp, Aedes aegypti
aggcggtcgatttccgaaccgctgacactgcgaagtcttccgttccgtcgctctgccatcagtctagtgagtcgattactggagtaagcatctggcgcgacgttgttttatcggcatagtcgttgttttccccgtaccaaagaaaaaaggtgtcaaaaaatagtgaaattgattgctgttttgatttcacttcagtgtgcacagacctgtgcaggcgtgtcaaaacgttgtcgtttagtgtcgcactccgcaggttgcttcgattgatcgaattagcatcttccgtcgtgcgaaaagtgtgaaaattagcatttggagtgaactgctccgggttttttgctcacggaacgaatgaatggacggatgcatggcgtgttgacttgaactgatacctacctacctggccacataatttcgattctacatgcgtagtcggtatcggtccggtccggtcgacgtcgggtgtgccgtcaggattttcgtaaaccagcggtttttagtggtctggtttgatgatgtataagtgaacaacgagaggaaagaagcggatgactattattgcatcgtcttcgtaaagcactgtgtgctgcgctgagctgaaacgaaccacccgcagcatcccctattgtcgccgtcggcgtcgtttgccgttttcatcgcaatcatcactacatcatcaatatggatcgagcagtggaaacatcaggagtgcgtttcaagtttctatcggtggtgttttagaaaatagtgcttccctataacgaatggatctatggtgctggcaaaaataaaataaaaatagttgatccaatcagttcatattcgcgaataagaaagtgattgtgaaatcttcgatactgcatcctgtttcgagcaacgaatagaaagtgaaaaattcgcaactcatcacgctgtaaatacaacacatgcctatttgcccctggtgaaacattagagtgaaagcaagaaaaagaggatattgcgctcttgctggtgcatggggttacaggaaaaaaaaagaccaaagtaacagtgcaggagaatccggaaaattgatgtgcgaaatcctaagccgcctccgctagagtcgccgagtgcgcccttctcgtagaaagcagcatggatgaaccgatccacgacccagatgatggaacagcctcagcgaacgacagtgaacaatttctcagagcatcgtcgccaacttttctactgccggtcaccaccgccaactctgccggcagaaacagccccccttcagcaggatcgctggggtctatcgcgccaacgaaagcgaaagcgcactccatctgtgacctagatttgcactcgccggtgatcggcccctatcaccaccatctgctggtaaaacaccaccaccaacaccattaccaccacctgcagcttagcggctctgtcaaaaacggcagcattagtaaatctcccaccgtcaccaaagccagtatcgaaatgcgggacaactactgcttctaccggttgcagcggttcgtatcgcgcaatccagtgctcaactacctgctgccgctgtgtgcgatagcggtgctagtgtttgtgatctatgccttccgggactatgccaaaaccatgctttactggatcgagacgcaaaactcgtggatcatcttctgcatcttcctgtgtttgttcacgatcgtcagctttccggtaacggttggctacctggtgctgatcatcaccagcggctatctgttcggcttcatcaagggcctgctgacggtggtcatcggcgctaacctgggggtggccatcgcgcacaacaccatcaaggggatgcagtcgaagctgccgttgcataagttgataaaaaatgagactggccgtgccatcctgcgggtgatatcaggaccacgagcatttaaaatagtattattcgcgagactgacacccattccgttcggactgcagaacaccatcttcgggatcagcgctgtgaattctcgcagttaccacaccggtacggtgataggtctgctaccggcacaaacaatcaacgtctatctgggatccaagctgcgctcgatccacgaagtgctgaatgatcacaacgctgcccttggactcgctggctacggagtgtttgttgtagaggttgtggttggtgcagctttaatggtatgggtcatacagaaggcccggacggaactatcagcggctttgctgtccgatatggactcagacgagaagatcctgatcgaagtggaagcgtaggatcgaaaagattttcgtcaaagtcgaaagtctggctacatcagcattcgttgtgagaataataggtatttattcgttaaccatttgtatagaaagtagattaagtatagggaacgaaaaaaaaaaaaacaaagaacgaatcaagtcgtatattttaagaatgttttgatggttagatgtatccaaaaacttgagagaactattttaggaaagaaaacggtttaaagatggtgttttgttcctatgaaacaaacaagctgagagaatggtaaatcagcagtagaatcttttaattaatatcaatcaattgatccactgtctattgttatgttataacctgaaaaccgtccataaatcaagaattactccgaatctactacagtcaaaccagaatgaatcgaaaaaaaggtaatctttgcgtagggtcatgcagaaaaacagtcttcagtcccggcagctaacacatgaggtcatataactttaacttaactgatttcttccagcaggaacgttcacttaaggcgtgttgaaggtgtgccctggcgttatcgaaaccacacaaagtgaaataattgcgagtaattgcgataagttgtgtacttatggtattgcatatacttgttcaatgcattatgtatggttttgaagactctcggtctatacataagggagcgtcgttacatcatgtcaagaacgttgcttaaatacatcaaaagttgacacgcttcacgctatgtctgaaccagacgattatgaatatcgaatgtacatcaggttttttcacgctagagagcagcatttggactatatttttatattcggaaagttttagaatattctatcggtgaatttttttccatacattttgtttgtgctgaaatacgttgataaatgggattttcatgagttgtagtatgaaaaatagctaaaaagtagaaaaaatcaaaatttcactgatagaatatttttaaacattccg

SEQ ID NO: 592 - DNA, 2157 bp, Aedes aegypti
tacgtcagacggttttgtgatgattgtaccaatgtttgccttgtcgtcagtcatacagcacaccgcgcaatcgtaatctcattctgcgagcttaacaccgtctagaaagtaatcgcgtagggtaatctggtatcgtgtgctttctcgttattgtcaggcttgtgctagaggtacatgaccccaatgttccgtcgccatggacatggccattgcggtgttacaatctcgcctaggtcagggcagtttcgctcgctaaagttaattactatacgaaatatcacacagtcttcattctcactgcaaccaagtaacatcgttgattattgaaaatggaacgtttctttgcatttttgttttttctgccgttcagtccggttcttttattggtggttttaatgttacgagtttatcgaaaaatactttcatgtgtcctccgaatgaagcatggagactgttttgtagggatgctggatggtcgagatgcaatgtggggactagaggagcataaaaattgtggagtggtgaacattgtggcttttgtcgaagatagtgtagtaaatggcgagaatgatctgcctgggaatcttcgtcgcgtctttatacaacgatttgataagctgattgccgataagagagatcagtacagaaaaggactgttgagaagaaatcgtgcctttggctacttctactggacggacgatcttaacattcagccaagtgatgttatacgattgatagaaccggatactaacggtgcatatttaagtgaattagaactacgggagcttgcaagtcgcatcaccacctccatgctgccgtacaaccatgaagcattgtgggaaatattagttttaactacacccattctggaggaccacggaaatgtacaaaagtatccaatatttttaagatttcaccattcaatgggtgacggagtagcaattcttcggttcgtgatggaggaggtcatgaatccaacagaaaagtggaagttttcaccgaatctgaatgctaaatcagtgccccatcaaaccaacaatctctccatctggttgaaggcgctttacgaattcccagcacatattattcgcattttactaataaggtccgacaagaattcgctagacacgaacgaaataaccccccacaaaatggtgtgctggaaaaacgagagctcagttcatacgaaattaccctggttaccgttactcgagaaaattcaggcaagacaatctggagtggcttacagtagtgtgtttctcacagcgttatctggaacgttgcacaactacttcaacgcacggggagaacatcccggtgctctgacaatcgccttaccgatccgaatgaaatatgaagaaatggaactgaaattggaaaacgccttcgcaacgcccatggaacgcattccaatccgaccgggtgtgcaactagatgatccatgtcgacaacagaagttgattagcaaactggctgccatgaaacaaaccaccaagatcctacgatcaacaacgaaccttctgatcacccacctgatgacgatcagcttggcggcggcttttccaatgcccatcctccactacttgtccaaattgttccacatcacggcttccgtatctgccatgccgatgctgaagaagaacctccaagtgggaccgtacgagctgaagaatatgatattctggccaccggcttttggcaccgtgggactgaacttctccgtatttatctacgacaatcaactacagctggcactgctggctgatcgctccgtgctgaaatcggtcgaggaagggatggacctgttggaggagataatgcgtgaaatcgagcggatggatatggttttgggcgagtaaagagtgttaacagtactagatcctttgaaatgtagtcctcagctacaaccattaagcgtaaaggtttggggaacacaaaacgttcttgcaagatgataaagggcaatttttgaatgattccatgtcatatcttattattagcttaagcagaatattatgccaatttttggcgtaagaagattaaatacatgttgataaatccatatttattgcatcactactgaggcggctaagtcccaggagtctcaggagtcccgcgaccttaatcccgaatgcaggaatgcgttcaaaacatggc

SEQ ID NO: 593 - DNA, 537 bp, Aedes aegypti
atggtcgaatcaattggctgcttcttccaccggcgttgtggaaattccgaaggtgttccttctcatccgattcgaccaacggccgtatccgctggaacccggaaattctggccttcaactcggcgaagtcaggccaagttgtcgctcgagataacaagaatcttccatcgaccagccccagtgatatcatcccaatccaccaaactacccggactatcaatcatatccaatcaacccaattcgaacggaccgcaacgtgaacgaatatcatccatgctacctacagcagtcatccaacgatcatcgtttcaacggcaggcatcgatcgagcaaggcaaaataaaaaaacgaattttcaatttcgttttgaggcgccgggatgttcgatctcataccgacaacggcagaatcatccaagccaagcgcaaattgaaccattcaatttgttgcccattgtttggttcttttgcttcatcgcatcgtcagcccaacgcaacgataggcagcatccagtgcactgctgtgcgcacggtttaa

SEQ ID NO: 594 - DNA, 998 bp, Aedes aegypti
atgaagaaattggcacgagtttccggaggcgtaacgaagcagatccccaccgaaacgcagattgcaaagtgggtagaacggctacagaaggcggtcaacgtaatcagaatgggaccgggtcaacctcgattgcgaacgaagcgtactaggtaccagcagttggcacaaaccatcgcaaccggcatccggaagattttgcaaaacgtttggaacggcccaaatttagcagcagctttaccagatccggacgtatatgcagcggctgatcacccaagtgatttggtcaactacaaaaaatctcaccagcaggatcggctgatagataagttcattgccagcctcaatgcgttccaaaaagtttagcagaagatgtttgacttggagaagaatgctgtgcatccggcaactattccagcatggggtctcccaactacaacatgcacatgaggagatcaatatgcaggcgctggccaagagcgcatcatccgggaatttggaggaaaatgcgtgaatgcaatctacaaggagcttggcactttggcttataaaagtgatcaccaaactgcggcggtcgagaagattttgtgcgcccgtcgactagattacgatcagcactcagcaagtgacagctcatcaaaaagtaaaattactacgatgcaatcaaacttgaactcccaattaacttttcatccctcagctgtgagcaccaccgaatcttcatcactagatgttgtgccgcatataataaaaaaaaactcaattggaatacacaatgggagcgatgaaaaattatccaaaacgatttttggggatcccggaagcatcgatccacgttttgaacattctttcagatgctacaaacatagctattcgcgatatttgtattattatccgaaagcttagatttaacgagccacactggcagctggcactacaattcgaattgtcaataacaagcataagcagaatcataaacgaaaatatttctttgttagccg

SEQ ID NO: 595 - DNA, 499 bp, Aedes aegypti
gatcgtttgtgtcgttaagaatgtttgccatcatgtttgcgctcccacatcataattccgatcataattgtagtgtttagaagtcctaaattgcagtgaattaagtgcttgggaggtctaagactccagaaagtcgagaaagaaatcatcgttgattcgacttccgtaccacccgaagcagaaccttaccattcttcatcttccagtggaaaatcgttccacgcaatctgaacaagatgtttttcccgttggtgttccgttgcgcttacttcaatggattcgctatccattcgccagttatcgacagactattgaaacgaaatactagcgagtccccggaatctgcggtaatagagctaaggatcaactacgcatctgaagtgtatggcattagtggccccggaaacaccaattttggtttgcgatggaatagtatggattataaaaactttcgcggatgatttctgaactattggagtgaataaacgatctatgtttc

SEQ ID NO: 596 - DNA, 2634 bp, Aedes aegypti
aaatcataatcgctgtcctcgttcttataaacaacacgtgcatttcgttagcaacgttttaggtaaatttcttttaattttcggtgaattatttaaagtttaatacatttcaatctttaaaaaaggcacgcagagttcggcaaaatgaagctaaaagccaccaagaaaaaggctgatctggaaagcatgtcgttggacaattttctcgataacatggatgcggatctcagcgatgaagagggcgaatcccgggaagtcgctccgccaaagaagaaaaaggtaaagttggacaaggaaccgaaggcgaaaaaggcgaaggtagccgtcgaggaaaaagccaccaaaaagtcgaaagaagaaaaacgtaaagctaagaagaacaaaactgttgagccggaagatgtgggatcggatgtggagaaaaacggaggacaaagcgatgtcgccaaggagcatcaggaagccctggataaactgaagaacacagatccggagttgtatgcctttttgaagaagaatgataagaagcttctgaggtttggtaaaatgtccggaggcgacaaggaagaagacgatgaggacgaagaggatgacgatgaggaagagaatttggatgatttgagtgacgatgatgaggagaagggagaaggagcagtccatgagctgcctgaaaagctggaagttgccagtgatgagagcgattacgaagaggatgaagatgaggatgatgttgaagaggagcaggaaacaacgccaggagttcagaagaagattactctgaggatgcttaagaaatggactgatgaattgaccacgacacccttgaagaaggtggaaaccattagaaccgtgtgcaaagcattcaattcagcactggttacagtgaccggtgaaaccaacgttattccagcgttcaaagccgaaggatcagctattttcaatggcgtcgtgcagctttgcgtgcttcacctcggaaatgctgttaagagttatctcggtttgacgggatcaaaaggagtgaaaacccttaagaaaaacaagaaattttccaaattgcaatcctgtttgaggatgtattttatcgatttgaccaatttgttggaaaatgtctcctcaaatcacattatgaatgtcctgttgaaacatttgcatcaattcagctctttcctgatttgcttttcgtcaataacgaaaccgatcttgaagcgattgatcgttatctggagcacctctgaggaagaatcggttcgcgttttggcgtttctttgtatcctgaagataacatgtggccagcagcgtagattcctgagtgatgtcctgaaaaacatgtatctggcctacgtaaagaacagcaaattcgtgagcccgaacactcttcccggaatcaacttcatgagacgatcgctcacagaaatgttcactttggatatgactgtttcatatcagcatgtgtttctgtacattcgacagcttgcgattcacttacgtaatgctgtaatcttacagaaaaaggacagtttccagtacgtctacaattggcagtatatcaattcgttgaaactatggtcggatgtcttagcaatcgcttacaacaagaaggaattggagcctctgatttatccactggtcagcattatcactggagtgatcaaattgattccttcggcacaatacttcccccttcgattccactgctgtcgtatgctgctagacctctccgcgaagaccagggttttcattcccgttcttccgttcattatcgaagtcctaaattcaaacagtttcaacgaagagcacaagaaactttcgatgaaaccagttaacctcacatgccttcttcgtttcgctccggccaatatccaggaaaacgcctacaaagatgcagtgctagatcaaatctacgagctttccttggagtatctcgcccatgaatccgcctcaatttgtttcccggacatgattgttccggtagttacagccttccgatcgttttgcaagtccaccaaagtgtacaaatattccagaaaaattaagctgctcagcgataagattgtcgagaacgccgctttcattgagaaggaacgcaaggtgcttccattccggttgaaggacattgccgaaattcaaagctgggaggctacccgcaaagccaagggtaccccgttgctgaccttctacgaaagctttgccaaggagaacgaaaagatcaaacggcgacaggctacgcagtctgagaacatcagcgactacaatttgccgaccattaagaaactggacaagaagcagaaagcacccacagatggaccggtggatcttttcccttcggaagacgaggaagatgattccggaaatggcccggaactggacgactccatggacgaggatgagccgaagcacaagcaaaagagcaaaaaagataagaaaaacctgaagaaggcgaacgatgaagataagaagaagaaaaagaagcagaagaaacagaaggacgcagtggaagaagaatacccgctggaaaagagcgccgacggagagcaagtggatatattgaaggatttgaccttggacgattgggagtgatttgcgagttgaacggaatgtatgttatttttgtctaaataaatgatttaaaaacaa

SEQ ID NO: 597 - DNA, 1887 bp, Aedes aegypti
tgacggttggtgaagtgtccccaagtatagtgcgcgggtaacggttttttcgggtgaggtctaagtagtgagtactaagaagaatcaattttcctggagatggtaaaacctgggacgttttgtggaatcaaaagtcgtagagtgaagattgcgttcattgtgcgagtgttgtttgtgctaagcttaggttctatttcgatactcaacgcatttttcggtccatccaatggcgaaagcgtagcatcaatcaagtcccgtccaaaacggcaccttctgcaaattttgcaagatcaggtggaagtgtttgagccgatagtagtggagccagaaaattacactgaattcccgccggagacaacggaagccagtgtactgcgcggaagaaactgtactccagcagcaatcttcgagttcccgtccgatggattcacccgtgaggagcgcaaacacggatggattacggtgcatctgctgattgcgtgctactgcttctggttgttggccatcgtgtgcgatgactattttgtaccggcaatcgaattgatgtgcaaaaagctccaggtgaaagaagatattgcgggtgcgacgtttatggcagcagcctcttcaagtcctgaactattcatcaactgcgtgggaacattcattacgaagggtgacattggagtaggagctgtggtaggatcggctgtgtttaacattcttgctgtgccagcagtttgtggattattcggtggacaggtcgttcaactacgatggtggcccgtcactcgagactcgatgatgtacggcatggccgtcatcgggctgattaccgttctcaacgatggcaaagtaatgtggtacgaagccacaattctagtatcggcctacgttctatatattactgcaatgatttgcaacgacagtattaaccgtttcatgtcccgaacgttccgccgaaagtcctgcatccgaccgtacaccgaagtaacggagatcgctccattgctgtcgaatgggcaaaacaacggagcttccaagggaagccagaacggacagaatggacacgggtgtggcagtgaagccagcgaagatagcttccaggatttcgaactggcctcaactccgtggagccgtcgggatgagaacacgttcgcctacatttgccgttggccgattacgtttcttctgtgggctaccatccccgactgtcgtcggtatcctaagttgcgtattctaactttcttcgtttgcatcttctggatcggtattacgtcctactttgtagcgttcttaatcaccgttgtaggtgacaccatggatattccagattctgtaatgggtctaaccttcctggctgccggtacgagtgttccggaagcggtttctagtattatcgttaccaaccagggtcatggtgaaatgggtattagtaactccattgggtcgaacactttcgatattcttctctgccttgggttgccatggcttatcaaagctctagctttcccagccattcccggcgaaaactgggttgcgttaaactcaagtggcctaacctactcggcgatatccctgctatcgacactctgtgggctttatatcgcattctggtccaacaagttcaagctggactggaaggtcggcttaacgtgtacttcgatgtacattgcatttctgactgtgtccagtctgattgagctgaacgtattcttcaaggtcaatctgccaacctgtattcattagaatgaatttgcgagcaactcgtactaaactgtagatagacaaacaagatattactgttctgcatgcctgtgcgcgatgagtgtttcccgttaacattataagacgacaaagaactgtattaaatataacaatcggtcggttacaatccgataaccatcg

SEQ ID NO: 598 - DNA, 2930 bp, Aedes aegypti
cgcccgtccgatatccaatcacggcggattgattcctgtcagcgttcggtcagctctattgaaaataaaaatctgtgttgccttaaaacacatggatgatcgataacgtacagataacgatacagttgatggtcatggaaggcttctgcaggggcaggtagcaatccgaaaactgctcgaattgtgcttccgaatttggtaaccgctactatacacttgcaagcttcaataaaattatttcagttttctgtcaaaattcggtccgggaaggtgcccctagaacgctcgggtcggtcgtttgaatacttgagtgtttatgtctattttttggatgatccaaaattttgagaatattagagaggtgccgaaagattgttgaaacggtcgcatcctgtgtataatatcgaatgaagattggttcctgtgcttcatctaactgagaagagtcaggtgaagaaacgttgggtccaccgaaggagtttgcagtcattcctgatatctaggcactgtgtcatcttttattaggagttcgtctatagtgctatggctgctatcaaaaatattgcttagcagtgcattccgagcaaagtgcataccctgtttatgtgaatggtccatattgtttcgtttaccgtggctgtaggatattggtactggccatctgtggtgttgtcaaatatattagttatcggaagatctgaagattatagtgtagtaaaagaagcagtgccattcggaggcagaagatgaagtacttcagtaaacagatagcatatctgatatttatgcttgttagtgctacccatagtgcggtattttacgttcaaccagacgaaaattctactgtgtcgataatctcaaatgaccctcaaagtataccggtggctccaacaccacaggaaagccccccgggtggcagatcgctgaacgttcataacttcatcttttccggagaatccccactggaattgacgctggacgaacgaatcgagctagagaaaattacctggcactggtatccctatcggcggataaactacgtagtgctcgaagacggtcagaaggtcgaactgctgtgcgaccaaggatctgccatagacgaacttccggacgatgtttttacgcaggagcagcgattgcagggtgcgattatattgcattttattggcgctatctatttcttcacactgctggcctacatcgtgggagaatatttccttccttcggttgaatgcatttgcgaagatcttaagttgactcaggatgttgcggcggcaaccttcatggctattgctggaacgattccggagtttttcactaacacgattagtacattcatcgctgattcggacatgggcatcggcaccatcatgggctctcttctgttcaacacgttgggtgttgcctgtttggcgggtctggcttgtaaaaaaccggttcaactggattggtggccaattacaagagattgcatcgtgtttgccttccacataagcgttctagttgggttcgcttgggacggacggatctactggtacgagtcgatggtgttcgtgatcctacttttcacctacttcgtggtgatgttccaaaacaagcccatcatgaaactggccaagaagtacatcgaggtaaagtggaacctatgtgcacgagtaataagggatattgaagaaacggaacaggccgcttctgcgaatgctgcagccaatgtaaaccgtaatagtgcgctagaaaaggtgcggctgtccacggcgtcgattttgtccgatcagatggcagagaagccaatgaaggtgggcgatctgcagattccatcccgccacgttctgccagacacggaagaatatccacccatgtccctgtggaaaattgcccgagaaacgaaactgcgcactatttggtggttgtacagctggccgatccgttttgtactaacatttacgattcccaatccgacttacatgcgccgatggtatccgctgacgttcattatgtgtatcatcttcattggcctcacgtctttcctcacgttctggatgatgtcgatcataggttacactctaggaattccggacggagtcatgggtcttacgttcttggcaatgggaggctgcatgccggaagctatttcggcagttttgatcatccgaactggcaatggagccgtcggcgtatcgaatgctcttggtgcgaactccttatccattgtgttttccctcggattgccctggtttatccgaacggtggctgacggagcaagtaccaccaacgcgtacgtcataattgcttcccacggtatgcagtactccatcattgccctactgttcgccgtgggttcactctacgttgtgatctacattggcaaatacaagctaagaaggcgcatcggtgtggcgttgatcttctgttacgtcattctggtgaccttcatgttactgaatgaattggatatcttcttcccatccgggatcgtatgctgaagaaagatcggtcactccagaatggacttcgaatgcttcgaacgtgacttgctagagtaagtaggttctaacccagagtgacccgatgcggaaaacatgctactcgctcctcccgaatattggctatgttaagaataactgtgctgatgtgtaaataaattactcccgaatgaaaccagtaaaatgctgatgtgatatttttacagtgaattagattgatattatgttgatgaaacatacaagacgattagtgtaaccgctcttcaaagtagatcccattcaatgttatgtatatgtgcagaaaagcaacggaaagttatcagaggttcggtggttagtggtttaagtttgtatacgagttgattcatataagataccttataattcctaacagttcatatggcaggccaattgtgacatgaaatatacgtaattgcaatttgcgaa

SEQ ID NO: 599 - DNA, 3489 bp, Aedes aegypti
cgcacatgggtcgcctctcgcgtgagagtcattagcaaagtttacatttttttctaatgtagatacctaggttggatccagagttggctatccccaagttgatgatagtggctaccactctcttccattgtgtcggcgactgtcacgctgttcgtgtcgtccaaatttcgctgtcccgatcccgtatgccgtgtgtcgcgtcctctggaggtgcagtgcccaatccatatatagagcagcaataagtgaaaaacatggcgcccgaaggtagacactgccgacactactggtattaattgcttcctggatgtgctgaaacatcgttagtcgtatagttcgtcgtcgtgtaagctaaagaatagtataatcgcgtaattccacgtattcagtctatcagtattgtctatccaagattcccagtgaaagtgcaacctcaatcccttattctcataagccagataacgaagagtctcctcaatattataagcactatatagaaaagaattagtgttctactgtcccttattgctacctgagctgatactcgaaaagtgtgtaaacaagaaagcagaaaatccactaattagcgtgttgcgaaatcgtgtttcatgtggtcagcgagaagagtcagaagttaggattgcagcgttctactagcacctgtgtgcgatatacgtatatcgtatatagatatgccgcacagcaaaatcggcagtggcaaacaaagctaggaaaaatcgattcgcgtggaaagagaagaaagcaaacgccagtttacacagtcagtgatatgtaatgtggaaagatgcaacaacgagtgcaagctgtgctcggtgagggaaaaggaaaattcaacatcccctgagtttgtcgtcgtgtaaaagtgtgggaggttaaacggtgctccagtgtaatccgcaagtgagattgaaccgagcgccaggatgaatgccgaccggaacaaacgacagtatcgatccggtaacaatctgttcagcgatgatgagctggaattatcatcgtcacaggtgctggagaaggtcaaatcggaccgcattgcttccaccaaaccggacgaggatcgtcgccggcgaacgatcatcgttgagaagaagaacggttcctacgggtttacgctgcagagctacggaatccactacaagaaggagcaggaggttgaaatgatcacctacgtggactacgtcgagtacgacgggccggcctatcgagcgggcatgcgggaaggagatgtgatcctgtcgatcaatgggtacgacatggagaaggccgaacacaaaacgttggtcaatttcatcaaaaactgtgataaccgaatgagaatggtggtgctgtttgaagactgctgtcgaaaggtagagctacatctgaagtacatccacctccaggagctgctgaaaagcaaaatgaacgacctggagcggatatgtctgaaggagcgggagctactggaaggaaagtggaaaactcacagcttaccggcgcggaagaaggccaccccttccaccgatgacatcgatcccggttctacgactgacgtcgaatcagcgtccggtccctcgttttgccgtccagcttcatcgacggaggacgtcaagaagctgctacggcagaagacgtacattgtaccaccgcccgcccagttcatgctagcgtaccattgcttggacagcaactaccgctacgtgatacacccatcgacctcgactggtgctaccggtaataccgagtactcctcgggagccgcatcattcaaccctagctgtgctcaatcaacggccaaattgtgtaaagatcatcagcatgtaatccgtggttcttcccttgacaatagcaacgtgggcagcggtcagcaagcgaagtcgacatcgccaacaaagagtcttcacaactatgacaccaaatcaacgaaatcctcctcacggcggcatctgcacgggcactcctgtaatccgtgcatgggtcacttcctgcgcggcggcggtgacaaaggcaataagaccgacaaagacaacaccagtctcgatgcgtacgacctcgccagcccttgctgtgatccacaatgtgttccttcgcggcgcaagtccaaacaccacaaagaccatcatcacaagcacaaacatcgggacaaggaagcgaaagagagcaccaaagagcgcattcctcgtcccaagtcacagccacacatttcaccacagtcacaggctaactatctgtatcgccatagtaaagataagcacgaacatcaccatgccaaagtttacgacctaaacgctagcttaactagtcattgtagtcttcattcatgcacatccagcgagttcaatccggctgcggaaaattcgccagcatcctatagcacatccatcagcaccgatacgctgtattgggaaccgcacagcgaatcaacgtccgcttcggcaggttcggcccacaagaagcccccggccacaagttctgcgggtccaagccgtccgcatactcatcaacaccactactacgttcagaaatacatcaatcctcataccggccaaatacagcccattgctatgtacgctgggcctccggttcacaagcccaaatcttgggacaacctcgcaatgaaaggatacggaggctatggatatggctacggttatctagagatgaataaggcgaacattccagcggcccagaccaggacgcaaacgaccatcaccatccagcacaggaactccattccgagaaagaacggctacgaacggtactcggctttcgtcgatgtagaaaactatgcacctccaccgacgcagttcctacaggaaacgacaactacgacgactaccataacgaccaagtcgacggaaaatatcctcgcaccgtacaacatttcggatcaaagtttgtcctgcgagtgcatcgagggtccgtcgagttcaggtggaaccggtggcggcggaaaagcaaccagtaccatggaaatactacacgataagaccggatattactccagtttggggggaggatcaagtgcaggcactggaaacaagaagcaaatagccaacctaactgagattgctcgactctagactagctttttgtactctacgacgtttctggaagtaaatttgtttaattcggttcgattcaatgaaattcagttcctcattttgcttctacattccctgtatgaagtctcatacgaaatttgttcattgtagacctccatcgcctagcggtggaacagttcagaacttttgctggcatgagcgcaaaatataagcgttgacgtgtatgacaagcttgaaaaagaaacaacgaaattaataatattgaagtttttgagtatactcgaaaatgataattaaccttcatgtaggcaacaatcaaaggcgaaatagagacgacgtaatcggtatacacttaaattattttacggattcatgtaaaatctcaacagctgaacaattcggtgaaataaattaacggagt

SEQ ID NO: 600 - DNA, 1321 bp, Aedes aegypti
gtttttctttcgtttctcctaatttcgtttcagttgggatttatggcgatttcaattcgtaaaaagtgtaacgccaacttaactttaaatacgcaaaaaaagcgatgagagttccgacaccggattgaggttaaaccccccctaaaatggagtcgagtaacggtagcgagaaagccgacctaaacaacttggtcaaaaacatcgtcaaaattttgctgtccacctccaagtatttccactgtccgttttgtgccgacgagtatttgttcgagttcaccctgagacatcacctgctgaagaatcatgaagaggacctttccaagatcgtacaatcgccagattccagtattaagttctgtgatagcaacatttgtccatactgtggggccttattctattacatctcggcgctaccgaagcacatcatgaacagccacagccgggactgtctcataaagtggcaagcgattgagcgggacagcagtctgcgcaagagatttgccaccgagccgagtatccggtgtgttccttgttcgccgggtttgagcgatctcttcgaagaactgaacactgattccagcagaaagaaacaccgaagtcaccgcaggaagccttcccctctgtacaagtcagccctcaagaatgccaaccgaatctccgcttctaaacgtatttccggcgaatcttgggtcagttgtgactttgaattcacctccggagaagcagctctcagtggttccggttctgtagggcgtcgatccaacagcgtccggagggagctccaattcgatgcggtcgcatcggaaccaacgtccccgcaggaaccagatggcgtttgctccgtgaagaaaacgaaacgcgctcgaaagcgtttcaatctgaaatcactcaaaccgagagttggcctgaggaagtacgtgctgtcaaagttcaccaaaaagtatcgctgcaaaattgtgaccagcacaccgaataatttcctggatgatagtgacgtcgaacggagcgattcccggttacacaatcaggaacgctggaacaagttacatcttgactgagtggcggcaggtgagtaccttcctattaatcgttgttggcacccccaaagtatggatattctgcaacaggaatattcttctcattttttatggtattatcgaatcaaaagttatttaacagaatctaaaagtattttgacagtatgctttaacgtatctccttgcctaattattgtaattcgtgggcattatttgtaactcgcatttttttggatgggaataattatacatgctaagaataatatatatgtcgatttttagct

SEQ ID NO: 601 - DNA, 1192 bp, Aedes aegypti
gtgaaagtttttctttcgtttctcctaatttcgtttcagttgggatttatggcgatttcaattcgtaaaaaggtaaaaagtgtaatgccaacttaactttaaatacgcaaaaaaagcgatgatagttccgacaccggattgaggttaaaccccccctaaaatggagtcgagtaacggtagcgagaaagccgacctaaacaacttggtcaaaaacatcgtcaaaattttgctgtccacctccaagtatttccactgtccgttttgtgccgatgagtatttgttcgagttcaccctgagacatcacctgctgaagaatcatgaagaggacctttccaagatcgtacaatcgccggattccagtattaagttctgtgatagcaacatttgtccatactgtggggccttattctattacatttcggcgctaccgaagcacatcatgaacagccacagccgggactgtctcataaagtggcaagcgattgagcgggacagcagtctgcgcaagagatttgccaccgagccgagtatccggtgtgttccttgttcgccgggtttgagcgatctcttcgaagaactgaacactgattccagcagaaagaaacatcgaagtcaccgcaggaagccttcccctctgtacaagtcagccctgaagaatgccaaccgaatctccgcttctaaacgtatttccggcgaatcttgggtcagttgtgactttgaattcacctccggagaagcagctctcagtggttccggttctgtaggacgtcgatccaatagcgtccggagggagctccaattcgatgcggtcgcatcggaaccaacgtccccacaggaaccagagggcgtttgctccgtgaagaaaacgaaacgcgctcgaaagcgtttcaatctgaaatcactcaaaccgagagttggcctgaggaagtacgtgctgtcaaagttcaccaaaaagtatcgatgcaaaattgtgaccagcacaccgaataatttcctggatgatagtgacgtcgaacggagcgattcccggttacacaatcaggaacgctggaacaagttacatcttgactgagtggcggcagcttattgcaactgaccattttgttcgtcaaaaaaattgaaacatattaagggaacagatacaggtgatacaacgctattgtggttatgtatatgcttctaaatgaacttt

SEQ ID NO: 602 - DNA, 1031 bp, Aedes aegypti
aacaccaattcgttgttataagcatacaaagattagtgtggtgcgattcgtcagcaacaagatatttaacattgttttttgacgtccaaaaacgagataagcagcgattggatccgtgataaatttcctgcattgtcgataaaagtaaccaccgagtgtttcctcaaccgaaggtgggccaaaggaatcaaaggaatcataatggcaaaaatggcgtttcaacaccaggcggggaccgcgatggagtgcctcagcattcctataacgttgcacaaagaaaaagatgtggacgaagagggacgcgaagtacttaaatgcgggttcaaaatcggtggtggaatagaccaagatttcaaaaaaagtcctcaaggatatactgattatggcatttacgtgacggaagtccacgaagggagtcctgcggcaaaatccggccttcgaatgcacgataaaattttacaatgtaacggatacgactttactatggtaacgcacaagaaagccgtcagttatattaggaaaaacccggtgctcaatctgctggtggcacgaaagggagttacctcaacttaaacatcacacacacagacacatacacgtcgctgtgccgaaggcgtagactttttgttacaataggtattactactattagatcgtatattagcttttaatggatgtaggcatcgctgccggataggacatgcccgtgttagagtatagtttcagaaatgtttttatcagtacattcggaagcatttttaaataaggattactttattcattgcacagcggaccttgataataaaaccgtacattgaacagctgggaaatctttcgctaccaagtttctaggctgttgggaacatttgatttttctctatgcttattagctagcgtaagcactttaccaggaaatgagctctctttattagacttacacataatgatcacaaaatgttcctctattgttaacctatctaagtgatattccagtttattcaaataaaaacctattagattttttacaccac

SEQ ID NO: 603 - DNA, 1448 bp, Aedes aegypti
tttaaagattttagtattcaattcgataagcgataagcggttataatttcgatgaaatattaccgaagtcgaaaatttgtatgtgtgtattgtgtaagatatacaaatacaaattatacctttagtcaccgtgaatgtacgttgatcaagtggcagtgttatgaatcagtttgagtgttaattcgcatttctaccacagtcggtaaatacaacaccaattcgttgttataagcatacaaagattagtgtggtgcgattcgtcagcaacaagatatttaacatcgttttttgacgtccaaaaacgagataagcagcgattggacccgtgataaatttcctgcattgtcgataaaagcaaccaccgagtgtttccttaatcgaaaggtgggccaagagctaacaaaggaatcataatggcaaaaatggcgtttcaacaccaggcggggaccgcgatggagtgcctcagcattcctataacgttgcacaaagaaaaagatgtggacgaagagggacgcgaagtacttaaatgcgggttcaaaatcggtggtggaatagaccaagatttcaaaaaaagtcctcaaggatatactgattatggcatttacgtgacggaagtccacgaagggagtcctgcggcaaaatccggccttcgaatgcacgataaaattttacaatgtaacggatacgactttactatggtaacgcacaagaaagccgtcagttatattaggaaaaacccggtgcttaatctgctggtggcacgaaagggagttacctcaacttaaacatcacacacactgacacatacacgtcgctgtgccgaaggcgtagactttttgttacaataggtattactactattagatcgtatattagcttttaatggatgtaggcatcgctgccggataggacatgcccgtgttagagtatagtttcagaaatgtttttatcagtacattcggaagcatttttaaataaggattactttattcattgcacagcggaccttgataataaaaccgtacattgaacagctgggaaatctttcgctaccaagtttctaggctgttgggaacatttgatttttctctatgcttattagctagcgtaagcactttacaaggaaatgagctctctttattagacttacacataatgatcacaaaatgttcctctattgttaacctgtcttagtgatattccagtttattcaaaaaaaaacctaaaaaaatacattttttacaccacaaaatttgtatttgggtgttacgacttatacacaattccaagatttgtttcaaattcatcaggcgtggagaattacaaatgttccatcaatcctatcaaacaatccacacaagcaagctgatcaatcgtaatagataagatgtaactgtttatctaattttatatagcctcaaatgggaataaatgcatgccaaagtaaa

SEQ ID NO: 604 - DNA, 1048 bp, Aedes aegypti
gccgtaatcctcgtcgccttgatcaatcctatcagtttgtcctggcaatcgtgctcgtgtaaaatctgccatagctgatcatcaatcaatgaagcaattttatttattttactcacaatttattgattcccgcgctctttagtgcgcatgtgcacgaaaaattcaattcctttcagcatttatttcgttttgcgtccggtccgttgctcaatcaaaacattcaagtcgagcaattcgggcagttttgacgtatctctccagccgtcggtttcttattggaattcagcatcagctgatcgatcaaaaatactgtgataaaaatggcccaaatggctatcacattgctcaccagagcaatcgaatacgacatgaacggaaggaaattggagtcactcaagctgtacgaagatggaatcgaggcactgctaaaggaatccaaagcggaaacggatcccaagcggaagcagcactttcaggccaaaattgtcgaatacatgaaccgggcagagcaggtgaaggaccaagtgacacgatggaagagcagaggagaaatacgggacaagatgcacttcttagatggcgcaacaggttacagctatggtcgcgttttcgggcgttacatgacggatgacgtgaaggagatattggtggaagacccgtacgcgcgggaacatcaccaggtatgcaatttggtgattttcagcgagctggcggtgacgagctgtaaaaatttgaagttcatcaaactgctgacggtgcgagagcagaaaaataacgatgaacaagggcgggcgtttcagacgttgaaggacagtttgaagaagcaaggcgttgagttcttcgtggagtattctgcgaatatgcacgatcgtcaagtgatattgagtaacggattcatcgtcaaaattggacgagggttaaactattttaagccatcccctagcaaatacggtcttggagctttcaactaccactttcgagagtgcagagaaacaaatattgatgtattttattgccctgaaaacgataaagcatagatttcgaaagt

SEQ ID NO: 605 - DNA, 868 bp, Aedes aegypti
tctggggaccgaccataatgtaaacaactgcctgtcaaccatccgtcactacgggaggcgatagcataaacaaagcgcatttttttctttactctgcgctgaaaagttggtgtttcgtagccatcttgaatcgcaatttttcaccatggaccagtttttgccagaagtacctggcaatgatccgactcagttttgccggctgtgtttctcgcaggaaaacatccactgggtcataaggacgtgtggaaccgaggtggacctgcccttcgtgaacaccatcggggaatgtttgggcatatggttgagcctggaggaagactttccgtatgccgtttgtctgccgtgcaccaaacggctggagggaatcctggaattccgggaaaccagtcggcgatgtgacgaagcgctgaaggccaaacggcgcgaggatccgaacgcgatggtgctgttctacgactacccggaggacaaggtgttcatcaatgggtccgataagccgggattttttcaggacgatcctgatttcgatacggaagttatcgttccggaagtgatagtaggagacgaaaaagaagaagaggaagctcctgtcgaggaggtcgtgccgcaaattcggatgagccaagcggagaaacagctggcgctgcagaatccaccgccgccaaccgttcgccccagcgcgaacatctttttggtccataccgaaccggatcacggtggccatccaaagagactttcgccgagaaagtttccccagtgccgttcagccgagcggcagaagccattcccgccgaagaggaaaacgacgcgctacgctaaaaaagtgctgtgcccaaacaaaacactgcttccgctgctacgattgtga

SEQ ID NO: 606 - DNA, 1157 bp, Aedes aegypti
atgaaatcctacctacggtggtcgtcggaaatagagcgcaaaaaagacgacgacgaagcgacagttgtcgccccggaagcccaggaccatgacaacctcccggaactgagcgtcctgagtgagaagtacgtaaatccagacagactaacgccaccgcctctgaagaagctggttccactcagccgatacagctgttgcttctgccagcaatcgttccggaccaagaatattctccagggccacaaaactgccgttcacgccagtacccggaagaacgactccgaatgtctggactgtggacaggtgtttctgaccgtcaatcagatgaagatgcatgccgttcggcataggcgtgatctactcatcagctgcaaaacgtgcggaatccagttcttgacagacaacgagctcaaggcgcacctgaagaacaacggctgccggatgatggcatttggcaagtgcaagtactgcgataggatcttctcccgccggggtcgatacatcttccacctcaagaagctccatccggacaaaccacttccaacaccggatgaatctcccaggaatcgttccaaatccggcactccagaaaacagtccaccagtcgagaaggacggtcgcttcgtcgtcatgttggaccctctcccagatgaaatccttgaagcttgccgggaaacaatccgagagaagcttgtatgcaccctctgctacgaacagtttgacgaccttcccagctacaatagccacgtgccggagtgtttaacccaccacgacgataacacaagaacatcacctccaccgccgtataaactgtgcgaatgcgaagtctgtacggcgatattcgaagccatcgatcccttcgtcgagcatctgcgagaacacgagcaacccctgcaaatcaaaccgcacgattgtgtccaatgcagcgggcggaagccgaagttcctgaggcacccacatagtccctcgatgattctgggcgattagttcggattttggtctaagcatccttctctctggaacgtaattctcatcgttattagtgtttaatgttagtattagaacaccctcagtcagtgcaaacggaagcttacggctgagcttaagctagtgaggcacctttttatgcgatcatatcgtttcctttcgttcatttt

SEQ ID NO: 607 - DNA, 1234 bp, Aedes aegypti
cgcgaaaacagtgagacggagaagaaagtgaaatttttggttggctgcagctatttttgtttgcggaaaattgtattcatttttgacttgtctgcggtatttttatactttgaaaagtatttcgaagtgttcagtaatcgtccattatcactttgaaatagctttccgggttttttgaataggatcgatatgagaaaaaggggaggctatcgtcgaagtcggagccgaaatcctcgtcgtggaggagaggaacaaagcgatatgacgttaccaaggcgcaacttatgttcaaacctgtcaactggaaccatcagaagctggaattggtgacgcgcctaagttaccgttcgaaagtagatttccggcgctcggaacgagaaatcagcgaatggagaaagaccaaggaaatcacgaccaaaggatgagacgttccggatgcagcacttaacttttcaaggaagtgggatttccgaccgagattgccgatgtttacgcggagttaaccactccaactctgatccagtcgcaaggttggccagccgctacatggtcggaattaccaaaaccggatccggtaagacgctttcttatcttctacccgctttgatgcccatcgatgaacagtcgcgattgcgtcgtggagatggacccattgccctgattctggcccctactcgggaattggcacagcagataaaacaggtcaccgacgacttcggacgggcaataaaaatcaagaatatttgtctctttgggggaagcgcaaaacgccgaagctcgtatttggtgttggatgaagctgatcaaatgttagcattgaaatcgaacggtttgtttattcgagttaataatcatcattggaaccacatggtagagagaatcagcaagcagcaacgataattttgaaaaatcacgcgagccgcattcttgaatttcaattttattgaggaatcacaaacggtgacgaagatatttactgtgccatggatcattgcgttaatttcgataatattaacgtcgtttgcaatgtgcaactaaacaaatttagagaatcattaaaggcacgattgacgtaaaatttgatcactgttacatcatttgacgttgtctaaagctaagagattccatcgatcatactagcgaagtccgaatagaactaaatattagatgataaattatcaaattcgtgcttattctgagaattgggtagggtgagacgtgtcgaatgaggtga

SEQ ID NO: 608 - DNA, 1595 bp, Aedes aegypti; identical to SEQ ID NO: 199

SEQ ID NO: 609 - DNA, 1179 bp, Aedes aegypti
atgggcaaaaagaaggctaaccagttgggtcgatccctgatcaaggaccgcttcggacagggcaaccggaagaccgtggataacaatagtatgcttcacacaaccgaagttcaggacggatacgattggggtcgtctgaacctgcaatccgtgacggaggaatcatccttccaggagtttctgcgaaccgcggaattggcaggaacggaatttcaagctgaaaagttgaacatcacctacgtcaatccgaaggccaaggttgggctgttgaccacaaacgaaagggttgccatcgagaggaaacaggtgggcaagaaggacttgctgaagattccgagacggccgaaatggactaaggaaactaccccggaggagttgcaaaccatggagaacgaaaactttctggactggagaaggggattggccgcactgcaagaggaggacgggatgttgatgactccatacgaacgcaacttggacttttggcggcagttgtggagagtggttgagcgatcggacattgtggttcagattgtagacggtcgtaatccgctgctgttccggagcgaagatctggagcggtacgtgaaggaagtggacgaacgcaagatgaatatgattttgatcaacaagtcggacttcttgaatgaggatcaacgaacggcctgggcacggtatttcgacgagcagggcattcgggtggcgttcttctcggcggcggaatccgtggaggaagccaagagggaacaagaggaacgggaagcacgggaggatcaaagcgaggaggacgaggaagatgaagtgaatggcgagctggatgagaagctgaagggattggaggtgaaagttgatcaggtggaaaaggttctggagaaattggaggagagaatagagcagctgacggacgatggcaatgcggtgagttactttgtttcacacttcgacctcttttttacgaccgatagggtagagtcctggctgattgcggccctggctgccttggtcgcctgcttctgcagctgggttttgattagcatccaaactgttatgatgagttgtattctcaccatgatgatgagtatcagcagcttcgtgtcgtggtctgccagtaggttggtgtggacttcttgggttatgttaacttcaaccgctaccgcttcgagatttgagttcatctga

SEQ ID NO: 610 - DNA, 741 bp, Aedes aegypti
atggaagtcgttgaaaggaagggatcagttaccaaatcaaagggagtatccatggacgaagccctggcaatggcaggtttcggtccatgcaacgtggtcctgatcttggtgtcgggaaccgtcctggcttcatttctgctggaaatcctcggcgttagctacatcatcccggttatcggacaggacttggacgtgaccactaaggagaagggcgtcctcagcgcggtcggtttcgcgggggtcatcgtcagttcgcatctgtggggtttcctggcggatacgcacggtcgacgcaagatcatcatcccggcgttgcttatctcgttcgttatcagcgtgatatcgagctttacggcgaatttctgggtcatcgttttcctgcgattcatggttggatttttcgtttccggaccatcttcagccacttacgcctatctaggcgagtttcacaaccgcaaaaatgcgtcccgagctatcatgggtgcttccgtagtgttcggaacgggcggcattctattgccgggactagcctacatcgtgatcaatcagggttggcagctacccatccctctactgggcatcatctaccgaccatggcgactgtatttcatcgtgtgcagtctaccaggcttgataagtgccctgattctgctcagatttccagaaagccctaagttcaccttcagccaaggtaacacagagcaagcgattgaggccattcaatgggtacaccgattcaac

SEQ ID NO: 611 - DNA, 299 bp, Aedes aegypti
tggttctttctagctcaattctcgtggttacattcgagtttctgataactctcatcgtagcaacctttgctcaccatgggtaaagtccccaggccgaggacagaaagtgtcaggatctaaaactttggtccctattgcatggtcacgtcaaaactgacccgttgcaaacatgccaaatcgcaataaagttatgtctgagagtgtccggggagcagggagacggcgacagtggcgacacgtgtcagtttgtcaggttctattccgggacacaacacaatggggcttactaagagggaact

SEQ ID NO: 612 - DNA, 3666 bp, Aedes aegypti
cgtttttttttttttaagaacaccttgaaatctggatgtgcagagttaactgttcaattattgttgcgccgttacgcaggtagttagtacatggaaattggcgcaaaaacacggataaaaccgcacaagcggcgcaaaaacgcgcgacgccacctcaccttagtccgcgctcatcagaagcaatatcaccagaacggcgcagtcagattgccgccggtcggagatttacttgatttgatttagctgtccgaccgcgcctccgttgatggttggagagcaaattatcgcggttgtaggtggcaattagtcgtcgccgcgtgctcgcgcagattccagtagtggaaatcttgaccacagtgggtaaattataacccaatgaaaacaataaagctaatgataaacatacgtgaacagtggcaacaacatgcggcgcgattctggttaatggaggagtgggggataaggttttctctacactaccgctttctaagaacgataatgtattaatccagaacggagttctctgggctaggttgccgttgatcagttaggaagtttgttcggtacggcacggtcttaggaaggatgatgctgcggatcggatctttggtggttcttttgttcgtggtggactttggattagggttcaaccattcttcaccgtttttggtggaggaaaaggacgccctgttgacggtgcctcaactgatcaggaagtacggatacaaagtggaggagcacgaagtcgttacggaagatggatacctactggcgatgttcaggattcctggccgaaaaggaactaaagaatacccaattttcatgatgcattcgctgttcagcagctgtgcagattgggtactgatcggtcggaagcatggcctagcatacctgctggcagatcgcgggtatgacgtgtggatggggaatgctcgaggcaaccgttactcaaggaagcaccgcagactgtccacggtgtcgtcccaattttggaactttacgtttcacgagattggatactacgacgtgacggcgttgatagactacgtcctggatcgaacgggagccgaacgactacagtacatcgggttctcgcaaggagccatgacgagcttcgtagcactgagcagtcgaccggaatacaacgagaaggtcgttcagctacacgcgatgtccccagcagtttacatgtaccgcagcggaagtgctttgatacgagtgctggcatcgctcgcaacgccgatcagagatgtgttcacatctgttggcaagtatgaattcttgccgttcaacgagcagcaatactacctgtttcgttggttgtgtcccgctccagaacaaaagatttgtcgagcaatcatctacgatgtcgttggccctaatcctacgcagttggatgtgaaaatgctacgaatcttcctgggtcacttcccggctggagcatctatcaagcaggtaacccattacgcgcagatcataagggatggtatcttcaggcagctggactacgaggacccgaagaaaaaccgccaggtctacggatcggaacaggttccccgatacaacctatcgcaagtgacgacaccggtgaggacctactatggctacaacgacaacaccgtcgtctatctcaacgtccttcagctgcagagcgagctacccaacgtagtcagcagctatccagtccctgacaaacggttcagtcacgtagatttcattctggcaaactacgtcaaagaaatgttgttcaaagagattatcaagaatgtagaacatacggagcggtcggcctcttcaaaataaaaacagtcgcatctagttcaaaccaatattagcttaattgtatcatttttcaagtgtccataaatcgattcaagagccactcaggcgtacgctcgtaaatcggccagcagctcgttgtacagtagcgaccgaacgttgatggcccagacaaagtccatgtggttgaactcgtgcatcggaacgaggtaacgcttgcggacattcggaagctgactggccaggagcaggacgtcctccggcgtggccagccagtcgttggtgctatggtagagcagcgtcggagcctggacgttattcagattgtagttgggcggggtcaatgatccataccggatcatgttctgcgtcgggccaaaatcgtactggcggaagatctgcgatcggaccgtctgcgcatggtggatcatctgcatggctgacgctccggccggtgaatgaccgtgcatgaccgggagcattgtctgcggggaagactacagttagaatatccgtaagttgataccttaaagaaacggaacttacgtagttgacttcctgcgagttgaatccagccatcaggaaagtggtgatcgtgcacatctgctggaacggagccccgtcacggcatttgtcgatccctccctgaatgtccatctcgttcgtcggagcaaagtagtacgtgcccatcatctgcagcatcagctccgtagtgtgcaggtacgctgccaagaagataacgtatggactacgcgtccgatgcatgtaagcggccggggccagcaagtgggcgctcttgacccgctggttgtagtacggatgttgggacatcatgacccagaatacggtcgttccttgcgaatgacccacgtactgcagccgttgctgtcccgtccgggccagaatgtagtcgatcacgttcggaacgtcaataatgccgacttcgtgccacgaaaagtcccagaacacctgcgtctggttgttcctcgagcggtgccgattggagtaacgattcccgcgggagttacccatccaaacgtcgaacccggcatcggccaacatgtacaccaagctggtctgcggtcccatcaggatgtaatccgccgaagaactcagcattccatgctgcagcaagacaacgggttttccggcagctggaggagacactggactgcctggacagcgatggactcccaacaggtagccgtcgtccgtttcaacgatgtgctcctcggcggggtaaccgtatttgcgaagcaatcctagctgtagatagtgccgcttgtcaaatacagtttacaacgaataatgcgaaaaccaacttacggaatccagataggcatcttcagcaatatccggatgaacttgggcgtagccaagtccaaccattaccagcagtaacgctaccgaaataaggtctctcatcgtcttcgaggttaactatgaactgagcttgacccattggcctcagatcaacagagggtatcgctcaaaaacaggggtagcttatcggttgcgaaaaaagaaatgaccggtttaacaaatatagcaaactggcctcactgataagattacagaagctaaggggtatcacttgggggtccataaaacattcgcattgctcgtggacgtaaattggattgaactggtatttgtattgacggtattgacttcagatttttaatgtagaataagccaaggaattggcacaatcgcgggaaatagaaataccctattatatattgtagaagatcattactggactcctcaaactagaaaattcattactcggtaatatgttgtggtaaacttgtgaacaactgctagaagatcttggactgaagaccatggactggcagcaggtcttccgaaggaagtcgtcactat

SEQ ID NO: 613 - DNA, 1815 bp, Aedes aegypti
gttgatctaggtttcaggatgtttctagtaatccttctcataaccctgtccctttacctctatcaaaagtggatctacacctactggaagcgtcggggagtacctcagctgaatccttcgtttcccttcggagacgtagcggacacgttcaaacagcgcaaatcctacgcgaatcgtcttgccgaattgcatcatcaatccgccagcgatagccatcggtttgtcggaatctatacgttgttccaaccgatcctgctcgtaacggacgttgaattggtcagacgaatgctcaccgtcgatttcgagcactttacggatcgcggcgcacacgtcaacgaaaaacgagatcctttgagtggccacttgttctccctggcgggtgccaaatggagatggatgctacagaagctagctccagcgtttacgtctgccaaggtaaagtcgatgtttccgacgatgatgacctgtggtcgtaccctatcggcagtggtcggagaccatttgggccgagcattgcccattcgtgctctgatgacgaggttcaccatggatgtgatcgcttcagttgggttcggattggattgtaacagtatgcgtaatccggacgagccgttccacaagatgggatccaaattcttctcgaaaagttggaagacttctgtgcgaatgctattggcctttgtggcaccgaaggttaatcggttcttgcagctgaaactgaacgacgatgacgtggaagagtacatgctgaacttggtgagagatacgatcgctaaaagggaacacggaggagaagtgaggaacgattttattcaacttttggtgcagttgaggaatcaggttgaagtggaagatggcggaagttgggagatcaataaggtcgagccgaataaggctttgaccgttcaggagatagcagcgcagtcatttgtgttcctgaatgctggatacgagacaacttcttcaaccattacgttctgcttgtttgagttgtgtcgcaacagagatctcttagggaagctgcaagaggaaatcgacgaagtggtggacggtggcagagaggccagttatgaagcgattacggaaatgacatatctggaggcttgtgttgaagaaacacttcgaaagtatcctatctctcccgttctgttcagagtttgtaccaaaccgtacagaattcctgacacggattttgtgatcgagaaggggacgttggtgcaaatttcactagtaggattaaatcgtgacccgaggtattatgaggctcctctaaagttcgacccggatagatacggggaacgaaaagcggaaacaatggtccattacagtttcggagatggtccaagaggctgtataggtttgcgcatgggaaaggtcatggtcaaaatggccctggttgaacttctttcaaactatgatttcgaaatggagtcaccaaccggtgaaaacgagctggatccatcactgctgatgcttcaacccaaacacgatgtcatattgattccaaaattcatgtaaacaatatctcggaagtttttcactgaagagtaagttgaggctgaaatttctatgttgaataatcaacattggtagaaaaactagacctgttgaaaaaatagcgctaatggacctattggctattattttgctaaacgaactaatgtcagaatattcatccatttttagttatcgccgttttaaattgtgttgtctagaacgaacttttaacatgccggataaggcaaaacctcaaaactattaaggggcaaaagtttgctgattgaaatacaaaatgttgttttttttgcgattttt

SEQ ID NO: 614 - DNA, 420 bp, Aedes aegypti
atgcttgttgattcggctgccttcatggaacctctgtggtttttttttttgtctaccgttttctcaagtttctcgtttcttctcttcctctccattgcaggtcaatactcgctagtggaaccggacggttctgtgcgcaccgtagactacacagctgatccaatcaatggattcaatgctgttgtgtcgaaaaccgccccgctgatccatcaccacgccccggtagtgaagcacgttgctccaattgtgaagcacgtcgttcccgcgccactgccggcccacaaggtggtctacgctcatgagccagtggtacatgtaaccaaaacatcccactacgccgaacacgagcccacctatccccactacggagactaccacgatggatactacggccactacgacgatagccattactactaa

SEQ ID NO: 615 - DNA, 649 bp, Aedes aegypti
gttttggtttcgtacgcagcaaaatcctgatcctggaagcgctccgttggattaaaaccagtaaaatacccattgaaaatagtgtgcaatggctgccgcagtagctccaatgcgtccgtggaatccggcattccagcactcggaccgagaacggtgggtttgcatctatccggcgtatatcaacaagaagaaaactcgccaggaaggtcgtcgcatcccgaaggaacaatgcgtcgataatccgtccttccaggagatccgggacattatgcattcgctgaacctgaacgtgattgtggagaacaagcagtattcgcgggagaagagtaaggaactggccttccgtgggcggattcgggtgcaattgcgaaacaacgacgggagccccattctgaaagagtaccccgaccgtgacagcttgttggtccatttgggtaagatgattccgcagttgaaaacgagacaaggtaaaccggcggaacctcaggcgcaggccagcacttccagtggcggaggagccgcaggaggtggacagtcccataagaagggtaagggcaagagacggtagattggtttcggttttcggtttgtttcaaattaatttgggtatttaattttgaggaaatgaataacgattgtttgaaaggtg

SEQ ID NO: 616 - DNA, 1654 bp, Aedes aegypti
tgttaatgtataaatccctccgccgtgtcgaggtgcatgttcatttgatctgctaatctcgccggggatgctcgttttatgctcgtttcggtaagaaaagacggtgaaaagtctaagaactgctcgcggttcgaagagtttccaatcaatcggatcgagtgagaaccaagaaatcgggagcagttcatcaatcaatcaaccaatcaatcttcgattagggtggactggactctgaaggtgtgctaagagttgagtgcagagtgtttggacccttattcagagccagctgcggtcattgtgtgtgaattactgccacgtgagtgagaagtagctgcggttggaatcgtaagaagtgttcgatcgtttaccggatgggtggttgagatgtgcatctgaagatgaaatttgtgcaaatgagatgctgattaaatcgcaccccactttgcaagataatcataatcggtggaagccagaagcagcacaaaagcataatcgtactgagtgagccgcttgtgagacgggaacttaaaacgcaaaacgcatagaaggtgaagagaggccaacagcaacgaaaattacaagtagtgcattgaagattcagtatcggcttgaagagggcttcaaatgcttggtggttgaagtttaattattacataaagttaaccaagaaagagcacatgaggaacagaagtggttttacacaaaacgaatagtaacaaaaaaaaatcgttgtggaattgggatcgtgcgtcagaagatcggttacttcctgaaaactagaagactggtaaaccgaattagctaaatcgttgatgatacagtgctttcggtgcggatcaaagtgattaggtaactgttgggaatccaaaacgaagaaagtaaatcgtgaaaaacttgagccacccagaagtagattggggattgacgttggagatcagaggaaagctaaacgaactttacgtgaccgtgacacagaagcgattggataacgcctcagcatcgtcatgtggaagtacattgtcattgtgtcggtgttcggagtgtacctgcttaggaaccatcaaataaatgggcaagtgtttggttacgaaccggacgtggactacccggcgtacgacaggattccctccggcttgacgttccgctgctcggataagctgcccgggtactacgcagatatcgacacacgctgccagatctggcactggtgcctcccgaacggctacatgttctctttcctgtgccccaacggaaccgttttcaatcaagctcatcgggtgtgcgactggtggaccaacgtgaactgtggagattcgttaggactgtacgataacaacaatgaactgtaccgagacgtggaaggaaatctgatagctggataacgacctgttcgggggattagttatcgtgtattcctataatttattgctgttaagttttaatcgtaccttcctagtgtatgtagagagacgtttcgactatgattgtaccgagaactttgtaaaatgtaacgttgtactaagacctaaaccgacatagtgaatttgtatgaaccagctgaattttttaccgtgatcaaagtcatatgagatttttttcagttagctgttttgagcgttttttattttgtaaatatgaaataaaaaattaaaat

SEQ ID NO: 617 - DNA, 2825 bp, Aedes aegypti
ggtgccagtttggtcggacgaatcgcctcttggctggcggcgatctggacctcgatgcattcggtgattgcgttgctgtacgtaggaatgttgtcattcaaatctgtgccatttagagagtgtaataaggccgtaacgatcaaccagcagtccattcatgacggttatgatgtggaacccaatagcggacaggaatgtttgaaattaacgtttctacgtccagtgtggcgaagttctctctactttgggctgcttgcgttgagtttgattcttttatgggtcatttcgatggtatgtacgcatagtggaaagatcaaccgacggtcgatttatctgtttggatttttggcgttggttttgctgatctttgaaaccggatgggaagtaacgaaagccatcaacgatgagtatgtgcccggactgtggccattttatccggagtcatttgccgatagcacgctgtggttcaatgcgttggtgcaagttatctactcgctaaatattggtatcggagcagtgccagtcattacagggaagttcctatataaaggagatgccatcaaaacatcattcgtctacattttcttcaacatcctgatcacatcgattgcggtgattttctacgtatttcaatttcataacactgcaaacgatccacatctgctgtaccctgagctgaccccattgacatccatttacgatcgagctgtaacggtgcatgaattggatcacctcatacagcagctcattccagctctaggctacgcattgctctttatatcatccatcgtgtcgatgacgatctacatctacacttccaccagaatgattcgaaagcatccaaactacaccgtgtgtctggcaggcctagttgtcgcaatagctggactattgtgcccgaactacatcttcccacggatcctggacacacgaatcgtaggatcgttgatagtttgtgcgatgattttcgaaataattctgattatctgggtgtatggatcgaagaacttgtacaccgatctggagttttcgctgggacgacctgtgctcaaagcatggctattcatttggggaataattccggtgctgctgatttccatcctctcatggtggacgattacgtattttgacaacgatttacttatcgattacttcccaaagtggctaccggtagtattcagtttaggcgtcattatgttattggcatgtgtggaaatcagcaaacaagtagactataacatattcagtatgatccatggagcaacaaaaccatcgaaagattggggacctgctgaccccttagttcgacatgcttggaagcagtggaaatctgtttgtgaagataccggagaacgagacttcacgttgaggcggcgtggcaccaaagactacacaaattctattaaaaagggccagtattctcactccaacaaatacggagtttcaaacaaaaacctgtcgaccgcggggagcaactcgcccaactacagtggttctgtatttggagactcagccatcgaagaggacatcagtgtagacaaatttccgcaatacaagcaacaaaactcaacctatagcgtcgactctaacattgacaagtccccacacacatctgccagttcacgaaaatcgtcccaaatcgataaacgaacaccaagcgaacgaagccaagctggattaatcagttcgaggaaaacctccgataacagctttacgtctcgaatcgaaataatgggcgacgatcatgcctaccggagtgccatcgtacgtaatccactggccaaagcggatggagctcaaaatttcaaaaccagccaccatcacttggcaccccccgtgccgacacatcatacttcctcacagacgacgacgacgagtcaacagcctgcgaaaccgcagaaccatcaaaatggccattcgaagaatccttatccggaagagggctacaatcgggatatctacatcagcaatggccaagcggatcacatctgttggcgcaaattctccatcaactccgaagaatattcaaccgagctttaaaactagtgaacgtttttttagctaggcatattcggatcttcgttgcgaaaaagcgatttgttacatttgttattttttgtatatattagttcaaataacgacgagcttaacgcgtaggtacttatcaactctgcgtctctgtgcagttgtgaaacaaagtctagtgaatatatgtatcatatgaccgtagtagttacaaaaaaaggccaaacttatttattaaagctacatctaataacccaaaacagaatctagtatcattgtaattttaattgacatttctaaaaaaaaaatctctaacgtttgatctatcctgcaaaactctaaacttaatcttggttggtaatcactcagtgcggtttgtaagtaagcgtattccagcacacattccctaagtttgtgttagggtaataaataggactgaataatagttgatattccaattttatgtattatacaaatgtttactttcacaagcgaatgtaattgtagtctagtagaaccctaaaagtgattatcgtctcattgtagagcgaacagccaaattagaatccaacacaagttcgacagttcgtttgcgaaacaaacctcgctcaaacgcactgtccgaacagtaggaaacgcctcctgaaagtgattattcctgcattataacttgaactctgtcggatggagcaattcttaggaagataagtcaggactactgtgtaattgtttgaatattaactttaaaaaggcaaatatattggtgatgttaataacgaaaggatcaacaaagtcaattg

SEQ ID NO: 618 - DNA, 2659 bp, Aedes aegypti
atggaagcattcagaccggttcgacccttcgacatgaatattgaagagaaccgcatggcatccgaatgggagaaatggaagaggcaattggaatgctattttactgcttgcggagttttagaccaatccgacaagcttgcaaagcttttgtacctgggagggccagatttacaagaattgtacgacaaccttccggatgcaaaacgggtcccgttggattcaagcggtaagggacaggaatttgcgctcaaaatcaagatttccggtgaaggtggcaatgaaccaaggaacagttatgacatgtttcgcgtgtgggcgtttgggccatttgaaagccaccaaagttttcaagatcggaactccagactgggtaaacacaaaccagagttcaggagtgacagtttcggaaatgagagtcacggtagaccgacaaagcgcattcgtgcagtaactgaagagaatgagaaagagaaattattggagagggacgatggctatgtgttctatgccatgggcagcaacgagtttcagtttacagtaggaggagtcaccattcggatgaccatcgattcgggtgccgatgccaacataatacctaaggaggcatgggaacaaatgaaggaagcgggagtacacgttactgatcaaggtagaccggatagggttctcaaggcatatgcttcggaaagcccattgaacctcatcgatgatttaataaatcgtaagaatttgcttgcgattgcaaaccgatcagatattcacctcctcggagacactctgaacgagaaaaactacacgctcgatgatctggaagagttggaagatctcaacggaccgtctggcttcagcggaacatctcgtctgcgcaagttaactatcgagttggggttgttctttgacgaagccgcctacaggatattcgcgcctcattttgacaacgatgatctcaaactgaaagacttcattctggcgtatgtaaatgccatacaagctctctatcaccatccctcgctgggaactcccgtggacattacggtggtttatttggaagtaatgaaacggcaaccggacgacatgccgcactacaggggagaacgggaatctctgctggattcgttctgcttgtatcagaataaattgaataaaggcgacgatagcgatgccaatcactgggatttggcactttacgtttccggtctggatttttatgcaatcgagaatggacggagaaatggcgtgacaatgggtctggctacggtcggaggtatctgcttaggaaagtattcgtgtgtaattgcagagtttggtacgacaagcgtctttgggaaaccatacccttccgcagggttcacttcggtatatgtggcggcgcatgaaattggccatagtttaggcatgcatcatgattcagcggggaacatttgtgccaaggatggatacgtgatgtctccgtcgaggggaacgcagggtgaaacgacatggtctagttgcagtgcagcagcaatccgtgagttgacatgggctgattgcttatttgatgcacctctgaagactaaaaaagaactggatgcctggaagtaccaaggatatccagggcaagtttttacctccaaaaagcagtgtgaggttttgctggtcgacaacgatgccattgccgttccgacatctgggctggagcgaatttgccaaaatcttcaatgtcgaactccccatcgcactggattctatttcgccggacctgccctggaaggcaccgactgtggtgaaagtaagtggtgtattggaggaagttgtgtgaagcagaagaaaaagcccatttccgttgtccggggaggttggagcgaatggacggttggagattgcaactctggctgcttggcgcaatcgagaggattccaacagcgtaccagaagatgcaacaatccgaaaccggtcaatacggatgaaggatgtgatggaagtgcttacgatgtgatggtttgtgacgatgaagagctttgctcgaataaacgacaacccatcgatatttacgcgagtattaaatgtagagaattcagtaagctgctgaagagactggatcctgcaggacctggtatccaaggaccgcacgatggacatcgtctttggatgagctgtgccatttactgtaagcgagcagatagcgatgcatactacgctccacgctttgatttgaatgatcttggtgtagattcgtacttcccagatggaactaagtgctattctgaaggatcaactaattattactgccaacagcatcattgtcttcctgaaaatttcaagacatccaaaatctcaatctgggccttaaccgaagacatccccattccgggcaacgccctgccaatcaggacacatttcctggacaacgaattatctaattacctatctatagatcgcaatcgtagaccattactgaatcattggaactatcgccccacgcatcacgaagacgacggagaatggccagatcatgattatctggaacttccggaagaggtcaaaaaggctgctcaccggtattgattcaccttattagcgtaactcacgtttcattcgtccatggcaacatcgctcaccatttatcgcgtgatgaaaatgtgcaaatatcacttagataaatacaattatccaacagcaa

SEQ ID NO: 619 - DNA, 1920 bp, Aedes aegypti
gaagaatgtcaaaatatgacgtctctcagcgaaaagtggagcatctttttatcggtttttgttgtggttccgatttgcaccagagtgccgatgcgatgcaataattatttttcaaatcccatctgtttcgcgttcggaattctttcctattgaaaaacaatgtatcatacctagtttagaataatcaattaacagtacatttcgcacaatctgaacgagattccaacgacgccaaggtggataaactagtgtacgtgcttgcgaactggaatttgtttgcccgcatctggatggccgccgacgatggtgaagctggacggattggagtgctgccaccggaagaccaaccattcccggcgctatcggacggtattcacctctcgccgctggtttcggtgggtgcctgctttgtgattgccgtgatctatgtggccagtttgtacgtgtggcagtccaatcatgatcgcgatcatccctcaacgatcaagaggcgcttcttcagcgtgttcgtggtaatgctgatctccccggtcttcgttatgaccctgtcatgcgacgccgtgttccagaagtattccatgtgggagattatggggttccggttagagggactcgtgacggctatcgggttgcccttggtgctaacggccatcctgttcctaggtcccctcagcgggacgttgaccaacggtttgtggcgagtctactcggaaccgatgtactggttgagtgccgtacagaatctaaagtggctacggaatcatctggtggcgccactgtccgaggagttcacctttcgtgcctgcatgctgcctctgctgttgcagactttcaagccacacacggccatgctcatcactccgctgctgtttggactggcccatctccatcacatcaaggaacgcctgcaggacgggacccccctcaggattgtgctgacggtgtcgttcttccagtttttctacaccaccatattcggcatctattcggcgtatctgttcgtgcggacgggtcactttgcggctccattcgtggcgcatgccttctgcaatcacatgggattcccggacttccaggaggtgcttagccagtcggatcgccggaaagtgatctttatcggactgtacgtgctggggctggtcggatggatagtgctactgcctacgcttaccaccccgagttggtatgcgaacaacctgttctgggctggagaagtgtgacgtgcttcaagggaatataaccctgcatgggaagaattttgccatttttgtagcttaagtaaattgcactagttcaatatttaaaagattttcagtacacacaaatgcaactgtacgaattttataccgagctgcgttctaagatcaccggtttcgctattacgttctctagtctagtataaagcagattgtacgaatgtatagggaacagttttgcgcctctatgcatggcatagagcgaggacacgccgaatcaggtcctcaataaagaatgtgggagatttgaaaaagaaggtgtattatgctgcccatgttcgcaaggtcgacaaatactatgatttgatatcgataaggtgtttgttctaatccccatctagatagctgcgtgcgaaaaatcttaaagcattcattattttccgttccaataactaacatatgctcaagacgtcagtggcgctaacgttgaccttgcaaacatggatagtatgaatggcttagagttttttttgtaacacataacgaaaataaattgtttgattattttaattaaagtgtgtttagcttttttcagttattataattaatctgcagattcattcatttattgagtgccgtaaaacggggtatcttcgctaatacgtgtaactttgatagtacggaaacgggacctactacatatacagtgaccccacagttatgg

SEQ ID NO: 620 - DNA, 2067 bp, Aedes aegypti
atgcgtctaaccgagctgccaccctgggaagcaatgtatctgatgtcaatgcttctattgatcttgatcatggggagcattcgagaaatcgttgcatacgccgtcgagaagatcgttgaaccggtaaagcccatcaccaatgagaatatgtacgccgactatccgtatcttcgcgagttggacatgagctatcaaacggcattcgactttccaatgcatcaggttcttctggatcacgaacgactatcggcatacatttgcaattattgcggaatccaatcaatctacaatcaaaccttatccaaactgccgcacctaacgttgattgtgttgaaacataacgctctaaagtacgtgcatcctgattcattccagcacaactcccgactggatcatatagatttatcaggaaatcagctggtaacgattaactcacaggccactctgcgacatatatcttcagtatcgatattgaatctgagtcaaaataggaaactggatatcaatcgagtgaagctggaatgcgatagattaatgattttcagctgtaacaactgcgcaacaacctacctggaccgaaactcgttcgccggtatgtccagactttcacacattaatttcaacgagaatatggtcgatcagattcattacgatgcactggaatggttgagttatttaaaaactcttaacatcgatgggaaccgtaatttaacgatgttgagcttctcgtcaaattcgttaaaatggttaagtgccgaaaattgttcactggaaggaacgttgcaaacatccaatctacctgcgctgaaaaccattaatgtgcggggaaaccgcattacacacttggatgagcttagtctcgtaactaatcggaagatcaacactttactgttggacgacaacgaacttgaaaaaataccaaatatactcataaagctaccagagttgcagggcctttgcctcgaccaaaatcttttgcaaccgtatgagcatatcgatgaagcaactttagtgtataaaaaacgatttttgaggcagaattgttctcaagacgatgtcttccatcacaagtttgagtaccatctaccaaataaaaacggagtggcagtttacaagaagaatccagtacacagtgtttccaataatggtgccacgattgatctatcaggccggaatattgttttcatcgaacaagattacctaatcgactatgcaaatgtattggaatttatgtttgacaacaatcaacagtttgacttcaaggaatcgatgccgttccttgagagctattctgtcgaaattttgtatatgcggaactgctcaattactgctcttaacagctctacattcgagaaacttccaaaacttacttccctgcatcttcaaggcaatcagattctatcacttcaaggtacatcattttatccacaacatggactgacatacataaacttggccgggaataatcttcagttgatatcgattacggcgtttctattactcggtattttgaaagtaattatcttggacgataatcaacatttttggagaactaacagaaggcattttcttataagcacatcgataagcaatctaagctgtgaaaactgtggagttgaacaattgaccgatgaaactttcgatatgatgccaaatttgcgagcgctgaatttgcaaaataataacctgagctcttttgatatcgaacctttgaatgaattggaaacactttgtatagatgacacatatctcgacaatacaactcttcataaacttgaaaagcacttcgaccgagcgactgagctagaagctggctgtaaaaagcaaagtttatccaggctattgagaagtaaaatcaatagcagaaacattctttatgatattgctgacgcaactgcgatgacagatgccacggaggaaacgatcattgagagatcttttgtaggaaatgtttttaagaggtttgcccgtagatcagctggtcaggcgattagtattaatgtattagtacttctggtttcgctgctgctggcatgccatcgttatggttcacatacacatacatag

SEQ ID NO: 621 - DNA, 1114 bp, Aedes aegypti
atggcccacaacgatctgctgatcgaaattcaaagtgagtactgcttccggccacaagaatgcttcaacagctacgaggagtttttggccaaaatggaacagcacagctccaaagacctggtgtactattggcgtcgcgattcacggaccatcgaaggagctgccctgaagacgtcgcgccccatagcccccgccctgcgctactactcggttcggtattcctgcatcttcggtggacaaaagttcgaaccgaaatccagtggagccaagaagctacgccaatcgatccgcaatgactgtccagcttatattgccctacgcgcatccaagtgtggtcaacagttggtagtgatatccgtttcgaacatccataaccacgacatcagcgttgaaaatacgagaaatcttgcccacaccaagaagctgtcgtccgacatgaaacaggaggtaaatgtgctcctaatgcacaatgtggacaaaaagctgatccgcgaatacgtgcgcctaaaagacggtaaagagttgaccaccaaggatctctgcaatatcgtggcatcactcaggaagaatgtgcttccagtagactccagttcgcaatcgagtaaaacagcagaactcactttcaagctgatcaactacataagccatcacgaaggatcgatccccattaaggcacttgaaagtgcaaacgaaatcgtaggcttggacgttccggaagcagcggaaagcgttttctccgaaatggtcgaagaaagactgctggaagatttcgacgaagatgactctcagcattgcgggggaaatctcgccgaaagcaatcatgagtatgtcattcagattgtggatgatgttccacgcgaagaagagattccatcagtgacaaagtcccagagtagaatccaggagaggcgaaccagaactagatggaaggctccgtcttgcttcgcatgcggttccaataacaggctagttagagcgcagctcgaagtcttacgagcacggagggataagctcagggagcaaacagcattgttgagactgaagaaacgtaaattacagttagagattgaagtattgaatagaacttgtacctagtagttattaataaatatct

SEQ ID NO: 622 - DNA, 828 bp, Aedes aegypti
atggagatcgtcctggcgaaaatggttggcagttacaatcagttcatgtggaagaatagagatcttcgaagtgccaatttcccgttgttgagctcgaactggcaagttccggcaataattgtggtgtatatgctgacggttctcaagtttggacccagatttatggccacacgaaaggcctacgatttaactaaatacatacggatatacaatatagttcaaattgtgactaatggtgtactcttctcgtttcttgtctatcatcttctgaagcgacccaccatgtcctacgtctgtcagtcggttgacttttccaaaaccacctcgggctacgaagagctttacatcttatacgcctatttcgtcctgaagatcttggatctctccgacacggtatttttcgtgcttcgcaagaagcaatcacaggtgacattccttcacgtgtatcatcattcgatcatggtgctgatcagctactatggaacgctattcgtgccaggaggtcacaacttcgtgctagtgctgtggaactccatcggacattcgttgctctacttgtactacaaccttactacgtacaaatctccgttggcggctcggtacaaaatataccttacaaggatgcagttggcgcagttcgtatatttagtggtgcactatggaaggccagctttgactgggatggattgcggttttccgaaactgtggcactggaccggatttacgcagacgcttttctttttgggcatgtttctggatttctacgtcaaatcgtacattaagagaaatgtagaaaaggatggaaaaataggtcgcaaaacggactga

SEQ ID NO: 623 - DNA, 925 bp, Aedes aegypti
caacaacaaaacatctgcggcatttaaattacagtttctgatgctggaaacaaaaggataaaattacaaaagattttattgaaactaaacaaaaagtttaagcaatcctcacggtcaagaagttcaatcgcagatagcctttgtcggataagtaatctggagttaacaaattaaggatggcgacaaaacgagccttcaacattctcgagcaacggaacgtcaacgaaaatgcccacattggcaaaacgccattgccgggcaaaaatgtctcccgagccccgttcaaaagcgccctcaaggatttgaccaacagcagcgcggcgtcgcggtcaaatttaaccggaaaaccgtccgagggaggagcagcttcgctcaaaaagccttcccagcagcagaagtcctttgcttcgacgatttcgcgaaagaaatcgtccgaaagtaacattcccgcccaatcgattggctccaaaaagcaaaatgtcacggcgccgttgtttcccattttcagtccactggatgcggaatacagctggggcaaagaagcttgcctccgggaggatttgctggagcagatgatcgagtacaatggtcccacttaccggcgggagattaagcccatgaaggcgcttaaaattgagccactggaactgccggaacttgaaatgccgcgtccggaggtggcaaagcgtaacagagcaaccgtaaaagagaccttcccgtccagttttctcttcggtctgcaggaggtggacattccggatttggaatttctgttctagtcaccgaagggtggtgacgcaggtatatttttgattctattttagacgaataagctttctgtataatatttaaatctcaatttctatttgtattagttgttctatgataattgtccaatacaaaatgactgaccataaaaggacga

SEQ ID NO: 624 - DNA, 1737 bp, Aedes aegypti
atggctctgtcggacgtgggcacttctttgcagggactcatcctttcgcatggtggcctacaactgttgaaggagcgaaattgtgtgattcggctagaaaaccaccccagcgatggaaaggtgaaactcatctccggtggaggaagtggccacgaaccggctcatgccggcttcgtcggcaaaggaatgttgaccggagccgtttgtggaaatgtgttcagttccccatcggtcacggcaattttagactgcttgagagcggtcaccgacagagatgggagtgccatcttcatagtgaaaaactacaccggcgatcggctaaactttggcattgccttggaactggcacgagcgacatatggattccgagatgtgcgaatgctgttggtgggagacgattgttccattgaagatcataatgtgagaaaatcggttggtaagcgaggattggcgggagtcgtgctggtacataagatactcggtgcgatggcggaaagtggactgcctgtggacgaagtgtataattttggcaaaggactagtcgcaggcgagaatttggcaacgatcggattcacatttgaattaaaggacgggattctggagaacattgaaattggaaagggaattcatggtgaaccaggagtttatagaatggaagctggcaaggattttgaaaaaataattgaattcatcatcagcaaattgatgatcagcgtgttgaaatttaccgatgtagtgctattagtgaacaatcttggaggcacgtcggaattcctgatgggcgtttttatagaatcctttctccataaaattgagaccgtctacaatgtgaaacgaatctacagcggagcttatttgacttcgcttgatcaagctggaatttcagtaaccgttttaaacctgtccttaaagcttctcgattacctggactatgaagtaagtgtaccatcaacgctttttggatcaagatctagattcacccaattgccatcgaagacgattaaaatagaaacattagagccaatgataattcaacaaagcctgagctcttgtgaagttagttcagattttggcgcgaagcttgcttcaatgatcgttcattttgtatgcgaggcgctgatttcttgtacggttatgttgaacacaatcgacaaggaaacaggcgatggtgataccggtagtaccatatcgaagggagctgaatctgtcttgaaacatttgaaaaccaaaaagctagatctcgttcatcctggcattttgctccagcagataagtgttattctgcagcaagaaatgggaggatcgtcaggtgccttgtacagcttacttctccagggggctgcttccgttttcatgaacccatcagaagacagtcaaccaatcgatgtcaaacactggagtcaagcattgaaaaacggaaacgatacaattgtcaagtatgcgctcactcaattaggagatcgcacaatgctggatcccctgcgggaaggtgagcagcgaatgaaacaatccatcgaacaaggtctatccttgctggaatgtgtggaaagcttcaccaaaggctgcgaggaaggagcccgtgccacacagaacatggttccgaagtcgggacgagctgcgtatgctgcctcagcggaaaatacaaaatcttacacatatgctgatcccggagcccatgcagtgtccatttgggcaagagcattacttgaggcatgcaaacaggttatcgtcgattga

SEQ ID NO: 625 - DNA, 1527 bp, Aedes aegypti
atgatactaaccaccgttttcctcatcggattgctgtataaaaatccggtggcgttcttcttggtaattgtagctggactgctggtgcgtgagctaatcaaataccacttcagacactgggaacgctgcaatgtccccgggccgaaaccttcgctgatcttcggcaacatcgcgtcgaacatcttcctgaggcagcattttgccgaaatgatcgatggctggtacaacaaattccccaatgcgcccttcatcgggttttacaagattttcaaaccctcggtgatgatccgagacccggagatgatcaagaacgtcctggtgcgggatcaagcgtgcttctcggccaatgattttgcttttgacgaaaagctggacccactgttggcccacaacccctttatggtgtccggtgagcggtggaaaaagtcccggcagctgctgactccgatcttcaccggcagcaagatgaagcagctgtttccaatcatggacgaaatcagcagccaattcgtggactttgtcggacgtcagtgcggtcgcgaggtggaagccaaatcgatatcggcggcctatacgactcaaaacgttgccggatgtgcattcagtttggacgcagattgtttcaataatcccaacagcgaatggcgcgtgatgggcaagaagatattccagccgacgttactggccggaataaagttcatgctgatgctatttgttccatctgtgacctggttcattccggttccgtttctaccgaaggaagttgaccgttggatgcgtaaactggtatcgactttgctgcaagagcgaaaaaataaacaaccggaacgggatgaccagttgcaatcgttgctcaagaccaagtctgctgaactcacagaagagcagattgctggccattctctagcgttcttctccgaagggttcgaaacttccagcaccacaatgggatttgccatccttcatctggcagagaatccagatgtccaggaaaaactctttcaagaaatacagaacacgctaggaaaaaatgacatcccgctcacctttgacctggtgcagaagatcgaatacttggattgggtgctacaggaaagcctacggattacaccacctgcagccggtttgcagaagctttgcacccaaaactactgtctcaagtacaaggtggacggcaaggaagtcggaacgtggatcatgcccggaacaaccgtgctcattcccattgtagctgttcacatggaccccaagtactacccggagccggagaaattccgcccggagcgattcagcccagaggaaaaagctaaacgtaccgatccggtgtactatcccttcggcgaaggacctcgaatgtgcctcggaatgcgatttgcccaaattcagatcaaaatggctctgctgaagctggttcaacagttccgtgttcgcacctccccgaactacaaaccgtggcagtacaatagaaacacattcctgaccgaagccaaggatggcctgcaagtggtgtttgaacgacgcagttaa

SEQ ID NO: 626 - DNA, 1833 bp, Aedes aegypti
atgggtgtgcgtcatttggatacgttaattcgcaaaaaggtcgaaaacgggtgcttcaaagtgaacattgaacatgaaattcgggaatactaccgtaaagcttcgacgacagttggggaggtttctccaccaccaccgcccgtgttagtcatcgatgtgtttgctttgagtggtgagctagactcgatagatttcaattcgcttatctacggtgcgcgcttcaatgttggattctggattattgatcgattcttgcggaaattgaaatcgcttggagtctcgttggagtttttcatggatggtagtgtgcaagacttcaagatacgaacttggtgcgagcgtaaagacagggattaccaagacgcaatcgcaataataaatgccgttgatgaaggtgtagatattgagacaatacttacgaccgtgggagcgccaggatgtggctacgccctggaatatctcgccgaaatgcatggtagattgacggtgtccttggaaagggaatgcgaccaagaattggctgcattcgcaagcaaagtcaacgcttttgcgatcatctccaatgactcggatttcctcatctacgaagggaactggaggtattggtcgtcgagagatctcgatatcgacaccttggaaacgctagaatacaatcgccatgctttgttacagtatttgggattgaccttcgcccaaatgcccttgtttgccactctctgtggaaacgacattgtgaagcttgaagaactaaaacgctttcatttcagtctaggtcaatactgtcacaaaatgaccaatgtcgctaaatttgtccaaccacaagacccgaataatttacagaatattctagaaaaagtttttggacctcacaaccgttccgggaaggatcgcttctggatgagtttgcaattttacaaaacggactttgtaaccagttccaatgacgacccagtagaagaaattctcctgaagcacccgaacccattcgtgtaccaactttggcacaaacagccgcacgtcgtttcgttaggactagttgacatgcgcagtaccgaattgggaaaacaagtaccctcactagtcctccgcatactgctgcgcaccgctgggatcatcgtgttgagccgtcagaagggacggaagatctacatccagacattcgtcatcaaattaacccacgaatccaaccaccggatacaacgtttcccggtgcagttcccaagtttcactgatcctccaactctcatggaactcttctctacggatccattcgtcatggcgaacctcgagaatacgaagctactcctactcagctggatcgtgtcagatcggttggactatcgacgactcagaccgatattgagacccctgctgcctaccgttgtcaccctgtaccacttggtggaaaatcggatcctgcagttgttcgaagccgatctgttgcttcaggtggcatacgatgtggtcacggagacgtatgatcccaaatcattggagttcccaaccacggtagaaagccgcccgtttaggttggcgttcatctttagaatcatgtaccgtttcgttgccattgcaatgaattccattggtttgaacttacggggctttcgggaggaccctccattcgacggagtactttttcatacgaaataccggacgtgggacaagtcggaagcagatttggggaaaatcgcgcaatggcggatttatacaacaatttctcaatgaaaaaagtaatgcttttgatttcaacaccgatgtttcttacatttttatcgatttaataaaattgacgcttgttttctcaagcgcaatatgttttatttcttgagc

SEQ ID NO: 627 - DNA, 219 bp, Aedes aegypti
gttaatagtgacgagttgagagaagaacccgaaccggcattggattaccccggcggcagttcgaacagtgacaagattctcgcggaagataacaaatctcctttctcatcattgaataattttgaacgcgcaacaaacggaggagaaccgtcagaggataataaacctagccgaagtattttaacgagagaagttgccccttttcctggtcccgtgtaa

SEQ ID NO: 628 - DNA, 3347 bp, Aedes aegypti
atgatgatgatgatgcccggaggcccaccgcagtcggcacaaccgttcaaattaaccgtaaccgaaagctgtgataggataaaggaggagttcaactttctacaggcacaatatcacaacttaaaaatggaatgtgaaaaattagctcaggaaaaaacggaaatgcagcggcactatgtgatgtactacgagatgtcatacggtctaaatgtcgaaatgcacaaacagacggagatctcgaaaaggttaaatgcaataatcacccagattgtaccgttcctgtcgcaggagcaccagcagcaggtcctgaccgcagtcgagcgggcgaaacaaatcaccatgtccgagctgaacgctgtgatagggcaacagcgaccggatctgcctcggctactccagcagatgcacgcccagcagatccccggagcccacggagcgcctccaatgcccgtcggtatgccccaccctagtcttggccctggtgccctcgggggacccctgggagcccttggaagcacaccaccccagcaccctttagccatcctcaacaaacaggaactgcaccgaccggaggagtccaagagcagcaatagcaacatcatgcccctggacgaccgacatcgaagttccatttcacccaccgaccgagacaagtaccgaccgcggacgcccgagtcttcccacgagctgaagaaggtcaagaaggaggagaaggacatgggtcattccgatggggaaaagtcagaccaggatctcgtagttgatgacgcttcggagattaacccgatgagcccgatgcccaaccagcaccataatggaactgcttcccctcgcgagaatggcatgatgccaaaaaagctagacgttcaggaccgtgaacgcatcggaacccactcacctcgatcaggaacttcctccaatgcttccaccccgtccaacaagaaaatggacgataaaccaacgacaccgatcgccaaacctgccacgccgaccaactcccaggccgccagcaatggggtgccgaaggttgtcaacaagccaccagtattgaacccgggctatccgccgtacctgggagcaccacacgaactgcaagccgcctacggaggaccgggagtgcacaacaatctgccgcattcgttgaacaactatgcacgggcaccgctggctttcgatccgcacccgcagatgcgggccccactggggccgattgcgatccccggaggaaaacctgcctattcctttcacgtgaacgccgagggccaaatgcaaccggtgccctttccgcaggacgccctggtaggaccggggattccgcggcacgcccgccaaattagctccctcaaccacggcgaagtggtgtgcgccgtaacgatctcgaaccccaccaagtacgtgtacaccggcggcaagggctgcgtcaaggcgtgggacatttcccagcccggcaacaagaaccccgtctcgcagctggattgcctgcaacgagacaactacatccgctcggtgaagcttctgcccgatggtcggacgctgatcgtcggcggtgaggcgtccaatctctcaatttgggatctcgctagtccaaccccgcgcatcaaggccgaactgacctcgaatgcaccggcctgctatgcgttggccatctcacccgactcgaaagtgtgcttctcgtgctgctccgacggtaacattgccgtgtgggatctgcagaaccagacactgctgcgacagttccaaggtcacaccgatggagcatcctgtattgatattagcgctgatggtacaaaactgtggaccggtggtttggacaacaccgtacgatcctgggatctgcgagaaggccgacaactgcaacagcacgatttcacctcccagatcttctcgttgggttactgtcccactggagaatggctcgccgtcggcatggagaactccaacgtcgaagtgctgcacgccaccaaacccgacaaatatcagctccatctgcatgagagttgtgtgctgagcttgaagtttgccgcctgcggcaagtggttcgtgtccaccggcaaggacaacctgctgaacgcgtggaggacgccctacggtgcctcgatcttccagtcaaaggaatcatcctccgtattaagctgtgatatctcggccgacgataaatacatcgtgaccgggtcgggcgacaaaaaggctaccgtctacgaggtcatctactagtggtactagactggatcgccaagagaaccccaccaccccgcaatcctcctttttttggctaaaaggggaaacaatactaagcaaagcaacactgaaacaaatcttaacaccacttgcgttgaccggacgcgtcgaaagctggtgcaccaaaagtgtcatatattggattgtttggctggaatgcaagcgaaacaaacgaagttacaaaaacgtaaaatagtaataacaaagagatggaaattaacctgtaaagcctgattacactcattaagctacactttaagctataaaacgcaaaacccatttaactgtgtatcatagtaacgtcttgtgtctccgcaagctcacagagaagaaactcctatagttttctgcagcaagaatgtctcaaatgtaaaaatgcctaaccttcccccctagttttgagcgtaaggactatacaacttattcattagtagaaaatcaggaaaaagtgctctcaaagaaagatgaacttctcaatctccgacggcagtgtcccatcctattgtattatagatatcgttaacgcaaaagtgctccggatcttttgttttagtttgatttctgagacctgttcgaggacagcagcttaaatccgttgtagtggatcgacgattcccgttcccgttgttgggggacgcagtaggactttgtttcttagttcataatgtatagtaagtagatttgtttatttgtcccacacaaagtagtaataatgggaaagctttactttctgttgaattcattgtcgcgaaatacacactatttctagggaaaaaaagagcgaaattagcgattcagtagaatgcttctgttaatactagtttgtaggtgttctcctcgtgggtgaacgcaaaattgaatcatttatttgtggcaaagagaaaatttaatgaagaagcattagcaaatattcgtaacgacatcagcagaacagcagactcggaatgagatataagtaatgtaacagatgcgtaatagtaagtgaatggacaacggcgacaacctactcgtcgcgtagttgctacaaagtatgtaaagataacaatatgtaattattgttttttttttatgaaaaaaataatactgaaaattgttcttatttttcaatc

SEQ ID NO: 629 - DNA, 805 bp, Aedes aegypti
tttaccgtttggtgcggtaaatttaactcggcgacaagtgaaattttttagggtcgcgtaggcagctaaaacgtttgcggggaaaacgaatgcaaatctaggcactgattgattgtacattgttctgaactgtggagactgttgaccgacattctatgctgtgcagtgcacaatgtgcactaatcaactaatcgatactatataaacagaggcatgcttctgaaccgctatcagttcttcaacagacattcttctagcaatatgttcaaaatcacccttttcacaattagctgcctgatggctgttgcatccgcccagtactggggaggagagagcggttattggggcggtgaaggcggttatgcggcagatcaccaagattatcactcgtatccaaagtacaaatatgaatatggagtaaaggattaccacactggagatcacaagagccaatgggagcatcgtgatggagatgtggtcaaaggtggatacaccctggatgaagcagatggtacgaagcgtgtagttgagtactactccgataagcatcatggtttgacggctcatgtcaaaagaataggccacgctcaccatcctcaggtttacggacatcacggtggctactatcaaggatacggccatggtcattccggttatagttacaacaatttggatcaataccatcattaggattgattgatgatgttgaatagattgtttatcaaatggattgaggaatgcaaaagttattgaaaacaaaaaagtttttcataaataaagaatatataccattagtaaaaaccaa

SEQ ID NO: 630 - DNA, 351 bp, Aedes aegypti
atgtttaagttcattgctctggttgcctgtttggcagttgtcgtgttggcaaccgaagattaccactctcatcccaagtacaagtttgagtatggtgttaaggatgcccacactggtgataacaaggaacagtgggagcatcgcgacggagatgctgtggagggatcgtactcccttcatgagcccgacggcacacaccgagtggtgaactacaaatcggacaaacatgctggattccaggctcatgtgcagcgtgctggacatgctcagcatccggccatctacggtgaacatcttgaggaacacggccacggaggcgaaagctacgccaacattgatcaacatcactaa

SEQ ID NO: 631 - DNA, 2564 bp, Aedes aegypti
agacaaaatatttatttgggaacaaaaatcgcaaaatcgatttcattctcgaaaaattgtagatttctggtgaaaactcgtcttgtgcattgtgtagtatgttgtaaatcgaacattgtgtaattcctcttgtgattgtgttgtaaaaagccagctatgttttcgatcaaaactccacgcatccaacaaaaggatctccaatgcctcaatggctgcggattttacggcaatgcccaatggaacggactgtgctccaagtgctatcgcgaacgcacgatgaaggaacggcacatgaaactttatcgcccggttcgattcgaaggtcactcaagcggaaaaaagcaagagtctcatcacggtgtgggacacaaacagaaccaacagcagcaacagttatcgcatcaagctgatcaacgtcatgctgctaaagtcgttcatggccaatcggccaaagctggagctgcccccaaagaggaggacaaaaagaagaaacgtaatctaatggatctactgaaaaagaccacttccatgaaggaatcggacaggccttcgaggcatcatcatcatcactcccatcaccaccatcgacagccaatggataaactggaacaggaatatcaggatgcgttgaaagctctgaaaattgacgatgcagccaagagaggtctcaagtatttcatcgaaatgttggaccaggaaattcgtaaaaagcattcggactgtagcatagaagaagtatctgatattgtccagaatagctacaccaagttccaggaatatatgaacctggaaaatgccccattcataaacgtatcgcaggaaaccaaagagcaggcgctagactttttcgaaaagtgcatcatgaccatgaaccatagtcgattgttttcccctccgacgacaaatgacgaggagaaggattcgctcatccagaaacgcatccggcaactcagctggatcaatgccaaacatctggtgtgcagtatcgatgaggtcaattcggaggttcgcgatctggtgtacacggccatcacggagctggtgtcgatggattcgtttcattctcctcaggaaaaacttgaatgcatcattcgttgttgccggaatattttcagtctgttgaagcaatccgtgggtggtcccgcaagtgcagacgaatttctgccagcgctaatatttgtagtcctcaaagcgaatcccgtccgtctgcacagtaacatcaatttcataactcggtttagcaacgcatcgcgactgatgagcggcgaaggcggttactatttcaccaacctgtgttgtgcaatatcgttcatagaaaatctaacttcggaatccctgtcgatgtcggccgaggaattcaatgggctgatgacgggtgagaaagctggaccatcggcttgggagagcgcgctgatggcttgcgaaagcttacacttgatttcggagaatatgaaaacgatgaaaaaattaggtacccggaatgaagaaattttgaagggtatcgaaactctgaacgaagacatcgtgacctttcggaatgaaataagccaaaaagtgacagaggtcctagaccgtacaccgcttgtattgaaaccgattcgcacaccacgacgtctggagaaacgtaatgtacaaatttttagctcagctagtggtcatcaaccagtcgatggaggtcactttcagtcaaatctaatgacggtcatgaaggtaggcgacattgacgaaggaaaaaagtcaaccatggagcccgctttcgcaccgccaaccaatttcgatgatctagttcgaaatctttccgatacgctggttacgcctctagtttcagtggaaagtgataagaacttatcaccttctccgttgctaggagttagtgcgagtaattcgtctgatttgttgtcagcttcacctatttttgattacaagagagtttttgacacacctttggatgaaactgcaactccggacgacatggctcacacattcatcaaagggattcgtaacataaactacgattttgatttctccgaccatagcggcgagaacagtgcagccgacgaaatcgatgtaaaaccaacgccatcagctgcgcaaatgagtcgattcgatctagaagagttcgaccctttaattgcaaaaaaacgcgaagagactgtaccatcgttaccactgcagcccacgaccagtggaagtaacctgttggatgaggattcaccgcgagcgcttttgctagaatcgcccatcaaaccaaccgtagcagagtatcaaggtttttcactgcagggatgcaatatcccaaccataacgtgtgccgccggcgatatgggggcttcctgttccaacacgaaatcacatcagccaaagtcgtctctagagaatgccctaggtagtggtgggagcttgatataaagttgaaccctgtcctgcaggtgagtacagcttgtatgtagtagttgttaagtccgttatgtgtacgtttgaagatgtttaaaatatttatcaacctttatcagcaaatattacaacgactataatatatagatgcaatacttatcaataataaa

SEQ ID NO: 632 - DNA, 1181 bp, Aedes aegypti
atgctaattttcctaaactctcgtttgattgtcaccgttgagcgccttttcgagcagaagtactccgataaattatcattaaaccgagacagtcaaccgacactcgcccgtaccgccgccataagcagttccaaccgattgaaaaatccaatcagtcgaaatggcagtaacttatccgaatacgacctggaagtaggagagcgaacacctcttttggtttcaagggttcgtttcgcacctgaggtggacgatcgatctcgtcagattcaaaccgtacaaaccacagcccttcttggcattttaacgctgctcctgttccttctgctgggcattataatagcagtttatttgcttctgatgcaagtacctcgtccttggcccgtgtctcatccattttacctagtggagcgaaatgtctggtggaaacaaccagcagagcaattcgagttaagtccgttggaaaaacgtgcaactcagaatgtaataattctgcacacgagaagtgagacatgccacgatcaagccgcatgtattcaattggtacagaaactacaaaacgacgcgtggagtcaaaacggaacgcacattccgtataatttcctagtaggtggagatgggaaaacgtacgaaggcagaggctggaaatctcaacacgggtttccaaatctccccggaataaacgatacaattgttgtaggcatgatagggaccttcaatgatcaacggccagaaaatgtgatgtacgcagaaacaaaggcactaataacggaatccatcagaaggttttgcctatcgccaaactatcgactatttggcgtaattgacgactcaatacagaacaacgatgctgctggactatacgcagagattaaagagtggaggcattggcagggattcgttacagtttaggacaaattttatagctcaattttgaacaatcagtgaccgggactagtgttagttcgcaagtattatatgtttttgtgaaagattcgatataaactgctgattttatttttttaatgacaagtcggattttctttcaattcaaagttcctttcttttaaaaacttgggcatgtttagaaaaatatacgcgattcttctgagggcataaacatgagggcagcaccttaaaataatattattattgaagaataaatttcattcagtatttctctg

SEQ ID NO: 633 - DNA, 1022 bp, Aedes aegypti
gtttagtcgtcgaatggcaatgattgattgagtagcatagcgaatggagtccagcaaattgaagtgcgtattgtgcaagaagtatcccaacggcaatttctacaaatgcggaaatcgtcacgtaggatgccactcgtgcgtggacgaaaagaacttgagcctgtgcaggtgtgctcaaccgttcaaccgaaagaagcagaatccgaaggagaagctggaaaagcagaccaaaattccttgcgacttcaagcaatccggatgcacttggctgttcggatcagcacagctggaagaccatctggaggagtgtaaatttcgcccgtatcgatgcattatcgatgaactcgacgtaaagccatgcaactggactggacaacagcaggaaatagaggaacatctggaggaagaccacccggaactaggagcttgtttcagttacttccaagaagcagtcaggatctccttcataccgagcaaatctaaagccgttgtcaaactggtggatgcctttagcaaaaaattcctcttctactaccattcgaatgccgatagccgtatgctgtacttcatgatcgtttactttggacgacgcgtcgaagctcagcagtactgttacgagttggacatccggtcgccatcaacgcacggcattcctcgcatgaagttcgtccagcagtgcgtggccgattgtgaggattttgaccaagtgatggagcaggaaagccactgcatcgcaatctcgttcaaaacgatcgaacactatctgcgcgaagaagggggcacgggcacgttttcgttccgattcatcgtaaagaagacggagaaagatgccagcaaagtggcggtccgagaacagaagacaaccaaaaaaggaagcaaagtttcttcggaagctgagcgagtggaaagagtcagatatatatccggctcgtcccaggacgatccaccgttgcgggtggaaacgacggacattgagtatccgattttttgacaagaaatatactatgttgtgctgtacgatg

SEQ ID NO: 634 - DNA, 1880 bp, Aedes aegypti
tgcccattctctggcagcgtcacgaatacctggagtaaaacaatgtagtaaaaaataattgtgggagctgctcgttttcattcaagaagtgataacattattttgcttaaacgtaattcaattcaaacaaattttaaggataaaccaacaactccaaaagatgagtacatcaaccttttgccgcacctgcggtagaggtggattgatcagttccgttccgttgattcatcgatcggaagtatccagcgaaacggtgctccatatgatggagtacgggattggactaaaggttagcactgacgacggttatccacagcaagtttgtcggatgtgttacggccagatcctgatgagttacgagttgaagcgcgcaagtgtggaatctcagacatgctttctacaactgttcccacttataacggtagcacaagccggcgaagacctaccttcggtagattatgaactgagatcaattgaccaggcagtcaaagtggaaccggaagacgttccaatagtaacgacagaatttcaggaacctctcgaacatcaagaccagaacactctagaagcaaatgaaacgagaatcgaagagattgttcaagcaactacattggacacaaatgatgcctcaacgataacggaaacgagagaatccgatgtcgaagaaacgtttgagtacgatcatctagcttcattccttcaccatgagcagtggaaactcaggacttatacatgcaaatactgtgcctatcacacgttcgaaagaaaggattacatagaccattatagcgtacatcctgaagcccttctttgcccgtgtggatttgtatccaaccgacggtggtctttgaggcgacatctgggtaaatctcgttgcgaagaaaagtatgggaagcaaattaatattaaaccgccaaagtcgcgaaaggataagaatgttgcacatacatcagatactcaatccaaatcaactgcagaagcaatgagttcaacatcagagaatccacttgtcgatgaagttcccgtaaacgaaggggagtattctaagtctcaaaatagtattactacgctagcaagtccagatggatctgtaactgataaggaagatccaccgatcgatgattcgtatttaactattgagtctgttaaagtagaaccggaggagataatatccgtcaaacaatgccgttcaaacccctccgacaatagtggacagaagagaaaaaaatacatctgtacacactgtcctttctcaacgtatcagcgaacgaggtacttgtatcatttgaagatccaccagaggctcctacgctgtgtttgtggctattcaaccgacaggcggttttccctacgacggcaccaagctaaccgacgctgcgaaaaggtcgacgagcctgcactgaaggagaggcgccgcgataaaatacgcgagcatcgaaaggtaaatgcgcgttcctacttgacccccaaaacaacgcaccaaaaggctctgcgctgtgtttgcggttttgagaccaaacgaaaatacaacctccaaaggcatctagcaatctattcctgcgaggaaacctacggagagaaggttatttggccatctaaacaggaaaggttgagtgataaaaatgaaccaaacgacgcaacaactgattcatcttcagtgattatcgacgagatgtgttcaacgactgaggccgtattatccgaaaatacgcaaccagaactttcggaacaccaggaggaaaaagtagatttggagaatgtctaagcgggtgcagacgtgagcggtaagtttctagtccatcgaaaaggtatctttgtaaactgaacctgtgccaccgtggttaggtatagtagacaataaagcccttttttctccttgg

SEQ ID NO: 635 - DNA, 419 bp, Aedes aegypti
cgtcaaacagctggcctgcgtagacgtaaccatccgattcatgtgtgtttagtattattcaactcgtaaagtcattcagtccagtttttctaatcattatttgaaacatccgaagctccctcgataattgaaagcaaatagccgaaatgtcgctcgatttggacgaatgttacgagcatgtcctcggattggtagaacaagctggacagattatcgcatcgaggaattatggagagaaaacggtggtggaaaagtccagcaacattgatttgttaaccgaaacggatcagcaagtcgagcgacttctgatggatggtataactgagaaatatcccgatcacaagttcattggtgaggaagaaactagtgctgggaagaaggcagagctgtccgataaccctacctggattatcgatcca

SEQ ID NO: 636 - DNA, 956 bp, Aedes aegypti
ctctctcaagcagaaggaatgtgtaccatataggaataccttctttcttcactaacgaccaaacgaagcagcgagcaaaacaaaagtcacaaaatcggaaggatgtcagcggccgcgcgcgcgaattagcaatagaaaaggaaattcatcaaaaacagtaatcgatgtccttgcccgagtcggacttgggtgcgtttattaggaattcctggtagttattttttacaataattcgataatttgaagacacaaaagtttacagaagagtgaaccactgttcattggaatggttgaccggtctttcgaattggtccgggagctgacgaggacaaccgaaaccattcctccgttcaacagcgaaggtgttcgatctgcacttgaggatatcaatcaaatctatgaagataataacaataatgcgatggattataatcgaaccggtaatcacaaatatctcccgctaatcatgtaccgccacaagttgattcaaaggcaaaagcgttgcctcatggtctacctgcacaatcgacttcaaaagctaaaaaaggtacgctggcatctgggagccacattgccggccgatatcaaagccaacctgaacgagccggaattgcagtggttcaacaattactcgcggatgcttgccaaatacatggcgacaattggagacgggacggggcttaatctcaccaacgacatcaaacctccgaagtcgctgtttatcgaggttcgctgtctgactgattacggtaagttcgaactggaaagcggtgaaattgtactattgaaaaagaatagccagcactatttgccaaagcttcagtgcgaggctctaatccgtcagggcattctgcagcatatcgtgtgatcatgcatcctaagaaaaaaaaactgttcaccatatggcaaagtttctgaaaaaaaaaattcaaaatgcataaatcaacgaagcgcaa

SEQ ID NO: 637 - DNA, 1848 bp, Aedes aegypti
atgaataccgctcacgatggcatacccagaaaaacggtgagcaacgagcgaccgatttgcgaaatctgcggaaagtcgttcatctcgaagaccagccttcgcatgcatgtcaatggggttcacaaagaggttaaaaagcattcgtgcaagatttgtcagaaaaccttccgctcgaattttaccctcgagagacacatgctactgcatacggatagtaaaccgttcagctgtaaccaatgcgatgaatcgttccgccgagccttgtatctccaatgtcacatgcggcggattcacgaagaaaagaagtttgtcgtttgtcctgtctgcagtaaagaattcaacagttacaatgccatgtatttgcacaaaaaagctgttcatttcaaagcgaaacggaaagcagaggaacccggcatcttggcatgcaaactatgtgaccatctagcatcgagccacgaattgcggaaacatatcgtggcatcgcacgccaacgaggcctacccattccggaggtgttccgactgtccgcggacatttctcacgtacaccgcgtggtacgctcacaaatccgtccacaacgacaagtatgcttgccaagagtgcggcaaacgctttgcttcgtcccatcagcggcagactcacgtggacactacccatatgggtgggaagcgctgggagtgcccgcagtgtccgggcaagcagttcaaaacgactcgcacgctgaacactcacatgggcaggacgcacggcacactaaaggcgcacgcgtgcgaggtttgccagaagcgattcaaccggaaggacaacctggacacgcaccggagtaaagaggcggggcctaagcagcacgattgcgaggtttgtgagaagacttttacgaaggcaatctacttgaaggttcacatgcggacccatactggtgagaagccgttcgcatgtgacgtgtgctttaaaagcttcacgcaagcatctagcttgaatacgcacaagcgtctgcattccaatataaaaccgtttgtatgtcagatctgtggagccgagtataccagttccggaaactacagggttcatctccgaacgcacactctggagaagccttacaaatgtagctattgcgagaagactttcaaccaactgacgtcgaagaagctgcacgaaagggttcataacaatgagaaaccttacgtttgtcaggtttgcctgaaagctttcaccaacatcagcaatttgcacgtgcattcccggacgcacagcaatcagcggccgtattcgtgcgatcagtgtggcaagcgattcgcccaatcacaaaccctgaaaacgcatgtcctatcaacgcatgccgcggaacggccttacaagtgcgacctctgcccgcggtcgtacgcaacgcactccaacctcagaaatcaccagaacagtcacctgaaggaaaagcctttcatctgtaacgagtgcgatcgccgattcacgcagaaaagtaccctgaaaacccatctgctgtcacatcgcaaagagagagacttcaagtgtgtcgattgcgacaaatgtttcccaacgcagggcgtcctgaacacccactggaggcaggctcacaacaagaaaccacccgagtcgtcgcagcgagagttcaactgcagcgagtgcgatcgggtgttcaaatttagggcccgttttgttacccatatgcgtacgatccaccaaaaggaggtcgacgtagtgccaaagaaggaaggtgcgactgtattggctaccgatggtcaattcaatggagaagtcgctgaagagtcgatgaccctgggattcgacgaaatcccgccggatctggttccggatctgcatttcaattag

SEQ ID NO: 638 - DNA, 1025 bp, Aedes aegypti
gcagttgacggagtgtaatttaccgaaccacacacacgtttgtgggcttagtggcagcttcgaatcgagcgaaacaaggaatggccgatacgcaacaggaccaggacatgaaccagcaggatatggacagcaacggaaacccaggccgggacgatgacaggaaactgttcgtcggtggactgagcaaggaaaccaccgagcaggacctgcggaaccactttggccagtacggtgagatcgaaagtgtgaacgtcaagaccgatccccagacgggccgctcacgaggttttgcgttcatcatcttcaacagtcctgagtctatcgacaaggtcgtggcattcgaagaccataccgtcaacggcaagaaggttgatccgaaaaaggcgaaagccagacagggaaagatctttgtcggcggcttgagtccggaaaccagcgacgaggaagtgaaaacgttcttcgaacagtttggaaacgtagtggagatggagatgcccttcgataagatgaagaaccaacggaagggcttctgcttcattacgtacgactcggaagcagtggtaacggaactcttgaagacgcctaagcagaccgtgggaggcaaggaagtcgacgtgaagcgagcaacacccaagccggaaggaatgcagatgggtggccgtggaccgatgcgaggatcgccgcgtggcatgcgtggaggtcgaggcggattcggcggaatgagaacctacggacaaggctggggcggcggacaaggattcggcgggggatacaaccaaggcggtttcggaggaggattcggcggtggatacggaggaggcagcggcggtggcggcggctggggctacgataactacgattattccggttacggtggcggcggcttccagggcggcaagcaacgaggcggcggcggaaaccggcagtaccagaggccgtactgaatcccaactgagtgaaactgtctaatccatatttccttatttgagcggaataaagaatataataaacagaaaatctaatat

SEQ ID NO: 639 - DNA, 2043 bp, Aedes aegypti
aaacgagcgacgaaaaacgctaacgcagggctgacagccgtttgacagttccctctgcttttgggtttcgcgatttcgctaatgttttgcttcggttttggggaaacaggaaaacattttcccttttttcgagattttgagacattttccgggaagaatcttcagttcggcggctgaaatccacaatggcgcacagttccttccacgaagaagatcgattcaacgacttttacagcgaggtgaaagaaatcgaaaagcgcgactcggtgctcacttctaagcagcagatcgaccgtttgctccgtcccggtgcaacttattttaatctgaacccgtttgaggttcttcacttggagccggatactccaattgagcagatcaagaaaaaatatcgtaccttatcgattctgatccatccggataagaatccggacaatcaagagcgcgcccagcaagcattcgaagtggtcaataaagcgtggaagactttagagaatgaggccacccggaagcagtgtttggatgtttacgaggaggcaaaagggcgcacggatttgatgatcacagagaaacggaaaaagctccggaaggaaggcaaacaggaaaccattccggaggatgatcccggcaagtacaagcatgcagtgtacgtgatggtgatgaaactatttgccgacatggaacggcgccgtcagcagctggaccttcgcgaccaggaagaacggaaacgcaaacgggagcaggaaatcgaagaggaagaacagcgcaacttccagaaggagtggcagaagaactttgaggaatctcgccagaatcgcgtcaacagttggcaaagctttcaggcgtccgcctcgtccagtaaaccgaagaaggccaaaaagaccaagtacacctctttcaatcctcccaagatcaagccggaatcgcgataaactccggacggcagttgtccatccaggcttgggtttttttgtcttttatgattttccgttcattccttctactatgtcagaaacaaagtctcaaaaccagtaaaggtacttgactaacactattcagggactaaatttcttattcgtacagagcactgtttttacatcaagttggtaagaaactatcaattgggagattggattcaaaaatctttattaagaatgaagatcataggtgtcatctattgttcgacaaccataaactgtttccatttactttaatttttcgaataatcgaaaagtattcaatttttgtctaaagtgtacccgattccatattcgtagcccctcaagcccttcttcgacaggtacaggctactattattctgaacagcactgtacatctgaacaacgcaatgaagaacttgagctatcacataacgcattaaagtttagttttaaaagttgtgtatttgtgttttatagttgtatgcatatggaaatgggccaatttcagacaaactcaatatatttctattattccaaagatggaagtatatgaaaacagttagtgattgccgaataatagatgacacatatgacctttattatcggtaaagtatttcgaggccgatatcttggtcgatacatcatttgatagtttttcatcaaattgatttaaaaaaaaatgccctatacgaatatgaattggagtaaccgtatattatttaccagaatcaacgacaagcagaactacattatttttgtaacgcaacacataacggatcaaactagctgaggtcatgcatttttttataattcgctcactaataatcaaaccccgttgctaatcggatcggatcaggcgaggttcgacgtttgtagaattcctatggctacgacaaaatggtgtgcagagaatgcagggggtaaacgaaagtctacagctggcaagcagcaacggtaataaaaaaaatggcattaagggccttttgcgtttaagatagtttttatgtactaaggtaatattgatgagagagagagagagatacaatgatcacaatttataatgtgtgaaactgaaatagtaataaatacgtacacaaaattg

SEQ ID NO: 640 - DNA, 1074 bp, Aedes aegypti
atggcgtatgtagtggctccaaatattgaaccctaccgaaaaggccaatcttttgcgggatggatgcgtcggttaacgttccatttccggctaaataagatacaggacaatgataagaaagatcagatgttcatgctgggcggggattacctgttcagcatggccgaaaaactttatccaaccgaagcacttttggatgaagtggcctacgctgagctagttcaaaagctcaaggaacgtcttgatagaactgattctgttctactacagcgttatcattttggctcaaagctgcaacaacctggtgaaacggcgagcgattttgtttttactttgaagctccaagctgagcattgcgagttcggcgaccagaagaaccgactcattttggaccgtcttctggttggcttgacggataacaaccttaagcatcgccttcttactgaggacagtgccaaattgacccttgatcaagctgaaaagattatcgcaacctgggaaatggcggcgactcatacaagagctttggcgaacaacgatggtgtcggcttggtaggttttgtgaacaataggtatcctgtgactggaggaagaggagcagttcttcagcgagtgagggacttagcccagagctaccgtggcccggtgaaaagccgacttggtgcgcggccagaaatccggccggccgaggattgtcgacaagattcccgagttcggttccagcgaggttcccaatcccagcagcataggcaccgagatccatctgctggctcatctaatcgcagattacagcgaggtgacgagcaatggccggtagatcagcgctattgtagctactgcaaacgcgggggccatgtacggaggaaatgctacaagatgaagaacgagatgaacagcagggtcaaccatgtcgaaacccaggaggcagagagcagcaccggaagcttgagccagctggccgagcgactagaccggttgagatctggtaactgggactccgatgataatgattcagatcatggttggaaacgaggcgataactaccgcgcatccaactcaaatacggctcgttaa

SEQ ID NO: 641 - DNA, 3611 bp, Aedes aegypti
ataagtccaccgttgattttctgaccatatcagaagtatcacgcagaacattggaagctgacgttttcgaatgttttcctaagttggagatgtttacgataagcggaaatggactttctgaaattgatggagatgcctttggaagtgtgccctcattacggattctgaatatgagcagaaatgacctaaactcattgtttgatcatgggaagcctgtgttagaaggactgactttgcttaatcgtttggatctgagttcgaatcaatttcgaatgttcaacatcggttcatttaaaggtttaagtaatttaacggagttaattgtagcagataacgagctggaacaaatttatggaagaacattcgaggacttgatcaatcttcaagcgctggatatgtcacaaaacaggatcgactacctaccaagtgcagttttttcgataaacactaaactgaaaatcatcacactgagagaaaaccgaatgaaatatcttagtgcaaaagcattccaagggctgtacgaactagaagagctggacttgtctgcaaacggaattcatatattgccaaaaactatttttaggccattacataaattgaaagtgctgcttttgaatggaaataatttggattttttgcaggagtcaatattttgctcattgcaaagtttggaatttatgaatattgcagataaccacgtagttaagcttcaacagtcaatattcaaaccgttaacgaatctcaagctgttcaatgcgcatggcaataaattatcgtcaattcctgacgatttatttcaatacaataccttgttgcaggacgtcagttttagtgacaatcactttgtcagctttcctgaaaaggcaattgccactttgacacaattcaagagtttagatttatccaacaatcttctaagttccgcaataaagattgaattatctaacttaactcacgtcagcttcattcatttggatcacaacaaaatagtaacagttgcccttgatgccttcaaaaaattatcgcaactagaagacttgaacctaagttttaattccattggagaccttcaaccagcacatctaagcggcttattgtcacttaaatatttggatttgacaaacatcaatttgagaaaattaccggaaaaaatattttcttcacaaaaccttctgcaaactctaaggataggagacaatatgttagaagagatacccgagtcaacatttctcgcaatggaagaccttcaatatctaagccttgaaaacaacagaataagaaatttgtcctgcgatttgttcaaatctaattacaggcttaacagtctttacctgcatgacaatcagcttgaacatattcctgatggatttttcgatggtcttgacagcttacaaatgctagcattacataataataggatatggaaaatcaacgaccgagtactcaatggattacgaaacgtagaaaagattggacttcacaataataacatttataatcttagcccgaacgctttcaatgaactattgctgttgaaagtgattcacttgtatgacaaccgcatcagagatttggcaccaaacttgtttgaaaataatattctgttggaagaagtagtgttgagaaataatcttatttcagccatcccccaagctacgtttcgatatttgacaaaacttcaaatcctggatctgtctggtaacaagataacgaaagttgatgctcagacctttcaacagtgtggagccctacgagagctttggctcggtggaaatgagataagaactatcaatgaaggaactctacgaagtcaaaagaacttggaaatgttggacctcagtcaaaataagatttcggatattagagctgatacatttcaaaacttggttaatttgaagcggttatatctgggaaataacagaatcaaagtgctcccttctacgcatcttaaaagtctcatcaatttgagagtactctctgtgttcaataacaacttggaatcactgcacaacgatcagtttcttaataatgaagctctagaagaactgtttttggatggaaacgagatatcagaaatatcgacaaatgcgttcaacggactcagccgtttgaggatactctatttatcgaaaaacaagttgaccgagattcaggaaggagtttttggtgcattggctgctctaacggagcttaaattagacagaaattctctagttgagcttccagctgaattacttcaccaacaaaaagctctcgagttcttgtgtttgtcagaaaacaaattaagttccattccggaagatcttattcataacaacataaaccttaagattcttgagatcaacgacaatcagctaacatcaattccagagtttttcttctgtcctgctttacaactaactgaactctacttggaaaataacctcatagaagatctgcctgagcaaatattcaacaaaaactctcgtttgaaaattctaaacatagctggaaacgcacttttgcagtttgatattctcaaaaccggatttgcagaaaatttacaaatcttagacattcaaggcaaccaactccaaatggttcaaattcctcgaaatctgatcaaactgtttgcccaagacaatcatattgaaacagtgttcatggaacaatcgtcgtaccatcaactagaagtcctaatattatccggtaacagtttgcaaaaagtggacaagttattcaaactgaaccgattaaagtcaatggatctgtcaagaaacaaactaaatgaactggacattagtcgagtgtataaactaccgcacttggtggatttgaatgtttcaagatcagaggtacagtctctaacaggagtgctgcataaggaacatcacagtttagtctcgcttgatctaaccggtaacatgatagcgcattttgattactttgtttcgatatttttcacatctttactgaagttaggtgttacaggaaatcctttcgttaatgaggatttttatgacaacatggaactgttgagaagtattgatgcgttgcaagagaactttgaacttttttaggttattttggtagagatttgaaattgtactcagatatagttatgattattttaagtttagagctgttttggcaatattttttttttcagaagctaagtagttttaatttcaacagtaatttgaaagcaaatacattcagactcagtctgttagttcattatcaatgattctaagtgatcgaatataagttttaaggataggattaaatatagtgttgtaacttgtgatttcgtttcgttacttctgaacaaatggtggagcaactgtatacaaaactaattattgatatcgtttcttcagctcatgaattgaattccataattgaattttccttgatttccatggacttaaagtcgtttcgtatagaatactaagttgaaatcaggttctgtcccagtagggacagatcgacaagaataaaaatgagatagaatatactttatattttaaattgacttctcccatattatcgtacattgagtaccaccgtaaggagttacattgtgtctagggagtgaatttgatcagtaggtgtctaaaattaatctatta

SEQ ID NO: 642 - DNA, 828 bp, Aedes aegypti
atgcttcaacataacctcattgctaccctttttcacaaccaacagcaattctggcaacccggcctacagccgagcacatcacaggacgtcaaaccgttcgcccaggcggcgtacggcccgatgggcaaaacggccacggccgtctccgacagtggtctccaagcggcacacccctgggagggccgggcgatagcgacgcacaagttccgcctcgtcgagtacagcgcctacctggagatgcgtgttgaagatacttaccacaagcacttgtttgtacatataggcgatcagccggcccaccccctgctggaatcggtggaggtgaaggaaatctacgacaaattcccgcagaaggccggcggcctcaaggagctgtacgagaagggccccagcaatgcgttcttcctggtcaagttctgggcggacctgaacacgaacgtggcgaacgatgccggcgcattctacggcgtcagtagtcattacgaaagcaacgacaacatggtgatcacctgctcgacgaaggtgtgctccttcggcaagcaggtcgtggagaaggtcgaaaccgagtactcccgcttcgagaacggccggtacgtgtaccggatcagccggtcgccgatgtgcgactacatgatcaacttcatcaacaagctgaagcacctgcccgaaaagtacatgatgaacagcgtgctggagaacttcaccatcctgcaggtcatctccaacaaggaaacagacgagaccctgctctgtgtggcatttgtgttcgaggtgtcgacgtccgaacatggcgcccagcaccacatctaccgcctggtgaaggaatag

SEQ ID NO: 643 - DNA, 1024 bp, Aedes aegypti
cgaataatgttacggagtgtcgtagtgctggtgattggtttcgtcctgtcaggatgtcaagccagaagttccaatgcaaccgaaggacttccgattgtaatgtggcacggaatgggtgatacttgttgctttccgttcagcttgggaggcttcaagtcattcttggaaggcgatctcggagtgtacgttaaatcggtagagatcggaaactcgatcgtaactgattttaaaagtggttacttaattcacccgaacaggcaggttgaagaagtttgccggcaactgggtgaagatcctaaactggccaacggctacaatgcgatcggtttctctcagggtggacaatttctacgagcgattgctcaacgctgtccaacgcctaaaatgaacaatctgatcacccttgggggacaacatcagggtgtatttggattgccggattgtccatcgctgagcagcaaaacctgtgagtatttcagacaggtgctaaactacgcagcctatgcgcgatgggttcaggactatttggtgcaagcgacctactggcacgatccgctgaacgagtatgtctacaaggagtccagcaccttcctggctgacatcaacaacgaacgaacggtgaatgaaacctacatcgaaaatctgcagagtttgaacaagttcgtcatggtgaagttcaccaaggacaaaattgtgcaaccgatcgagtcgcagtggttcggctactacaaacccgggcaggacagggatattcagaagctggaggagtcggatttgttcctgaagaaccgtctggggttgcaggaaatgcaccagagaaataagctggtgtttttggaatgcgaaggaaaccatttgcagtttagcaaggattggttcaagaccaatatctatccgtttttgtgaaccaaagaataagataagaagtgaattaatttgattgcatatatttgcattaattctaagactgctgctatattatcatgaaacttaacactaggtgcgcaataaaaaggtagtaatg

SEQ ID NO: 644 - DNA, 864 bp, Aedes aegypti
atggaggttaaaagagtgcggattacaaatcggaagcagtttgagctgctggtggcttcaatggagcaaaatccctctattgccaagggattgaagtactgcgaggccattcacatgggcaaggatatcttcctggatacatggaagaatttaagcatgcggctaaatagcttaggtcctcccactcgctcggtaccggaatggcagaaggtctggtcggattataaaactactataaagaaaaagctggcccacaataagaaggagagtgcagctacgggaggtggacccaaccggatgataacgctctcagccggtgaagaggcagtggtgaacctgctaaagctggataaagcactgcaggcatcgccccgttcggcatcagtctcgcaaccatcgtcgtcccggtctgcatctaccccgcaaccatcgtcatcttgtttggcaccagcttcacaaccatcagcaacccgttcgccaccggcttctccatctttcaacgaatttctatgcagtactccgaatgccgatgtggagatggatctcgacgtggaaaatgttgaaaacattgataccaccaaccgcaacaaccaacgaaataggaataagcgaaagaaagaacaagacgattcaaaaatggaaatgcttcaaaagcagacaggttttatgaagcaaatggctgaggattcaaaggaaacagcgcgttacacccgtaagatgttcaagctgaaggaggaacattatagaaagaagcaggagtacatgctacagcagcagaagcacaggtgcgaggagttgcaatttaagatgcaactgcttgaatataagaaaagaaagttggagttattggaacgtacctcgtga

SEQ ID NO: 645 - DNA, 1761 bp, Aedes aegypti
atggatatcgaagacggtaaattagattgtggttcaccagatgcgtcagtggcagagaagtgtatgtcaagtagtgatgctactacccagggcgatggacaatgtgacacgagagtaatagctcaaattaaagctgggacgttgcgtggaataattgaacggctgcccaatggaggaaacatgtacgtctttaaaggaattccatacgctcaagcacccgttggtgaactgaggtttaagcctccccgcccgcttgaaaagctcacgaatgaaatactggactgcacacaagatggaccgggttgttacacagtcgacaactatctgccgaacgaccgcatgtcggagagctgtctatatttgaacgtgtattcaccggcccaacaaagcctcaaatgtgaaactgacaaagagttacccgtcatgatatggatccatggtgggggcttcgttagcggaagtgctcaatcatctatgtacaatcccaaacacctggtccaggaaggagtcgtcgtggtcaccgtcaactaccggctaggtccacttggctttctttgcctaccgtcgatgggaatttacggcaatatgggactgaaagatcagagaatggcttttcgatgggttggtgacaatatatcggctttcggaggggatcccaataatgtcacaattttcggacaaagtgcaggaggtgcatccgtgcatctacattacctctcggagatttctcgacagtattttcataaagtaatcgctcaaagcgggactgctttcaatcaatgggtctttcagagaaatcctgaagaacgttcacgaaagctggcgacccttctagggtgtccatctgatgacgatgacaggttgatctacgacactttgatgaaagcatctccgaaggcgctaactgaaattcaatacgaagttatgtctgaccgggaaagaaacgtattagtaaactttcctttcacacctgtgatagagaagcccggttcaggtgatccagttataacggataatcacatgaatctagtgaaacagcaattcgctaaggacattccaatcattatgggtatcacaaatgaagaaggatctggtctcgccaatcacgtaattgataatatggagcagtatacaacaagcataacggatcagctggttccttttgcgtttcacaaagaagataatccaaatatccgtgatatataccatgaaataaaacagtttttcttaaagggagaagagttaactttaaacaatgttccaattgtggtacaaattttgggtgataatgctaataaatatgccgggtaccaatcagccaaactgcactcacgttttcaaacagccccgctctatttctatattttttcttacacatctgagttgaacaaaatgcggctattagcgaaaacgcctgagaactgtcctggagctgttcacggagacgatctctgctatctttttgagtcatcgttcttcaacacacaagcggtgagcccccaatcaatggcaaagcgacgaaggatgtgtcatctttggacgaactttgccaaatttggcgaaccatcacaggaatggccacaaatacgtatgcatgatgacaaaactcgatttgtattgaaagctttagagatttgtgataatctttcagtagtgaacaatacattttccagtagatttgatttttgggacaatattttcatgaaatatggtgaaactcaatgcgattcttactgtgaatagaaacaacatagtttatac

SEQ ID NO: 646 - DNA, 1010 bp, Aedes aegypti
cgaaaagcatcgaaacgaccaacagaatgtgcgaagtcgaaacgggtgtgcaaattcttcaacgaatatcgtcacgtttatcatcgagcgtgacatgcctggacccgaacttgttccccgatggagggccattgaaaggcgaaatggtggaagtatttggcgactcaaactgcggtaaatcttgtctgattctagagttcattgcaaaaataatacttcctgaggattacggaggacatggaatcggagctgttttcgtcaactgtgataacaatgtcaatatggcgcggcttttgaacataatggagagacaaatcatcaactactcaaagccggctagtggtaacattgataagcaggaaatccgcagaatccgacaggaatctttttcgcgcttgactattataaaatgctgcacaatggatgaatttgaattttcattgctgacactgaatgaaatcttcatcaagaatccactcagtgtatatctactgatcgattcccttacagcattctattggaacaaatgtaccgaaaaaaatctaattcgaatggatacctatttgcgctctttgcatactcgattgaagaagttgtgccaggaacgtaagattgttgccattttcacaaggccattctactttggatcagcgaaggactcagttcaaggagacctggaatttggcgcattggccatggaaggcagtagcgtgacgcagatgagttctaccgcaggaactgcactgacgacaagctcatcttttgcggtgggtggatactgcgtgccggtggagcatcgaatagaattatcggaagttgtatcacaaacacccagcgatgataagaagttcaatgcatttgttacttcgaaggataagcaatatattaagtttttcatcatcgatacttacggaatcaattggctgagttgttaatgttatgaactgttgtattttaagatttcgatgtaccttacatgaagaaataaaaataaattctcaattgaattg

SEQ ID NO: 647 - DNA, 2289 bp, Aedes aegypti
atgtcggaatggagcgaccagcgaacctcgacgcagaactccgacgacaatggaaggaatgctctgtccgagatcgatctcaagtcgacggatctgtcgaccagtgataacaattcgtcggtgaactccagtaagttcccccttcgacgtatcggagacctctttcgaagcaagctgcgtagctcgggaagctattcgattcgggcgctcgaagatagtgttccgcaagagtgcaagatagcggatagtaacgtgcaggatgtagaaaaggtaacaactccgacaaagaatccggatcgtccggggccagatgtgacgacgacggcagccgtggtcgtgaatgagaaaccaacccgcaacggaagtagtattgtgggtgcagctagtagcggtggaacagctttgagagcgcggaggatgtccactctgagtcggactatccagcgacagaaaagtttaatcgctagtatcaacggtgagagaggacaatccacgctccgaacaactagcaatggccacaagcgtcagtccatcagcagccaggacacttccggtgagatcgaatcagacgtcgttgtgggcaaatccgtcggacgagaacgcataaattcgacgtcgcactattccactgagaaaagcggatcgtcaggttactacagtacaaacatcttctttgccggcggttcagtggtggacgatcatatctactacgaaccagttgtgaaccgagcacggaaaccagcctcagaaagtgggaacaaacccactggggcaaccgttggcaagaaagaaggcatcttgaaaaatagtaacaaatcgcaagatgcaaacaaagctcaaaagaatggcaaaacgttagaaaagtactattacccggcaactctggaaaacgtttccaatgacgtcgcagttatgcgcgcgaagccgtcgagcaatgagaagctttccgacaacgtcgaagctcccgatgggtcaattccacgtccgatttggccgttggatgtggacgactcattggctgacatcaatttggaggcatttaaaatgcggcacaatagccagcaaaatttaataggattagaaagttcggcatcatcgaattcggacaacgaactttattcggttagtaagaaaaatcaagatgacacagcgaagaagaaattccagtcacaatcgcaatatgaagaatacctggaatttcacaacacacgtaatattctcgagcagattcgtggaaagctcaatacactgctcgagcaaagaacagaaggtcagaaacaaaccgacaatagcaatggactcacgcaggctgaagcagaacttgaagaaaacattgctaacctcaagtcagacttagaaggctacctgcagtctatgaaccagaaaaatgaaaacgaaattaaacgcttctgtagagggatgtcgaaggatgccaaagtggttgccgtgcaaaatgccgtcgagcatcgccatcgttcacgcggttcatcggtcaactttgaaaacgactacgaagttctagagaaccatagagcctttgaacagtcatactaccctacaacttctcaaagaactctcacgaggtatcccaatccgggtgatcaaccgtcacttttcgaaacggtttacgtgagagatggtttcaacgtgcgtcaactgaatcgtccagctccgaatccgtttgcgcaggaagctcgctctacgcaaatgctactgaatcagcgatcgatctacgttcaaccgcagcaactgcaacagcagcagcatcagccgattcgttatatgagcaacgcagagatcaacgctctcagcacctacgaggtatgcgaacgaaggcctagcaaggtgtcaatcgagatacccgaagacggaggcaaaagtgcacacgtagtggtagacagtggtgttgggatgggaatcgttagcgatctggtcgcggagggtcgtgttaggcgtaagtcagagttaagtaatagtaataatgtaggtaaaaatggcgatgtgagtgattttacgttgcaacgagtgattttgatggaaagtttaggcaagaatgggaagatgtttggtgacaaggagaagatgctgttggaataccatttgaataagccaagctactgggagctgtattatggtgcaaatcgggaggagcataaaccacaccacacactgataaggaaagtgaaaattggaggaaagaacgccatatcggtttcatattccgctagtgagtttgcacagaccaagagcatcctaggattgttgggaactccaccacatgctggttaa

SEQ ID NO: 648 - DNA, 1341 bp, Aedes aegypti
atgcatgcccgcggaggttcacaatggcagagtcgaagaaaaccctccctcgggccgttgcggcgtgcccatcctgcttccggtgcgacttggaacgtgcaggtcgtgcgaggcaagatgacgtcccgatgcctttggcacgcctgtcgagctttggtcctcggcatcgtactcatgctggtcggcggcggaatggccacagtcggatattatgcaaataacttcccatcgctttctgatgtcaagagcaatagcacatcgacaattcgtgtgaagaacgaacatcgaggactacatttaaacaacctgtcttacgttgggcccatcgtcatgggcgtcggaggatttatagtagtcgcatcctgtgtgatgacgttcgaggcccgcgattctgctgccaaagtggttcctgcgaggttcaaattgagtagcaataatcgcaacgccagccgtaataccgcttctcgacgttctacaagtgtagcaaatggaccaacccaagtaccgtcgcaatctgcccggtgggagcaacatctgggggtattcaggacatccccggcagtggagcaggttccggatcgaaaagcactgacggctgctttggttcacttttccagagcactgggaaccccaaaagcatcacatccaagctgtgaaagtcggcgcgtttcccgcagtggatccgtaccaaatttatccgtcgacaagttgcccgtcccgtcggtctcaggctccccggcaggtgtccggtcaaccgttaaacaccaccgtggatcacgtgtcagcagcatggttcatcggtccacacgggaaactaacagcagtttgctgcatcccgccatgcagcactatcatcgacatgcactgtccgttgatgaaccggaaccattccccaaaaacctgaaccaaacgggatcacatggttcgatgcactatggacatccaactgacatgccaatggtgcacaaaatgcgtgaccgaaacaagcgctcggataccgcccggaagcatgtcctgtcacggcagacaaagatagagaaggatgaaccggcctccagccccaagcataatcccttcgtcaacagtcgacgctcttcaaccatttcgaatgcctcatccaagctgaataagagcagcagcagacgtgcctcaactatttccaaaacacccagcgtcgattcgaggggagcggcctcgacggtggaagtcaatagcccggagcggtcattgctggcgatgacaccgcgaaaggcaaataccatggcgcagatgtccaccccgtccgtggagaaggagtgccgatatatatatcagcggaagctaaaagaagttagtagatga

SEQ ID NO: 649 - DNA, 1554 bp, Aedes aegypti
tgtggtaccgctgtcatcactatcagattctgataaagttacgaagttttactcggaagttttaatggttttgcaatatcctgcatttgataattgaaacatcattagtgcattttttttgtgatctccgctagagggggttcaaatttcaagtgcattcattattgaacaaaatgtcatccttcacggagtctggtttggtgaagaaactgctggaattaaaccccagtcagcaaagcattcaaactctctccctttggttgatccatcatcggaagcaccattcgattatcgttagaacttggctgaaagagttacagaaagctccaacatccaagaaactcacttttatgtatttggccaatgacgtgatccaaaacagcaagaagaaaggtcccgaatttggaaaggagtttgaaaacgttttattgaaagcatttaaagtaattgctcaatctggcccagaggagaagacgattcacaacttaaatcgcatattgcacatttggggcgagcgcggagtttacgaggaagccaaaatcaaggagttctctggagctttgaaccaaagagagaaaagtcccgcagcacccaaagcggttgttgaggagaagaaacgaaaggcggaagatggacacgaacctagccacaatcagaagaaagcgaaatcttcagaaaaaagccatagcgccgagaagaaagccaaaagtgagaccatagaggtaaacggaacagttgagacccatgttacgctgagtcctcaccagccggaaggtgatcctcctgagccggaagagctgataaaagtgctgcaggatctggagaattcggcctcgagcgatgccgtagtacgggagcggattgccaatctgccaccggaagtatccgagctgtcggcgctggcaaagttggaagataaggaagcagctaatcgtttggctttgaaggtaaacgatgccataaagattcttaatgactataacgctcgtctggctacagaaatggatgatcgcaaaaagttaactacgatgttgaaagatttccaacgcgagcaacaggaacttctcgtacaagctgaacagcgattacaggagtatcaatcgaaactatcgaaaatcaaggaagtccagagggaagttcgtaaccatatgaataatttgccagatctcactacgctgccagacgttacgggaggacttgcaccgctaccatccgcaggcgaccttttcaacattcatcactaggcatcttgagtaatcgtttgtaaatgtagtttttgccaattgacatttttttctgaattttaaagaatggaaacgaaacctaatcattgaccaacggtttacctacgaattgtacaaaaacttgtacattgtattgcatcataatgttttcgagaaaccacaagacattgtagtacatgattgttgagacaaagcacaccctacattcaatattgtatagagttcttaacaagatgatttgaatcaaaagaatgaaagcttagtcgatagttttatctagatacaataaacctaaagtgtgttgcagcag

SEQ ID NO: 650 - DNA, 1273 bp, Aedes aegypti
aaccaaccccgagcaagttcgatcaaagtcattgaacacagctaatttctctcctaaattttatcagcaattttagtagctcttccattattttaagcttgcaacgtatattttagctgaaaaaatggcagactattggaagtccaatgaccgcaaatattgcgatttttgtcaatgttggattgcggataacaaaccgagtattcaattccacgagagcggtcgtcgccacaagcagaatgttcagaaacggatcacggatatcagtcggaacagctacaaggcccagaaggagcaaaacaaagtggatgccgaaatgcgaaagatgaatgatgccgctatgaaggcatacatgcaggacataagcgctggggcagatatcagttcccgggctttggccgaacagcaaaaagccgaagctgctgcggcggccgctgccgtggcagatgctgaccccgctgcggggcctagtgttggcccgagagcgccaaaaaagaaaataggccgtgaagcggatccgttttatattccgggtgatttcagcgacgaagagggccctccgccaagtaaagcaactgctgctgccattgcggaagcggccaaaaagaaacgcctggaagagatcagtcaaatgggccacggatcgctttgggttgaggcgttgaccgaagaaggatacacttactattggcacgtcaaaaccaacgaatccgtttgggaacccccgaaggagggtttcatgaagaaggaagaatatgagaagatctcgatggtagttctacagaagcaagaggaagcaatcaagaaggaagtgaagtacgaggtggagaacgcccaggaaattgcggccaaattgaagcgggaacagatggcaaaaatgtacgaacataatcgacgggtgaagaaagaaattgaaacgattgcagatcccaaaagacaaaaacgggaagaggaagcagctctcgaggcgaccgcaggaccttacggaaggtggcaaacggttgagcacagggaagagcaaccagttgacttggaacttccggcagttccagagccattgtacgttccgagtgtggtaccggatgttccggagcgcaagttcaaggagaaaactgtcagccacattccgggcgatgagaagagcgccctcaacgacacgttcttcaagaagcggaaagtgaaccgcaatgccaggcagcgactggatgtggattgatgtgctgaatgtagtgaataaaatgacgataattgcgtgccttacttttgttttagt

SEQ ID NO: 651 - DNA, 1080 bp, Aedes aegypti
atgatcagtatcatacacaaacaagtatattttgcaaatccacttccaacgtatttgtttacaaaccgttccatagtgactttactcgcagtgttagatagttcaatttttcaattgtttcagaaaatgatttcattccaaactcccagtccacccaagaagaaaacaataattgttcaggaagtaaatgtgaaatttaaagccaagggcaaaggatgcacggcacacgaggctctggctcccattatattagttggccaactattttcgcttatgcccattagtggctactttcggacacccatatcaaagttaaagtttacgctaaagagcgtacattttgcgtacgggtgttttactgtatttatcatgggtgcaataatgttcatgttcttcgcattccgcattcaacgagggactttcggaattggagcaactacaacctgtatttactacgccgtgataatcacggctatgatagaattcattattctggcgcgcaattggcctttgatcatgcaacgttggacagctgacgagggtgttttcttatccaatccttacgaaacaggacagtaccttccgctggaatcacttgtgaaacgtgtggcatttacgataattttcttcgcattcgtcgaagatacgataaattttatttccgcctatttattaaatgtcgtgcacatgaaatactgcacgcatgccaccgatttttggcgaaatttctttcgtcgagagcatgcctacattgtgcggtttataccgtatcacccggcccttggggtggcgattgaggttgtgatgcgagtagctaagttcacatggcactacatagatgtgttcatcatttgcgtgtctctggtactgcagcggcgctttcaacagtataatgataggatacggactttcaatggaaaccaacagccggaggaagtgtggcgaactttgagacttgatttcctgcgactaagtgagctggtgacgtacctcgacacgaagctatccagaattatattactgtcgtgtgcgagtgacatgttcttcatatcagtgcaactgtataacatttttgagtaa

SEQ ID NO: 652 - DNA, 875 bp, Aedes aegypti
acattcaatcgaaaactgtaggtcaaacaacggcaaccatgaacggtttgaagtacgctcttctggttctggcgatcgccagtattgcttgggcagttccagcaagtcaaaaccgccaagacaccactgctgctcccaaaccacctaaggatgacgctccggaagttccagccgtagttaaggaagcctctcagccacctgccaatgtcactgtcggcaaagctccggaagcaccaaagaaccagagcagcgtggcctccgctcccgtagctgccaaggatgcgaaagaccagaagtctcaaccacaggtagacctttcggttgcatcggctgagagtgcttcggaagtgaagtctggcaaggccatcgaactggaaagtgcccaagtcgaagatctggtcggttctccattctcggttgaattcgatggaatgcaaggcgatcaaccggcctcgattgaatctggagaactcgtcccctcatcggctgctggagctgtccgcgttgtggacgctaaggaacagcccgctctgccggttgtcgtggttgaggacaagccagccgctgctgatgccaagcctgattccgctcgggatgcttggggctcgatgatcgatggaattatcggtcagctgcaggatctgaagaggaaaacccgtgccctggaagaccttgcccacagaaagtgaacgctgttcggctcactgtgatttgaagagtttggatagcaaaatatcccagcaaagttaaatacctcattgatgcaaaaagatattttccacatagaaagcagcgagtgtgtgtctgtttaccattatttacagttcaagatttgaatgacgatgatgtttcaatagatgcaccaaacaaaccac

SEQ ID NO: 653 - DNA, 1385 bp, Aedes aegypti
tggacggtcgtgcgtgaaataatcattgtgctgctttattatcacttttttgtttgataaagcgtacgattgtgtaaatcgttctgtattttgattagtgactacataagtgatttagttaaattgtccaaccatgagctatcaagatgaggaagaacaaatcggctatcaggtgggatctttccccaaggattttgggtacggaaactttgatcatgaggatagcaattctcgctcagcagaagataagcctcggattcttctgatgggccttagaagatcaggaaaaagctccatacaaaaagtggtgttccacaaaatgtctccaaacgaaacattgttcctggaatcgaccaacaaaatcgtcaaagatgacatcaacaatagcagctttgtgcaattccagatttgggatttcccaggacaaattgatttcttcgatccaacttttgattccgatatgatctttggaggttgtggagcattggtattcgttattgatgctcaagatgaatacattgaagctttagccaaactcaaccaaacagtaactaaagcccataaggtaaatccaaggatcaagttcgaagtatttattcacaaagtggatggagtgagtgatgacttcaaaatggagtctcaaagagatatccattctcgagctacagatgatctggctgatgctggattggaaggagtccacctgagcttccatttaacgtcaatttacgaccactcaatattcgaagctttttctaaagttgttcaaaagttgatccctcagttaccgacacttgaaaacctactcaacatttttatttcgaactctggaatcgaaaaggcttttctgttcgatgtggtatctaagatttatatagcaactgattgctcgccagtggatatgcaaagctacgaattatgctgtgacatgattgatgttgtgatagacctgtcttgcatctacgggtctaaggatgatccagatgttgctgcattcgacgaccacagttccagcctgataaaaatgaacaacagcacgattttgtatcttcgggaagtgaacaaatttttggctctcgtgtgcatcatacgtgaagaaaatttctctcgccaaggagtaatcgactacaactttctgtgctttcgagaagccatcactcaggtttttgaattgcgactgaaaaatcagaaactggaggctgctgaacacagtcaagaccatgatagcgattatcaaggttcgattccctctacgggcacggcttcacaaaacttcgatcagcatatgagtaatactgctgtggcctaaacaatgttttcttcaaagttaggtttaaccatcatattgtaaaaataaagttgggttattgaacggttttgcgcaa

SEQ ID NO: 654 - DNA, 6367 bp, Aedes aegypti
aaagcaataacgttgcaaatgttgtgttaatattgggcaagtataagcagattaccacaatatatgctacttataaatatgataaagtaatctataaatgtgatagtaactactgtcagattgtcagattagaaacagaatgtatgtaagacctaagctatcaatatgtacacattgtcagatgtttggcttgaacctggcagctgttcaaacatttgtttgaaagtaacagaatttcactagttcacttatgtttggctctcagtcaattatttgatcccgtatactacaaggcctggtcaggtctgaaacatttccaataagaacaacattcgttgaatgtgtcatatcaaatagagtaaaagtcattgaaatcttgattgaaatcgtcatctcaattatttggactgggttgagccttcgaaatttttttcgcaaaatcccatttttagtgaaaaaaaacaacgttttgggacattcgaataatgtaccaacaaccaccttgaccatacagagcacaccatatgcttgattatgtgcgatcaaaacaaacccactcgggatgctgcttttacttattccactcttccttttgcatcactgctaaaaattctgcgtagtagatttagataataaacacattcactcggcagatagacgcagcagcacgttcaaggtccaacacggtttgagagagcgcgtgaaaaggcttcgagtgtgtgttgtttgtagatccgatcgtgtttactaccgtttagatcccgttattttcagtgggtgttgaattatcttatcagtgtttcactcatgacaatgattgcctacagtaagttatactgataaagatgggtgaggtctaaatgcaaatacctaatcaatttgagcacatacaataatcaacaatcaccttgaagatcgcattaggcgcgtaaatttatttttaaagttcagcatttttcctttcgcttctttttactctgtttgcaaaatacattcaaacatacgagcggaagcatactgtatagaatactaaatacctaatctttgcatattagcgcaagagagtgctcagggtggacgaacagtattgcatgtctacaatccgctttggactgtcgtccacacacacacacacatacagaatagcgggttaataataatttacaccctctgatgtggggatctagctgcttgaagacggtctagctgggctcagttagccggtaaatgtcttacggaacgcaagcaagtggaaatacaagcacctatatctagtgaataagacgacgaccgcgaaatctgtctttgcattcagcgcggtcagacatctatacgtacgtactttaagttagtacggcacgagaagatgggcaaaaaatggggaaaattgtgtttacgtagaaacctatataattataaataaatagaagagaagcattttagtgagtcagaaaaccgcacgtgatattttttagtaaatggaaaaaagtgttctcgattaatctatttatagtgtgaaaaatacaaacttttgccaaaatcctatattgtttttgatgtgtgatcatttgcctctaaacatcgttacttctatgaagactacggtatcatctgctttacttccgcttgtgcctcagaagattatttttagcagattactgatcaacaacttccttcaatagaaaggctcagtgtgtttgaaacacctcagttaaacttgttgaatctagtacagtgtgataagtctacgagacattaattcaaaatgaatagtatcgcaaaagtgtttaacaacttcaaggagttctatagtgaaatcaatggtgctacgctgactggggcgatagatgtaatcatagtagagcagccagatggatcatttgtgtgttctcccttccatgtgcgcttcggaaagcttggagttttacggagtcgcgagaaaattgtagatattgaaataaatggcgaaccggttgacatacacatgaaactaggtgaatctggtgaagccttttttgtcgaagagtgtctcgaagaagatggtgaagttccagctcatatggcaacctcgccaattcctactagttcgttcattgagttcgctcgcgacacttcaattgtgacagttacgcaaaatttagaagatgagaatataccaagaccaaggcgtaattcgatcgatttatcaaaagaaaataccgaatcagataaatccaaatttgagaatcaaaaatccgatttcaaccatcgacggcacactgataacactacaggaaggcccgatttgactttgaccaagaaagaatacactactcagaagattcgccaagaatgggctgaagcagaacaggagcaaatcttccaaatggacggaattgaaaattcgacaactgattggcagaatagcacattgcttccgcctaacaacgaagaagacaaacattttaaaccaatcgaaacagttcctacctcaacggaatctaaactaacaaattcggagctagcttctcaagaagatcaacaggcacagttgctagaggacaagactaatgcggattctaaatcaaaaaagaaacgcaggaagcgatcgattatgaagaagaaaaattctcaacgcaaaaactcgtccagcagttctggaggatcaaaccattcggatccgaacgatggcgttgaaacagatagtattactgcatcgcaacctactgcctcatcagctagtggatctcccaaggaaggtgaacctgaaaatttaacagctactccagcagaaaatgcaccaaaagaaattccagagctatcaaaccgaggtcatgaattagatattcatttcttcagtgatactgaagttacagctggtgttagtccacgccaatctcgcccttcaactccgatacaaagtgacacggagtttgaaatttcacaacgcgagaatgttgaaggcgatagcatgtccgcttcttggaagtggggagaactcccaacaaaaccagaagagattgaagatttgagtacctctcagggcaaacaagctcaacgtaattcaatgctaagtggtttgatgagttttatgaaatataacaacaagaaaatgcggaaaaatgttccagatggtttgtatctttcggatcttgacgaatctttggaccctgaagtggctgctctctactttccacccgtttcatctaaagcacagcatgctcaaactgaagaagacagagaaagtggcaatgggacatctctgccgcatagtccgacatcgctcgaaggtgtgaagagtctggattccgattttgacgataacaaggataaactttcgttagatttcatcgctctttcactctgtggtggtttggacagtggtacaccaacgtatgaagaatttgaaaagcatcgtcttcagtacgccgatgtctgtaacagtccgaccattttttcatcaccggatctagtagtgagaatcaatgacaaatactgttcatggcaagccgcttgccctcaggtgatgactatgcttgcattccaaaaatctcttcccactgagcaagccgaaactcctagcaaaccgaaatcactggacgtcgctacagctggttctgtagaagctgatgcacaatccaccaagcaacaagtttcgcagacatcttcggaagccaatcgaggaggacgttggtggtattggcgtagatcgaacgacaaatcaaccatgaaaaccgaaaatgagactgaacaacagtcgaaaacttcggctatagctactcagacttctcgatcaaatactccggaagatgttggaacaatgacagaaagtttcagcaagactaaagaggatggatataatggatctctaagttcggaagattctgagctgccctcagatcagccaacaaaccaggagctcattttgaacaaatcggacagtttcattgagaaataccgaaaaacgcttcgcctgtcgtccgaacaaatcgaaagcctcaatcttaacgatggtatgaatgaaatcgtattcagtgtaaccactgcctaccaaggaaccactcgttgcaaatgctatttgttcaagtggagatacaacgacaaagtggtgatctctgatatcgatggaaccattacaaaatctgatgttcttgggcatattctaccaatggtcggcagaaactgggaacaaattggcgtcgcccagctcttctcgaaaattgaagaaaatggctacaaaatgttgtacctttcagcacgtgccattggccaagcgaagactaccagagattatttgcagtctattcggcagggagatgtgaagttaccggatggtccgttgctcctaaatcctacctcgctaatgtcagccttccatcgagaagttatcgaaaagaagccggagcagttcaaaatagcttgtcttagtgacattcaagctctgttccctgataaaaaccccttctacgcgggatatggcaacagaataaacgatgtctgggcttatcgtgcagttggaatacccatctctcgcattttcaccatcaacacaaagggcgaactgaagcatgaattgacgcaaacattccaatctacctatgcggggcagtcattggtagtcaatgatatatttccgcccataatacgcgagtcgtcatcagagtctgatcagtcagactacgatcaatacgacgacaatgacgacgaccatgacgaagccgatagctgcttcgaagaagctgattttgaaagaactgattcaatgcaacgaattaatagcaaaccaaaatttaaacaacgatccagtggtcgttgcccagaatatgaccaaccggaattgcagtttccatgtgatatagagtactagatgaccacgaggggcgacctaggctaaaagtgataagactgattttgaagcagagtagatttacataactgctattttgattaattacaaagcacgctagaggcttatgtacgttctatttttgatggtaatggaatcgtaacgctagtcaacgaaaatgactttttccctagcgatgtaggcttgtatatgaatttatactagcttttccattagtttctgccatcaatttgctacggttacgcaaacatggcatacattgtagatcaactattcccacccatcaaacacatagaagaagaggatagcgagttcaccagtttcaactactggcgggatccagtaccggacatcgacttgaatctcgatttgtccagcagctctcagagtggaagcggcagttctacgccggtatcgcttctatcgggaaaagtaactcccactagcacactggtacaacaggctctacctactattccggaaaattaaaccatcttcaatttcgttttccaaagataaacatacttttaatcgcgtatcagtatcgtatcagacactaagtgggtaagaataaatgtaaacgcatataaactactagctttccgtacagatataggcttaagccattataatcgaattattgacaaaatcgaaacaaacattgtgaaccacaccaatgcatccttcaatagcttagttcttgtcttgtccttgtattaaattatagttcagtttgtcatgtctctctagtttgcctttgataggcacatgcattaaagttcgcagcacagccacgaagagaaacaaatattaaaatgctccaaagcagtttacaataataatattgatttataaaaattaggtatgaaataatttaaaaaaatgctgacgtgtttgtaacaatgagtgctgatctattaccaagcacgaaatcaagcgttgctgagaacgatcaaatttgcgatgatacgaaaattcatcaaagcatagcagatagttaatgaactattgttgagacgagcagatggaacagcgagtctgatccaaattgagctaataacatgtgataataatttctatttatatttttttttcgttttcatatattttagtttgtagttttcaaataaatagcagcattacaaacaaacgtaaacagtagcaaggttttatttgttcttttttcataatttgcatgtggcccaacaacaggcaagtaccactcagttacgctatcttttcggtgcgataaggcttatcagagcagaaaattgattttatggttcttaccatgcaagtcattttgtatgcaatcgctcaaccggatgatgacaacactacggtgaatgaaaaagcctgtgcatccaaatttcggtatgaacaaccatgcaatcttagaaagaaaaccaatttgtgtatgttgtcgaagtttaaccatgacggtgatgcgtaagtttgtcatttcaagcgcgtaaagaaaaaaaaaacaatgaatagacgctaaagtactgtgcttcagaa

SEQ ID NO: 655 - DNA, 1722 bp, Aedes aegypti
tgtgtccagcaaagcaacagctagatgtagtttgaatttttaatttgcgaaggaaaaagtttttaaactcaatatgaatctttgatttaaatgtggttttaaatctggaaaccatagtgaacggaagaccaaaccatggaggccctgtatttccaaaccaacagcctgatccaggaaacgcagcaatgtttccaacagctcagcagcgtacgtgtcgattccgtcgccgtagaagcggacatccaaaccaaactggccacggttaacgctaactgcgaccggttggacgtcctgctgtacaaagttccagttgcgcagcgccagaatgcgaagatgcggatcgatcagctcaagtacgacgtgcggcatctgcaggcagccctcaagctgtaccaggacaaaaaggttcgcaaggaaatggaactagcggaacgagaaagcctgctgaacaaacgcttcacggccaattcagaaacgtcgatcgacatcgactactcgctgcagcatcacaattcgatgcaaaatgcgcaccgaggggtggacgaaatgctctggacggggtccaacattctcgacggactgcgaaaccagagggaaacgctgaagggtgcaaaaaagcgaattctggatgtgagcaatacgctggggctttcgaatcaaacgatgaagatgattgagaggcggctggccgaagacaagtacgtgatggtcggaggaatgatcgtgacgctgttaattatcgtattggttatttacttctttgtattttaaatgtttaaactattcacgcgcgaaatgcctataataaacacattctgtgagatttgctgatgcatctttatatcaagcgatttcatcatcttcttgcgtggctggagggataaatttgttccatttagaggtcgatacggggcttggatattgttgtgaagtttcattatcattcgaggaagcgacaattgaactgatttctgtttcttccgatttaaaattgctccattttgacttcttggtaaaattcatcattggtgcttctcggttattgagctcattatcgctggaaagtcgcttttgagtaatgttagtttctttacctttaggctcttctgacaattcttttctcgaaaagttggatgatttcggcttaaagctaaacaacggtttaccagttagggtacttgagcttttgttggcggaagaagaaatttggctcatttctactttcgattgccatttaaattgctttttgtcctgcttgtccatttgatggaaatctgctaggggaactaacttcgttgtggaatttggctgttcacttgttcttgttgatataggtttgaccaaatttcctggtttaagatctgccccccttacagaatgcatattgcccattttagccttattttccctcaaactactgtgagccttttcctgccataaatcttcactttcctcctcatcatccttggaacagaaacttacccatttgctgttaccatcttccaacttcctgctcgtcccaagactgtgatttgccaccagtcgtcccgattcgtcctgaatcgcgtttccaatctctggcatttcaattttaccggccagcacctgttcggcgacatccctttcgaaccggtctgcctgctgggagctttcgctcaactgctggaccaacagtcgacactcccggccggaaccgcgggcgaattccttcacaagagattg

SEQ ID NO: 656 - DNA, 2181 bp, Aedes aegypti
atggacgcatcgtttcaaattctttggaatcaatcttcttttttcagacccgcccgtccgcaccgggaacgacgaccggatcgtgccgtgtacattccacgggcccgtcggagtctaactaccccgccggtaactgcacccagccagcagcaatcatccaccagtgcttccactagcgtgaccagcgcatcgacaaccgtaacttcgccaccgtcaccgccggtgtcaacttccggtagtctttcagcttttgcaactccactcagttctccacccaaggtaccgagcaaaaaagaacgatccaacggcgagagggaacgaaaatccaaagcaaaggacaaacctccaccaccaccagcggataccgtagttccggaccttgaagtaccaaacatcgccaacactgtgatagtgaatcatcgaaagaacgattcggctgcctcagttgacagtaattgtaccgtaagttttaagaaccgtagtcatagtgtagaggaaagtgtcccggccaacggagtccaccaagagctagtgaagctcaagaagcaaaaatcggaagaggtacctcgagagaacgtagaccaagactgtgatttcgcacccaaagcagaagcgaaaagagaacgaaaggaacgccagaacggtagcattttatcggaactgaacggaagtacaaatcacaaagcgatagaaaccatgaacaaatccaatagaagtcgtagttccaagcagatcagcggtaacgctactgcattgatcatcaacgataaaatcggaacaaatgcagctgataagatagacaaagatgagagggaacttagaagagcttcccaggagatcaacagaagcaataggcgaattatcaagcaatcgttcgcttcggatgtgttggaaattgccgaacaggaacctgccgagaaagacatttctacggaaaaggttaacgggcaggcgaaacaggatccggaacggttagtcaacccggaagaggacgattgggagtccatgtacgatgataacggagattgtttgaatccgaagctaatggaagaattgacatcggcggtggggaaggtgtctatcgaagttccccgaacggattataagctgtatcaaacgaaacaagccgctctaaacgaggaagaatttccacacgtgttggaggtgtccaatttcccggtggagtttagaacacaagatctcatgatgctattctcgcagtacaaagagtcagggtttgacatcaaatgggttgatgacacacacgctctagccgttttcagtagttccaagattgcggccgaagttcttgccaatggtcacacgtttgtgaagctgaaacccctagccgaggccacggtagagtctcgctccaaggccagaaagtgttccagctcgctgcaaccgtaccgacctcgaccggaaacctgcgctgccctggcccgacgactcgtaacgacggccctcggggtccgactgaagactgcccccgaagagcgcgaaaacgagaagcgcgtgcttcgggaagccaaggaacgcaaactgctcgctgccaaacaacgggaagaaatctgggaaagctaaaacctgcacatcacctagaaacatgaccatccccagccagcccaagctcatggagggcaatgcattctttcgttcgtaaacgctgccatagtcattgtgaatttagattttcaaacttttaggacacactcattttgcttccggccccggattggtggacacgtggttgtatatgtctgtggagcatttctttttccgtggtcgcgattccgtgttgtggccgttgtatctcacataagcagttttgttaggattgttttagtatcctatcgcaataaaggcgggagcatatattgtgtctataaaaaaagtgtaattgtaggctcattaaccatttcaaccaccttacgtaaagaaggtggaaaaaacaagctgcatcagatcaaaccatggaaacaaatacctatatatttaataattattgtacactgtatagaacaaaacgaaaaagttgtgtagaatgtaagtgcgaacaatgagaatgttatttacaggtttttatcaaaacgcgactcttactgcggaaatagagtgtaattttattgtaaataaaaaagtagttcatcaatatcaggaaaacttgaatatcctgaagtt

SEQ ID NO: 657 - DNA, 1484 bp, Aedes aegypti
gaaaccgcgaaaaatctaaaaatgccgcaggaattgcgtgtggtatgctgttttcaatgccgaaaattccagtcggacatcgtgaagaagtcgaaaaaatggacctgcaaaatgtgcggcgccaagcaatctcttgtgaaggaattcgcccgcggttccggccgggagtgtcgactgttggtccagcagttgagcgaaagctcccagcaggcagaccggttcgaaagggatgtcgccgaacaggtgctggccggtaaaattgaaatgccagagattggaaacgcgattcaggacgaatcgggacgactggtggcaaatcacagtcttgggacgagcaggaagttggaagatggtaacagcaaatgggtaagtttctgttccaaggatgatgaggaggaaagtgaagatttatggcaggaaaaggctcacagtagtttgagggaaaataaggctaaaatgggcaatatgcattctgtaaggggggcagatcttaaaccaggaaatttggtcaaacctatatcaacaagaacaagtgaacagccaaattccacaacgaagttagttcccctagcagatttccatcaaatggacaagcaggacaaaaagcaatttaaatggcaatcgaaagtagaaatgagccaaatttcttcttccgccaacaaaagctcaagtaccctaactggtaaaccgttgtttagctttaagccgaaatcatccaacttttcgagaaaagaattgtcagaagagcctaaaggtaaagaaactaacattactcaaaagcgactttccagcgataatgagctcaataaccgagaagcaccaatgatgaattttaccaagaagtcaaaatggagcaattttaaatcggaagaaacagaaatcagttcaattgtcgcttcctcgaatgataatgaaacttcacaacaatatccaagccccgtatcgacctctaaatggaacaaatttatccctccagccacgcaagaagatgatgaaatcgcttgatataaagatgcatcagcaaatctcacagaatgtgtttattataggcatttcgcgcgtgaatagtttaaacatttaaaatacaaagaagtaaataaccaatacgataattaacagcgtcacgatcattcctccgaccatcacgtacttgtcttcggccagccgcctctcaatcatcttcatcgtttgattcgaaagccccagcgtattgctcacatccagaattcgcttttttgcacccttcagcgtttccctctggtttcgcagtccgtcgagaatgttggaccccgtccagagcatttcgtccacccctcggtgcgcattttgcatcgaattgtgatgctgcagcgagtagtcgatgtcgatcgacgtttctgaattggccgtgaagcgtttgttcagcaggctttctcgttccgctagttccatttccttgcgaacctttttgtcctggtacagcttgagggctgcctgcagatgcc

SEQ ID NO: 658 - DNA, 4413 bp, Aedes aegypti
atgaagcagatcaatctggaggacactccactgacgatggcggcgatcgtgcgccgtcgggcggaagccatcaagcacaacagcgagtgcgaaacggacgaccagcgacacaatcaaacgtttccgccactcggtacgggtaccatcgcggcatcggactcgggagtgttcatgtctacctcggatatcgaccggacgcatagtgcgagcaccagcacgcaacacctgagtgccgtcgaagaatacacggaaggtcaaacggcaccgaccaagtccagttacgtaatcggcgaacaggacgaagatgaagacgaatgtcaagtggacgacgaaggcgacgaggacgagggagaagaggaggacgtcatcgaactggatcaatcacacgagagcaagactgataggaaattgagtaaacgagcttgccagagtctaccggacgtgaacagtcctcggccaaacgctttgaaagctaaaggaaccacctgtgatagtagtagtgatatacacgtagcacctaagaaggatgagattgagctgcgggcctcgtcggatgctgccaaaccctgcgatacggggggccacggcaagcaagcgacggccccggtagcgccggctctggccacttcccagcgaaagcccgtcgatccgagcctgctgcaggcgttctccatcgatccgaagctgatcaacaagttcgacgggctcgagcacacgctgtactacatcgacgagaacggcagcccgaagctgcgggacaagttctcggtccagcagcagctggcggacgagaagaagcgccggaagaaggcgaagaagctggagaagtacggcccggacggggaggacgatatggcccagtgtacctgctttagctttagtaggctatcgaaaaagttccgggatatgtgtaaagatggttcaaaagtgacaacggttgtggcaacagccggccagggaccagacagaccacaggaagtatcatacacagataccaaggtgatcggcaatggaagcttcggcgttgtcttccaggcgacgctctgtgatacgggcgagctagtcgcaattaagaaggtgttacaggacaaaagatttaagaaccgcgaactacaaattatgcgacggctagaacactgtaatattgttaaactaaaatatttcttttactccagcggcgataagaaagacgaagtttatctcaacctagtgctcgaatatattccagaaaccgtatacaaagtggcacgttattatgctaaaaacaaacaaacgataccaatcaattttatcaggctctatatgtaccagctgttccggagtctcgcctacatccactcgctcggtatctgccatcgtgacatcaaaccccagaacctgctgctagacccggagacggccgtactgaagctgtgcgactttggcagtgccaaacagttgctgcatggggagccgaacgtgtcgtacatctgctcgcgatactaccgggcaccggagttgatatttggtgccataaactataccacaaagatcgacgtctggagtgcgggatgcgtactagccgaattactccttggacagcccatcttccccggcgactccggcgtcgaccagttggtagaaatcatcaaggtcctcggcactccaacccgggaacagatcaaggaaatgaaccccaactatacggaattcaaattcccccagatcaaaagtcatccatggcagaaggtattccgagcgcgtaccccaccagatgcgatcgcactggtgtcccggttgctagagtacacgccgggatccagaataacgccgatccaagcatgtgcgcatccattcttcaacgagctacgagagggcaacaagacactaccgaacggacgcgagtttccgccactgttcaacttcacagagcaagagctagcgattcaaccaaacctaaatctgatactgaggccccggaacccgaacgacgcgaaagccggtcaatcgtccagctcgacggacggtggcaacagtggcagcggcggaaacggtgccggagccaacagcagcacagtggccggtagcaacagcagcaacaatagcggcacaggtaacggtggcagtagcaatagtggcgtcgcgcccgacagcacccaggggcaggggggcggcgccagcggtagcagccagggggtgggagctggggcgcagtccgtcggcggtgcggaggatattacgtcatcacagtccgtacccggcgtcgacagtagttccagtcaaggagctatagcgtcagcggcaacttctacgatgggttagctttaattcttacacataaaatattatattatatattttttttaattttaaaattattaatttaatgcgaggatggaaataaaaaaacagaagaacccacggcaagagatggaaaataaggcaaaatcgtgaaacaaaagttaataaaattactagcaaggtaaaaaccacaattcagcaaaaaaacagaattacatattaatacacatagacgaattaattaatattgaaacacccacacagaagaaaaaggaacaacaatactaatcgagcagcaccttgcgcatagccggaatacgcgcaaggttctaaatcaagtaaatcacaaatttaccttcaacgagaaaagataaattctgagagtaataaatatttcaaatcaatattattctaactaatgaacaatttaaaacacacccacacaaacacaaaaacacacatacactctcacacaccaaactactagaggatcaaaagtcagtcaccgtaagtaaaaaaaaagaaacacagacttatacgttctgaatgaaaaaagtagtttcaattcgctagttatagttattgaaaaagagcaagtttagtttttcgttctcttgtgactgttgtgcaaactgaaaaaaaaataattataatcgtaagccgactaaaaaatatatccaaaattgtcaacaaaaacggatacggaaccgttttgcatgtgagagctataaattcgtgtccgccaagccgcgctaagagtcttctattgaagcggagacccgtgcggcaacgcgatggtgtatatgttgcttttgtttctgctttcggttagtcctcttttctttaatcggttcttcgtttgtttatctgtttctttttttgtgtcgttttacccccggcacccacagcatagatgctcgggcaaggctggagaatctagtttcttcttttatttaagtcaactttgaggaaagggaagtgtataatgttgcataaaataatgaagtaaataaaaaaaatcaaagtgttatacccccgaaactaagcaagaagcaaaacatattcgttagaaattgtgcgcgaagcgcgtgcgatttttttaagaaaagtgaaaattgtgtacgtgcatcgatttctattatttcattaaataaataaaaaacgggaaaattgatgaaagcgagtcgagcgttgtacgtatatatcttgtgtagtagtgtgaaaaaattgtttatattactattaacgaagtaaaggaaatttagctactagaaggatacacactcacactcgtagaaaatggaagaaaaaatacacaagtaccactaaaattacaagtacagatagcagacttgagagagagcgagcgagcattgtaaaatggtgaggcaagcagcaggagaacatagcaagaaaataaatacaaaccagcattattcaaacttcttctaatctttgcaaatttgtcaactgatccacacagaacaaaaaaaaaacagtctctccaatcagctgtgtctactagtgaatgaactctacgccagagacaagcataattataataatcaaacaataaattattttaaataaaaggaaatacagagaaatcaatgaaaaaaaacaaatggaaaaacctgtttttgtagcataaagaaagtatatatatattaatgcataagtaatttaaatttgaatctaaaagaagcacagagaaaagaaacaaaaaaaaaacaacaaggaatgtagatcttcacttatgattgaacatactgcggaaaagaatcgagtgcgcacttgtttgcgagaaccttgtggtgaagagaaaaaggaactagccgaaaaatgtaattagcgtaaaaacacacacagtacccaattggaaaatatcgttgtcgccctagagcaagtaacacagtaaaggaaaaaacaacagaaacaaaccaacacccgcatactttcactgttggattaggtgaaagaagtaatattgaaaacagcaacaacaacaaaagaaaaaaaaacaacacacacatagtaactgctacaatttttagctattagatattttaatcagctagaaaaaaagtaaataaaggaaaaaatgttaagagatttcgctgtcatctatgatat

SEQ ID NO: 659 - DNA, 1648 bp, Aedes aegypti
cgatggcaccactccagttactatactagcgccatacggtccactagtggcggcactggtaccgagagcgattccgacgacaggaaacgtcacaagaaagacaaaaagaaggaaagaatcccgcagcatagaaggagagaaacacagtagagaaatcgcacagaagcgggatcgccgaaggagcagttccggaagtggcagcgaatcgtcctcgttcgaagggggtcgggatgagtgggtggagaaggtgcttccgcaacaaaccgaaggtgttggaaggttggaacgggatgactggatgaattctatgctgattcccacgtatagcaaggaacccaagaaggatgagaagaaagcggtggcggaacagtacgatcccaagaccagcttccgggagttgaatccgcattggaagaacggaggagctggtttgcccagcttccggaagccggtggaagacgaggatgatggttatgtgagaaggaggaacttcaataaggaaccatctggtagagatccggggaaaagcggtggttggaagaaaactgaaaagcataaggaagagactagagatggcgagaaaggccgggaagatacaccaaaacagatggtatctacttccaatgatgatggaatgtttctgtcggatcaacagttgaatgatctgggagccaaaattgtgaaggcggaaattatgggcaatacagtcttggcgaacagtctcagggaacgtttagagaaggccaaggcttaccggaatgaaattaaaacggctgctaaaccggaagcgtgtgacggttccagcaaacgaaaggaaccagatacggaagaagtcagatttgcagttagcaaatcagctgatagtgcacgacatcagaataagaaacaacgaaggtatcagcaaaatcttcccccaggagatttggctgataaattccgatcggaacgattcgaaaacgacaacatggatgcccagttcttcaaggtatcatccaagctggatcgagaagccaacaatttggacaacattttcggtcacagcagcgccagcacggccgattctggacgatccaacgaggagaaggttgttcgggacatgaacaagctctctcgggcgcaagcggattgcgaaaggtgcatcaactcatcccagttcttgcagcacaatgtcatctcgatgggtgaaagcgtgttcttggcagtacctagctttagggcacttcagccaaagcactgccttatcgttcctaatggccactatccagccctaactcacatggacgaagacgtctaccgggaactgatagacacgtgcaaagcactaaaacgcatgttcacggcccacaaacaggaagttattttcttcgagacagtccgatacataaaccgcaatccgcacacatacgtacagtgcgtcccggcggacaactacgagatggcaccgttctactttaagaaagcgatcctggagtcggaaaccgagtgggcgatgaacaagaagctgcacaacatccagggactggaagtgcggcgaaccatcccgaagggtttgccctacttttgggtcaatttcaaccttgaaaatgggtttgcgcacgttatcgaggaccaggaggagttcccggtgacgttcgcttcagtgagttag

SEQ ID NO: 660 - DNA, 1695 bp, Aedes aegypti
atgtttgtggaagatttgcggaaggatttctacgagcggctgatcggcaaacgggttctggtgattgtgaactacgacgtcgatgccatctgcaccagcaagatcctgcaggccctgttcaagtatgacaacatggtgtactccattgtgcccatcatgggttgcagcggtttggtgcgggcctataatgagaacaaagacgacgtgaagtttgtgctgtttgtcaactgtgccggatgtatcgatattctggagctgttgcaaccggacgaggacatgaccttcttcatctgcgactcgcaccggccgtatgacatatgcaatgtgtacagtgaatcacaggtccagatactaggtgcgccgaagagagaagaaggcatcccagaatacgaacagatttatcaggaaacggacgatgaagatgacgacgaaggcgatgacgacgacgaggtggacaacagcgatgaagaggaacggggctctcgagaaatgaaccggattcaacgcatcgagcagcagctgctgaaacgccgaaaaaggcgcgaatgggaagagaaacggaaccagctcatgtttgagtacacccagttcaactattatgggagaagttcggcgttgaccattttcgagctggcttggcgtttgtccaaggactccattgatctcctctggtgggccatcgttgggctgacggaacagctgctgatgggaaagatcgaaagcgctacttacacattggctacggaaagtgtccaatcgcatgtatctcgtctcaccaacaaggccagcgatcagacgatccaaacgtccgttaagattcactacgaaaacgatctccacttggcactgtataggcattggagcgttttggattcgttgaagtactccatctacccggcgtgcaaaatgaaactgtggacctacaagggcgagaaggtcatgcatgagttgctggtcgacatgggacttcctctggtgcaagccaagcagacattcaacgccatggagctggagctgcgcaaagaattctacgacaaattggaaaagttcgccgaaaagtatcacatgccggacataatctacggttcgttcatccttcagtacggctaccggaacaagtactccgccgcagattacgtctactcaatgctagccattctggaatctatcaagaaagaccgcacccctgaaacgtgcttccttgaatcgatggatgccctttcccggaacaacaaggacatcctcgacaatgggatcgatatgtgcaaaaccctgctggcggccatcttcaaacaggtccaaagctccctcgagatgcacgccgtctattcggccggaccgttcctttatttcatcctgcaggaggaggtttcgtttttcacctgtccgtacggtttgctgatgttggctcggttcttgctgaacggacatgtggccgtttcgcgaaatcgtcgagcgcgggaactacctctaattgcggtggcaccaatcgacgtgagtcgtggttattcgctgctggtcggtgttccacctgtatgcgaggacagcaagatctttttcggtagggctttcgaacaggcggctctcaaaagtggggccaccatttcgcaggactttttcgaaccgaccgtcatacagatacgacaggccgactgcactaagttcctcgatgcactgacggttttgctaggttag

SEQ ID NO: 661 - DNA, 2916 bp, Aedes aegypti
atggctgatgataagtcactgttggccagattctaccacgcagatagagcgctaaccgccgttgccagcgagttggatagcttcgatggtcgggcagaaccagttagatgcactcggctagttggacggttacgacaaggacaggaccgcgttctggcgattaccaatcaaattatggacgagcttctgggtgacgatcgggcgccgcgagctttccgcgccaaatttccagaggaggttctacaggaaagtttggctggacagttatggtttggtgcagaatgtctcgcggccggatcatctatcatgaatcgtgaagtggagagtggggtaatgcgaccactagcaaaagccgttacgaaaagtttggacaatgttcgaaacttgctgcgagagcaatgccttcggaacaacacacccaacagtttgacactgcggttggatataaacgatgccgcgacggaacagttgtatgaaagtttgaaaatcttcgatcgcttgtttgcggaatttgaattgctatacgtcagtgcaatggtacaagtcaaatcgaagcaggagtacgagatgcaggagctcatatgtgtgcttttttccgaaacattgcaacgggctcttaaaattggacttcttgaacaggaacaggtggattcgtatgacccggcgttgatgttttccattccacggttagcaatcgtcgccgggttagttatattcaaggacggacccctaaacatggatcaaccagcagataacatttcagaaatgtttcgaccatttcgaaagctattgatcaaaatgcgagatcttcttcggacgctgaccaagcatgagctctatcagttggaaaagctgttgtgcaccaacgaggaaattagtctgaaggaagaattaatctgtgatgcaaacgaaaatgatagcagcgatgtcttgccacaggaagaccacgttgttatcgttacaaccaatgttaatactagtaataatagtgataatagtgatagccgtgtagacgattctccaaacgatgaactgcggcatgaatcggaaactcgggacaatcggaacagtagtttttatagtaaccgtattatagatagtaatcgattacatgcggacgtggaggatgatgtatccgaaaatgacgacgatgatgatcctagtaatgtattgaaagacagtctagtgacgacagattgtgcatcaggatatttgattccaaatacaaacttcggtaacctactgcagacgaatgaagcgcccttaaccgatagttttatcgcaacggacgaagagctgaagctgggaacctcttcaaatgctcggatagaacagatattgtcagagactaaccagaaacttgcggattctggacttggcactgccaacccaagcgtagataactctccagaattagatacggaacggccgattacaagtcgtagtgcatgcgaatcttcagaagaaggagaaatagacgaatatgataacgaggaagatgacgaggatagtgataacaatctatcgaatcaacaattaatggaccctggttccagtgctggcacatcacaatctgctggaaagccatatcgtactcacaaacagcagcaccatcaccgacatcgtcgatctagtggaagtattatgtcggctacatcgagccgaaaatataactcaaaacatcataaggcgagtgcatctgcttcagtcatcgtacctagtaatcaaggcacctcatctaagacatactccaactgtgatacatcaccgtcgtctggcaatcaaagtgaatgcagcagtactagtagcacaaccggtgaatcctcacaggacgtggccatggccattagagcagccggaaggattaaattcaaaactactgaaaaccttctgcatagactctttgtctgtatagcaggagtcgccgatcaattacaaaccaattttgctgccgacctacgccaaatgctaaaaagtgtgttcattataaattcatcacctccggaaccggaagagccaccagagttagcaccgacgtcaagtgataaaccaaaggaaccagacccaacggatttgtttgaatttcgtgctagcgaacaggatgtaataactcccggtcaaaacagtggagggtcgagtcaaagcatttattcagcagaggaagtaaatccagaagatccgcatgactctgtttttggatctccgggcacttctcccatacgagcttcttctgctccgcgcactatgatgactactgcagagagtggaggtgtgacagttaatgtttctgtttcggttgttaccggtggtggctctagctccagtaggaatgtccaagaacgaagtgttagtttaagtgaaacgtcgattgtggtcgaaaacaatggtggagccacagattccaatttacgtgatagccaccgaagacacagtgcaattgggtccaaaggcgagtacggacgaagtcgatctagtccgaacagtccagtgaatggaacatctgctgaagaacgccgcatgccggaggcacctccccgttggattccagatggagatgcgccacgttgcatggcgtgtgcctcttcatttacaccattcaggaggcgacatcactgtcggaattgtggtggggttttctgtggcgtatgctcgagcgcctctgcaccacttcccaaatacggattgactaaggcggtgcgggtttgtcgagattgttatgttcgtgaagtggggacctagagattagcagcgctgaaaaaactcaattctttttagttaactattgttgaatttttcacgtgacgagttcttttcttactgtgaggtatttgtttttactaaaatgtaacatgtctgttttatttgtattttacaaaacataagacgaagtaaaattatcaaatcatgtttttactg

SEQ ID NO: 662 - DNA, 851 bp, Aedes aegypti
ttttagcaagaaccaagaagctcccgagttgcagttagacgaatcgttccgtacaagcaacattacgcgaaggtgtctcgattggcagtggtctcgaattgtgccgtctgtaaatactataactataagcaatcatgactggccgtcctccgccctcatatggcatgcatgactttgctgcaatgtgttactatccggtcccgtacccaaaccgaaaaatggaagatttgccgcctccatcgtccccatcagcgtcgtcgtcgtcctcggatggcaatgaagtaaaccgtacacggtcggaattagtcctccaagataatctaatcggaggctgctggcaacactgcaacattgatggtcccttcccgaccaacatggttcgcgccggcgtggacgccgacggatcggtgatcttcgcgggtcgcgccttccacgagggcgagatgatcccggccaaggtgattccatcgaagaatgcctgctatatctgctacggtggcgaggaaatcatgaaggaggacttcgaggtgctccgccagggcgatttcgtgtgggaatttgctgcgaacggtgtcgttccggatggtgccgtcaagatgggagccaccgtcgatggcgaaccgctatacatgggccgtgccctgcactgcggaacgcagactcccggaaaggtgcactcatcgcacggctgtctctatattccattcgagggcgccgagatcagccatgccgagtacgaagttttgtgcctgaagtgaaatgggccgttcgaagcatactttatgacgggattttaagagattttcgtttgtgaataaatatatttgtgttttttttttgtggaattctat

SEQ ID NO: 663 - DNA, 1011 bp, Aedes aegypti
atggcgttcctgccaggtaggtgtgcgggtccagaaaaagccgtcaaaattaaaccccaagcggagcagcgggcggaagaaaggacggaaagagaaagtgtgtcgtcgtcctcggacacttcttcgtcgtctgcttccgccgtagcgctgcaccaactacctgccgaggcttcccaggaattgctcgaggcgggtcaagatcagggctgttcgtccacgtccacggttcaggaagccagcagcgaaacattcccggtgatacaaaacgaagacgtagtttctgttgacgaagcaggaacatcccggcaggaggtcgatccactgccagtaaacggcaacgaacaaactcaaccggaggaaccctcccacgcctcgaactccagccccccggagaacgccatgccagtgagggttgacatcgtgccgcctccgcccaacaactccaaacagttgggcgtcaccaaatcgctcctctacaatggatccaagttccgagggttccagaaatcgaaaggcaactcgtacgaagtggaagtcgtgctgcagcatgtggacgaggccaattcgtacctttgcgggtacctcaaaataaccggactgaccttcgagttccccacgctcacgactttcttcgacggggagattatctctaagaagtatcccttcctcacccgcaaatgggacgccgacgaggaagtcgaccggaagcatttcggaaagtttgctgctttcgtggactaccagaagaacttcaactcggacgatttcgactacgaggccctgcagaagagcgactatgtgttcatgagatggaaagaacacttcctggtaccgaatcataaaataaaggacatcaacggggcttcgtttgctgggttttactacatctgcttccaaaagtcgcgggcggtaatggaaggatactactatcacagaacctccgaatggtaccaatcactcaccctcgaacacgtacccgagtcgtgcattcagatctacgaattcagataa

SEQ ID NO: 664 - DNA, 1159 bp, Aedes aegypti
agtttgtgagatttgtgttcgaagacagcaaaatttaaagtaaacgatgccggcggactacgacagtcgcttttcgccgatcacccggctgtacctcttcacgagtgtcgtgtcgattgccctgaatgccacctttttcacttacatcctctgcgccgacaaaatgtacgacatcggcagatgtaggtcctcgtgggtgctgatgttgctgcccgctatcgaactggtgaagcattattacgtgcggacggcgttccgtttggatggaaccgcgaagacgtccggatccggacaatcatcctccaaatccggcagcaagcttcaaccgagacgaacctcccccgccgatgaactggccggtaccgtgatggtcttcctcctggcaatgcttttctacggattcatctgtttgattctgggagcccccttggaacagtttgaagaaacggtctccctttcggtggtgctgaccaccctgaccattttcccagtagttctcttcattggccactccgaaacgttgcagctgctgttcacggaatcgctggaactgcgtaccccattggccaacggctatctaacactgctgaagaacaactgcatcggagtgattttgggggcttggggtgcgtcggttgtggccccgctggactgggatcgcccctggcaggtgtacccagtgccgaatgtggtcggcgccatcgggggggcctttgggatgaatatctacactttgctcagcaccacttactttgccttctgtaaggctggcaggacacggggaatcgtgtaggatggcggttggcgagggctcaagtcgagattctagtcgagaatgagaattttggttcggatatcgaaagcgcgaccaaatcatggcacatatatcaagtattactagagtagataagacttatttgcatttcaatacacgtagtttcttcctttgtttcattattcgtttcaccattttgagctttattagattattattcttcgaaaaatccattgtatcactagtttaagatgaatataaatcgaagcaaaacttcgaaattttaagttatttattattttattttattattattattataacttgtatatttcatcacacttttgtgtctgaatgaataaagtcttagaactagttaaacat

SEQ ID NO: 665 - DNA, 2243 bp, Aedes aegypti
atcgcccaattttattgttgacagtttctccacagttggagtccacatcgtcgcccgccatcgttgaaagtttgaagtgcgttgaatcaaattgatcaaaaattggtgttttcttttcgtaataaataataaatgataatagtaatcattattgaaaacggtttattttgtccatttgaatggataactttcccgagcaaagcgtttccgaacgcgacctgccgccgacacctgatgaaaaaccggatgatgcacccgtagaatcgtcgaccgtaatggatgtgagcgatagtgatttgagtgatacaaattcaaagtcatcttccaagcggccactcgacgacgatgatggataccaagccgctgaaacggaaccacaaaagaaattgtgtcggttttacttcttggaccgatgcacgaaagccgacagttgctccttcatgcattccgaattcccttgcaagttttactacttcggatacgagtgcaaagatggaagcaattgtaaactacgacacggggctgcgttagatgacaatatgaaggatgttctatgggaccacgttaccaccgcaccagccaatcttctacagcgatttccctgctttcccaatatactgctcaagaaaaattttgacgaacgtcaccacgagttgatattgatggaacaggaagggctcctggatgagaataaaccgccggttacgaaagatatctccagtccctcttcgtcaaccttgctgagtgaagtcatcaaaacagccagccaagtaaaaatgtctggtggagcgttttccgagctgggggaattggtggatgtcctggcacctgaacagattgctgccctggtgggtattggtgttgaaaagctggaacagctgttcgggcttggcgctagtgctcttctggagttgggttttgattttgacacgttgatcaaaattggcaacttcaaggaagaacgacgccgcacatcgatttacacttccgaatgcaatgaagagaaaccggatccaaacgaactgattgactccgctcttcttggttcggaggaccttgatggttcacttgcttcggcgataggggaccaaccggcgcttaccgatcaggaactgcttagcatcctcaacgaagattgcgccaatccatcgagtgcagctgaagaagatttgtcgatacaagaccacgaggaaccttctgaaatcggcattgaagacaacaatctcgaaagtaacgaaaatttatcagaaaacgacgagtgcaccttgaaggctttccgcagcgacgcaggaagtgagtgccttcagctcatgttctacgcatcggtcaaggagaaggaaaacgatagacaatcgttggactccattcaaagaaccgtagcccaactcaaaagaattgactcgctactgtccgagccgaaggagcaagacgtcagctggtgcagcgcagagagtgacacttccggtgattatccgaagcacgactcttccgtgtccgattcggttaaccaatcttttggcagcgacagtgatagccaaacgtgttttcggatgcccttcaaatcgatcataaaccgttacactcccgcgagggaaattgatgcatcaaatggcaaatatcctatcgctcagtataagttgataccgattgatattccgcggccgagttttgatcgcattcgtcgttctttcgtcacacagccctctaatagctcggacccgcgcatacagattatgttcaacgtaggcccggcggaagtgcgtcaaaccaataatcggtctaaagtatgccatcgcgatccacgtttgaagaagccagtagaaacagatcctgttccggctgcttcataggtatggtgataggtatgatatgtaaagtatcagtgtttcttttatttacgacgatatttgttttaatttaactatccaacatctcgatatgtaagattttaaagaacagaaccagattaaactgaattcacacgttaggtgtccatacagaggatcacttgtactttctagggccacttgcgcattaatcgacacatccttaaccaccaccaaatttctaacagttttcaggggcaaagatcgttttccatgtattaatttagtcttacctaatattatggtattttcctggttatgacaaccgagttatgagtattaataggctaatattgtaatttgaatctgaatcaaaatataaaaataacagcataaaaatgctacgattagggtcgg

SEQ ID NO: 666 - DNA, 1240 bp, Aedes aegypti
atgcatttcgtttatttatttcgccatcctcaggtgttgggttcggtgttgctgctggcttctgccgcttccggttcgtacttgggtcatgaagtatcttcgcagtaccaggcccatgatggcatcggtggctactcgtacggttatgctgatccaaattcgcagaaacacgaaactaaggatgctcacggagtgacccacggtggatattcctacgtggacggcgatggccacgtgcaaaccgtcaagtacactgctgatccgattcacggtttccaagttgcggctaccaatctacccaaaggtccagcaccgatccatccgcactacggcagcccatgggtccattcgtacgctcccatcgtgttgggtcacaatggtgcccccttggaaactccagaagttcaagctgccaaagctgctcactttgccgcccatgccgaagccaaggctagactacacaagcgctcgctttactccagctcctggaagttcgtcccagctcacatcccagaggtcaaagccaaccagtacggaggcgtgccagctccccactttgatcgccatcaagaagctcccatccataaatggcaaggacctatccacatcccggtgatccacaacggtgttccagtggaaaccccagaagttcaacatgccagggcattccacgcttcagctcacgctcatggatacgccccagctcatgaacactacccgggaacgccagctgcccatgaggatcaaaccaagtacggtccatggaagggccctgtccacatcccggtcattcatgggggagtcccagtggaaaccccggaggtccaacatgccaaggaagctcacctgaatgctctggccagtgcccacgccgcggcctcacacggtcccgaggacgatggttcctacaaaccggagctgtgggatgaccatcactaccagcaggatcaccgctaccaacagcactagtctcgccaacaccatgccaaaactgccaccgtactagagccaaatcggatttcatttgttataaacgatgattttgagtgccaaacgggaggaatgcttccgccgctacgggccccgttccgcaggttggcggaagtagcttcaacgctctctaactctttccctctctttttttatgtgtaatctcactcttttgcactgttgtataatgttgattgatttgtatgtatgtatgaagagataccgtatgttataatgcaaagcattgatg

SEQ ID NO: 667 - DNA, 1535 bp, Aedes aegypti
aacaagattcattcaaaatgatactccaattctgggtcgtaacgttttccgtgctgttcgcagctcgcgccgatgaaaatcactcaatattgatcaagctgaacgacctggatcaccgcttcacgcaaatgttcagccagcaattttaccgacacacccagcaagtaacggatcgagtctcggcgctgaagatttccattgacaccaatctactcgaactggaccagcagattcagcaagcgctggatggcattcaatccaacgaatcgtcatcgtcagcttcggcaacgaaaccgcccggactcacaaccataccgattggatccgagcctagggttccggctctgtacgaacgggagcgctacggaggagattggttggttgtgatgcatcggtatgacggctccgtaaagttcgatcgcacttgggccgagtaccgggatgggttcggaatggttgggcaggagttttggtacggactggagcgactgcatcagttgaccaaggagaaatcgtacgaactgatggttgagatggaggacttcaatgggagcttgaagtatgcttggtatgataaatttgtggtgggccccgaggaacaacgttacgctttggttgagttggggacgtttaatggaacgacagatggggattccttgaagcctcataaaggatcgggattctcgacgtacgacaatgatgatttcggttgctcgaacaagtacgccaaaggaggatggtggtattacagtggaaagtgttacggatcgagccttactggtatttggaaaaacgaacttgcttactcatcgatagtttggatgaagttctccgatgtttccaacacgccgttgaagcttgtaagaatgatgatacgaccgaaaaattgaatcgacacttgatcttttccaatccgcgaaaaataaaatgcttaaacactttaaaaaataacattcattgctttaataattaagagataactttgctgcaccttcaaggatcgttattcaaatttcagccaattctttctaacagaagctaagatacagagtccctaacttggagattttgtactcatattcaaatcaattattgtcatcttaacaaagttcttaaacatccaatttgaacctaccttggcctcgagtacaggggagcagaggagtcagccaatcccatcgcagacgagctgaaaaaggaggaaaatgcattttggtgtttggatctgctgttttttttcatgaaagttgtaattatcaaaatcgctactgaaggttgtcattttagttaaattaaaaaagcaagaaatgataaaattcataaaagtttagagcagtactcgcaacggaagatttgaggaagtaaaaaataacaaaagcaccaaatacatcaaaacagctgaatcgagttcaaaataagtgcgagggattattggcaaagcgaatcataagcttcagtaaggaaaaaaaaagggcaaacaaaaggggaacatcaaaaaaatatgatgataagcaaacactgaagcaaggactacg

SEQ ID NO: 668 - DNA, 1330 bp, Aedes aegypti
atggaatccttcatccgtggaagttgcgaatcgatgtgcccaaaagccgaaatagaaatgcgaactcgggagaaaatgcttcacttctatgagttgaaacccggcagtcggacggaaccagtggaacggttagtcgtgaaggaatttgctcgatcagctgcgggagtcagacgtcccaagcattgggagatacggacagtggccgctttgaaacgcaccgtggagtatctgctgactgaaattatgcaagatgatcgtcgatcgtacaattttcggtacgaattcatattcgaccgattgagagcagttcgacaggaagtagtcatgcagaacctatcagcaaaagacactctggacattctggaaccgatagtttgtttcctatcatacagtgcctaccaattatgtgaatctcacataagcgaatttgacccgaaaatttgtaatactcacctacaggaatgcctcaaaaaggttctccgctcatacgatgaacttgaacaggagtccgcttcctacattcagaatcgtagaactcgaatggaaggcctataccttgcttttaaccttggaagcagtgaggctctgactcgaggaatcaaccttcccaaaaacattcggaagcgtctttccttacagttgtcctcaaacattgaatacctgcggcataactatcatcgggtgctcatatcccttcaaaagcttccccctctggaagctgctctagccgtcctgaaaatcccaacaattcgccaacagctgctgctccggttctcgtccgcatttcagagcaaggttctgtccgttccgctcgagtggatcggtcacgttctgatgtatcaacggcgagagcacccctcactgatcgaagactgccaatactacaaccttcagctggttcacgctgataaacctccaccggatcaatcgaccgtagcgaactccccttccgcagaaactcccaaagattcttggtgggatgatagcgacgacgaaggaaaggatcgcaagctgtcaactgccatcagcagcgtgctcactgggcaatcggtgaaattcgagaaggcccgattcgattccagcaaaccggtggttcaaccgcggcgggtggagtttgtcgatcggaaactgagtgcggtgacgtcgattccggcgctgttgatggacgggaagtgttaggtttgggactgaagagaagcatgacacaactctcaccatgtgatatactggaaactggaaacgatctcactcaaagtgcagttttagtttgcatgatcgcaagagatgaatcactaatttaagttttaaaatacatcataagtacagaata

SEQ ID NO: 669 - DNA, 1431 bp, Aedes aegypti
tttgaaatagagttttggacaacggagaagttttccttagggaataagtcaaaaacgttgatttgagtgggtgtagtactgcggaagaaaatgatgtaattatcaatagtttagtagttcattagttcgaatcaaccacatgtaccacaaagtgcactgtttccagatgtccccattagttagtttgctcgttcctgtttgtgtttacttgtcaaacattcctctggaaatggtaactgcgaacgtccgaggaactttgtgctcgaacgttccttttctctctctcagtgcctgaggaccgcactcaagtctccatacgatcgtcatcttgttcggccgagatgcattcacggccattaccttatcgccaccgatggttttgaaatgcactgaacccatgcacgaatcaataattacaaattacgacgttacttgagcgtatcgcctctgcctctcttgtcaatgagctaacgaacctcttttcattccgtccgtagatttttcatcgagaactactcgcacgtagacgacgacgatgagctgtatctgaactacgactggtcgtcggactcgatgtcgatcaagagcaatatgagtaacaccagccaatatccggattcggacggaagtggggagcgtctatcgttggcgtacgaaaaactgtcgaaaattccgcgcaaaatcgcggagaaattttccaagacgacgaccattctggatctgagctacaacgatatcaaagacctctccttcctgagtcacttccgtcagctgaacaccctcatcctggacaagaacccccagccggacgagaaaactcttccttccttgccgaacctctcgctgctatggctcaaccactgcgaaatcgacaacgtccagaagtgggtctaccggattcgcgactgttgcccatcactccggtacctctccctcatgggtaaccctggagcaacttcgtccttcaacgggaactccaccctagaacacaacgactaccgcatgatggtgatcagtattctgcctcagttgacccaccttgacgacgcggaagtaacttctgcccagcgggtccaagccaagcagtacaaacacacctacaacatcgggcagacgccattcaacatcttcgagagcgtcggtcggggacagcagatgagccggaaggcttcgcagcgacgccagcggaagaaggaacaggaactgcagcaccgaaaggagaacgaatcggattcctgaggatggatggggtgcgatgcggtgtgaccaaagatttcgcgaatgcgattgaaacgttttatttcgaatattagacttaagtttgagactgctggtatctttgtatacgtgtatatatttgttgagttatgatgagataaatctctaattttctcgaattttaagtacaaatgtgaatgatgttatttgtaa

SEQ ID NO: 670 - DNA, 618 bp, Aedes aegypti
gttggtcttcaaatcctctatcacaatgaattcatatgcagtagttctgttggtggttcttccgctagtgttcgccgacgtagttcccgtcaaggaatgcaaggccggatccttaccaacttccgtggacgtccagggatgcaagaaggttccttgtgagctgaaacgcggcgaggacgccgtggtcttcgtggacttcagcgtcagcgatgaggtggccaagttgcgaccggtcgtctacgctacggccttgggcttgacgattccgttcgagttgccatcggatcggcaggatgcctgcgagtggttggagggatccaagtgcccgctgtcggctggggaagatgtgaggtaccagttgaggttgccggtggagcagagctatccaccgattgcggttgatgttgagctgaggctggtggatcaggacgatgagatcgtgagctgtttcagtgtgcaaggaaaggttgtgtgagagtgattgggaggtttcaatttagttttaaataggtatttgaatatttctacatttgtaatatgaatccattatgattctagctgtgaaaatcaatatctgttagaaatttggtgatatgaaataaattaagtacaaacttg

SEQ ID NO: 671 - DNA, 381 bp, Aedes aegypti
atggccaactcgcagacgtttcccaccttcgtgcatccgtcctcggtggcgtccgcatcgtcgctagtggcggcaacttcgatggaagcgtccgtcagcggaggccagcagcacgccgagccccagcagcagcctagtcagatccaggtcaacaagctgtatcagttgttgatcgagaatcgtgcattgctggagaaaccgccggtatccggtggtcccgtgcagcaggagcagcaacatcaacgtggagtggaagcagtaagttgtgggacgggtgcaagcagaagaagcggaacgcctatcagtgacagtgtctcgggaaaagatacagcaaatcttagcagtttgatcaagtgccatcgtcgtcaacgcgttttatag

SEQ ID NO: 672 - DNA, 3094 bp, Aedes aegypti
gctagcgtaaaaagctggatatatctctggtagttattcggcatcctatcgtaaatggtgtaaaactagtttcaaaaaattacgtggttcaaattatttctaagcgtaaaaaagttcttttcaaacactcaatactctatataaatattggaccgaaagaacgctaggctaagtcattagagtgaacgaaacccataagattttttctgatttcatttgaattttttgtctcataccatcaaaagggcatagcttcaaaatcaccaccgcacgatccaaaaaaaatattttttttttggtcggacttgcagctcaaccatcgaaaacgactggtgagcacgatttttttttctgataataacgatttgaagaacaccgtgatactcgactcgactcggtgcgttcatttcattcgcgatgagtaccgcgtcccattacataaacgttctacctgtactcgaccataaactgttattactcaccgatcgtgttctatcatcatcactcggctccatcagtcagttagcgattggaatttcccgcttccataaggccggatgggtggcagcgagagaggaagggtcaattataatgaatgatgatgcatgccaaccgagtttgccgccggggacggggattctaatcgtgctgcggtatgtgctaccgattgcttcccaatcggactcttcatcccgataaatgcccgatatcgattaccaaattatggtgatccatttctttctaaatgttgatgatttcattccccgaagtccagccaaggtgtggcgatgacgatcaaccgcttgcgcctacccgataaacgaaccgttgataacaccgctttcgattaatcttcatttgcagagagttatcgtcgaatcggctcggctacgacgcagttcaggcgcaggtggttaacctaagcaaactgcaagttctcaacgtcaatcacaacaacctgggccggataccgaggttctccggactggtcagcttggtgcggttacagttggccaacaacgggatcgaggccatcgaagttgaagcactgcaagccctgacgggtctgaagtttttggacctgtctcggaacaacatcaaggacgtcaactacggatcgtttccggacaagaacagtttgcagtatttgaacttgaatttcaacaagttgacaacgctgggcaagggaacgtttcagcggttgcagtcactgaagagattttcgaaagtctatatcgtttcattctactccaatagggaaatcaacagcaatgcactggaagaagtgcagagtttaaccttccagaacttgaatcagttgaagagtttaaagatgaacaacaaccgcataaccagtctcatggatggcgtcttccatgggctgacaacgattcagactctagagctcaacaacaacagcataaccagtattcggaagggaggactgttcaacctgacgagccttacaaatttggccttatcacggaatgcaatcgtcgagatcgaacaggacgggtgggagtttgctccgagattattcaccctagatctgtcctacaaccgactggagtctctggacaagtacacttttgaggaactctcgcagctgaaaactctcaacctagaaagcaatcaaatctccgccattggcgaaggaacgttcaacaatacgaaaagcttggaggtgctttacttgggtatgaacaaaatttcctggaccatcgaggacatgaggggaccattttacggcttatccaaattggaaaggttgtatcttaactcgaacgaaattaaatccgtcagcaggaatgccttcattggactcaagtcgttgctgctgctggagctgagtcagaacaacatttcttctattcagagcaacgcgtttaaggatacgattcggttgaagacattgatcatgaactccactaatctgctgtgtgattgcaatctcgtgtggttctaccactggatgaaggagcggaaagacgtcttccagttggatgctgaatgcagctatcccatttggttgcgcgggcagctgatccgggagctgagtgcttcaaacttctcgtgctatgactccccgaagccgcacctcattgacgagcccaaaacacagttcggaatccgtggcacaaatgttacgctagtgtgcacggctacctcgaccgctccagatgtgatgaccttcaagtggaaacacgacaacctagagttgccggattccggttccattgtgacgcagctcaacaacgacaacggaacggttggaactacacagctgaccatcccgaacatccagaacggagccgccggcaagtaccagtgcatcatcaccaacgcctacggggtggtctactcccaaaaggttaaggtgacggtgggtactttcccgtttttcaagaaaactccgagtgatatcagtgtgcaagccggaaaaatggctcggctggattgtgccgccgccggggatcctaagccacagatttcctgggaaaaggacggagggaatgactttccagcggcgaaggatcgccggatgcacatctcagcggatgacggagctttcttcataatgaacgctcagatagtggacatgggagtttatacgtgttcggccgagaatgcggctggtgtgatcaaagctagtgcttcggtactggtcctagagtcgccaatgctcttgaaaccgttggaaacaaaagtagcagaacttgggacgtctattgtactggattgctccgcatctgggtacccgaagcctgtcatcctgtggttcaaagatggtgaaccactcttggtaaccgagaggcatttcataatagcagatggtcagttgatgatcatcgtcaaaacggatttcgacgatgcaggagactatgaatgtcaagttgagaatgagtttggcagtcaacgaggtttgatgaaactatcagttatcgaaggcccagaattggttcatgacgatatttcgagtactaacacagataccgtatccgcaatcattttgatcacgatcatatgttgctgtattcttacttcgttgatttggattgttgtcatgttccggatgcggaaacgaaacgatgaa

SEQ ID NO: 673 - DNA, 216 bp, Aedes aegypti
atgcccagattaattgccctggtcgtcttcgtcggcatttggatggtggcttactcctcgtccatcgatggcccggattgggaccaggatgatgccggattggtcgccagtggggactgtccccggctctgttcgtgccttggaaatgtcatcgactgctcggaaaagagcttaaaacagctattcaacattccactatgggtggaaaacctgtaa

SEQ ID NO: 674 - DNA, 3108 bp, Aedes aegypti
atgggcttctttttgtttcgggagtttcgggagattgctgaagtcaatcaaaaacgcatttttcctgaagactcagacaccaccaccgactacacggcaatcacactggtcgttttccttttcaccactctctatacagaacgatccgcactgctcaacagtcgaaatggaacttcactaagaaagccttcaccaactcgcctccgagaactgatccgccagatacgtgcagcccgaacagctgccgaggagcgagccgtagtcaacacagaatgtgcctatatccgaagtacctttcgcgagacggactgcatatggaaatgtcgcaacatggccaaattgctctacattcacatgctaggctacccggcccactttggacagatggaaacgctaaaactggcggccagttcaaaattcactgacaaacggatagggtaccttggtgcgatgttgctgctggacgaacgacaggacgtccacgtgctgctcaccaactgtctgaagaatgacctcaataattcgacgcagttcatcgtggggacggctctctgtaccctggccgcgatcgcctcacccgagatggcccgcgatctgtcacacgagatagaacgtctgatcgcgtcctccaatgcgtttcttcgcaagaaagctatcctgtgtgcctttcggatggtccgccgagtgcctgaactgatggaggagtatatacccaagtgctcacactttttaaacgataagaatcacggaatcctcatatcgacaatcactttggttacggagatgtgtgagcaaagtccagtggtgctcaactacttcaaatcttcgatcccgacgttggtgcggacgttgaaaactctgatcgtgagtggctactcgccggaacatgtcgtgaacggagtgagtgatcccttcctgcaggttaagatccttcggttactgaggatcttgggtcacggtgataccgctcagtcggagattatgaacgacgtgttggcacaggttgcgaccaatacggagacaaacaagaatgcagggaacgcgatcctctacgaaaccgtgctgacgatcatgaacgttgaatcagaaaacagcctccgagttctagccgtcaacattctgggtcgattcctgctcaacagtgataagaacatccgcttcgtgggactcttgacgctggtccgaaccgttcagcgagacatgaccgcagtgcagcgacatcgtatcacaatcctcgagtgccttaccgattcggacagttcgatacagaaatgtgccatggaactttcgttcacgttggtcaactcgcagaacattgaaactatcgtacgggaattgctcaaatatctggaaacggccgaagcggagatgaagggtacctgcagcagtaggattgtcctggcagcagagatgtactcaccctccatccactggcatctggacgtgctgctcaaggtgttgaccatttctggcaacaacatccgagacgacgtgatagcctcaacaattcagctcatatccaacagtcccccaaaagagcagagttacatcagtggtaaaatgtggaaatctatcaccaacatgaaccagctggaaaaccgccaaccgctcgttcaagtggccgtgtggaccctcggcgagtacggtgaatccggtagtttcgatgaaaacgagctgattgaccactaccgacaactgctgtgggctccgcagctatcaatcaccaccaaacagtacatcctggtttcactggcgaaaataagcgtccgtatggagcactgcaccgctaacatccaaaacatcatcaacgccttccgggtacatctgaacatcgacctgcaacagagggctgttgagttccaccagctgttcaccagtcacaaccacctgagggcggcattgctagagaagatgcccgtcctgaagatatccgaactgaccacatcggagtacaattccgactttgccggatcagcggaaccgacttcggcttcgtcgcccagcgaagaatcaacgcctcagaagcaggtttcgaatcaggacatcctcctggacttgctaggagattcctttggcagtggctcttcaactagtaatacgacgaccactcccagccccttgcaacagtccacaccgaacgaacctccgccagcaaccaatacgattttggatctgcttggcctgggaggtatggatcaatccggttccttcacggcgacagtaagtccattgcccagcggattcggcagccccacggagtactcggccacgacgattctcgtttacagccaggacaatatagacatacggttcatcgtgaagaaggaaggcgaccacgcggtcgtcacggccaaaacgaccaacaactcgctcaacatgctcgagaagtttatgctgcaggtcgcagtcccgaaagcatttacgatacaaatgatggtgccatcgagtacggtgatgctcccgggagaatcagttgtccaggacattaacgtgattcgtaccaatccagccgccagcagtcccctccggatgaaggtccggttttcctacgacatcggtaactactccgtgatggaacaagcggacgtcaacgatttcccgccggatcttttcatttgagggtcgatgctgctcacactctaatacagctaatcacaactactaaccggaacacgtttgctcaactgtaaaatagcatatttcaactacactaatcgactgttgtaagttttacaacaaaaaaacggcaaaccagggcacaatgtttgaaacaagaaatcaaatggactttttcggaaccaatcaactcaaatctgactatcaaattagaacactagagcacaagttcattctgttttacagtgcgtagattatttcatgttaaattttatcataaaaatttaaaataaagagttaaacgcctagcagaattttacccccagttgaaccaattaaatgtagataatttaaatataaattaaacgattttactcgctttcgaaatgtgtccccctctttcaagcttaagaaagaacgcctcaatccgtcgggttctggatcacgatcaggaggaagtccttgtccggggcgaccataatttcgtgcttc

SEQ ID NO: 675 - DNA, 2026 bp, Aedes aegypti
atgaatgggatcggctgcctgtatggggtgttgctgtttctcctgagtcagaccgtcgtccaaccggcgcgacagttgcatcatcgacgccatagtagatctgtcgaaaccgaagaatccgaagacggccaggaaagctacgtcgtgggagtggtagaatttcgtccggaaccttccgatgtcgacgttcgcagcagaacggagcgacacctggaagcgtacgcagagctgatccgctccgacgaagccaaagtgagtaatgagttgataattggttaccgacataattatttttccggaactcactctcaacaccttctcggactcagtctacattcagaacccatgcacaacttgatactctgctgggaaaaatacacttcgaaagagcttctttctttctttctggcgtccgagtcggaaaaatacctcgtaataaacctttcggagattttcgactgcaaatcgtgtgcccctcacgggtacgtgtggtacaacaccaatgtcgttttcgaccgaaacggagctgtgatagcgcggtaccgcaagttcaacctgctcggtgaacacggtaccgaacggacgtacgtgccggagattgtaacattcgagactgactttggagtgacgttcgggttgttcactcgatcggatgtgctgtttgcgagaccggccctggagctggtcaaacgggatgtgaaggacttgatcatgccctcaatgtggcaagcggagcttccgtatcttacgtccacgcaagtgtacgaaagttgggcttactcgaataatgtcaacctgattgtggcgggtggtaacaacgaggctacgggcagtaccggaacaggagtgttcaacggaagaagcggagcgatcttgtcgttcgttactggtgagccaactaggagactgtttccagtacgcgtacccataaatcctggaatccgcacagcaaatcacattccactggaggattccgacacagaagccggtcgattacatgggaagttcctcgaagaaatcaacattgaacgtgacttcctggagcagttcaccaccctgcagatcaatccggaacgctatcacgaccatatcggtcaaattatctgcaatggattcttctgttgcgaatttagtgttactttaaccatcgtccccgatcaggacgtgacccattactatcggtttgcggtgtttgacggatatcggtctctttccaagcacagtgacacctacatatccacatgtggaatcatcgcctgccgaaatcagtctctatccagctgtggtctgcccatgaacgaaaactcaaactacctcgcattcaacgaaatcgtcattacgggcaagtttcaggcgaacggaacgctggcgatggcgaactccctggacgacatgttacacccgttgagcgtcgatcagtacacgttctactcatccgtcaactactcgacgaaccaacaggacgttcaactcaccctgtccagtggaagcgcagccaatctgcagacgttcgcgatctacgccatcaattacgaaaactttgagtacttcaacccgattgaggcccctccggagcctacgacggagagttcctcgatcgaatttggcgccgttgaggatgatactggaggatcaactagggctacgactccgggtgcacttcagctactgctgatactgatgctgctggtcagctcggtacgagaactgaggttataaagaggatcaatggtcagagacgatctgatagctgtaaatagtgtaaatttttctcgtagaataattgaaaagtgtatgccaaattgttaggaataagtttaaacaattcatggaaaggcgatcttgcaaagttaccagctattcgatctttttccatccaaaccgaccgcgtcagaagcagatcgccaactgtcaagattggagagatcgagatgttcgaattccaagttccgtggtattagataggtatttaaagcgttccaaaaatgatcaactcgaaagcaataaaagtcataggttttacttt

SEQ ID NO: 676 - DNA, 1908 bp, Aedes aegypti
atgtgttgtgtttgtggagaacaatcgcccgacctgaaaaatgggctccagaagcaatcccgctcagcgaggagaagcgcatccaagaaatggcgctaccaaatgaatagctttcactatttcgtcatcttcgccagtggttcgttgttttccgggctgatgtttggtttgctgaattacgctcccaaatatgtgctgctgccaacgagaagtgcgccacatcaccttccggatgggaagtttctgcagatttcggatgaagcgcgggtgatggaaccatattttccggcggttcgaatggccggaagattgggggatggtaataatggcagtggcaagatccggactgagccgcatgacaccaatgagcaggaagcgctcagttccttgaaggtggccattgaaatgaaaacgatggggaaggatgacaaagcggccagattgttccagcatgccttggccctgtcccctaagcatccggagattctgaccaagtatggggagttcttggagcacaaccagcaggacgtcgttagggcggaccactattactatcaagctctgaccgtaaatccttcgcattcggaagcgctggcaaatcgacagaggacggcgcaaatcgtggaacatctggatcagaaacggttcgagcggttggaccaaaagagggacgccttgtcttcggtttcggataccaatatggctctgaagagggccgagaaggaggcttacattcagcacatctatcattctgtgggcattgaggggaacacgatgagtttggcccaaacacggtcgatcctggagacgcgaatggccgtcgatgggaagagtatcgatgagcataacgaaattttgggcttggatgcggctatgaagtacattaatgcgacgttggttaacaaaaatgattttataacgttaaaagacatcttggaaattcatcgacgcgttctgggtcatgtggatcccatcgagggaggcgagtttcgtcgttcgcaagtttacgtcggtggccatgtgccgcccggtcccggagatttgtccattctgatgaaccatttcgagagctggctcaactcgaagcaggctttcctgttccatccggtcaaatacgcagccatggcccattacaaactggtccacattcatccattcagcgatggcaacggaagaacttcgcggcttctaatgaacaccttgctgatgcgtgccggctatcctccggtcatcattcagaaacagcaccgccacaaatactacgattatctgcaggtggcaaacgaaggggacatccggccgtttgtacggtttatagcggactgcaccgaacggacgctggatttgtacctctgggcaacgagtgaactttcgcatccggtaccgctgctggcgcaggaaactatgcccgatggggttccactgataaatagtttcgaaaaggaatcgacgatcgaagggagcggcgcaggcgaagctattcggataggaaccatttgatatttgcttgcctccgtgctaacaattgcgatcgtgatactgttgctacgccaaaacgcccagctaattgtaatgctgattgcaatctaggacaaaatgcgaatgttccttttgcctcgaaaccaaatgtcagtccctggaaagaacgtggaacgtggtgagtatctataatgtagctaaatcaattttttaggatgttagaatgtttttaaaaccagtttagtcccgagctacatttacaattcctagttgagggcagtcacaactactagtataatatgttaccaaaaccctttgaaaccattagctatgcattgtgtctccagttttgaaacggtaacttattatatgctaacgttttatatgtctgtataaattgtaaataaagagttaagttttattgaagat

SEQ ID NO: 677 - DNA, 1016 bp, Aedes aegypti
atgacaactgcgatcgacccagaactgcgcaccaaaatcgatgccgcttgccggatggaggaggaattcatcaaattgtacaacgaaaaagtagccaagaagcggcatcagatgacccggctctacatggacaacggtttgctggtgtggaacggaaatggtgccaacgggaaggacaacatccagaagtacttccaggaactgccccgcttcgaatacattatgaacaccctgactataattgaatcatcgcagggctggtagcggatctggttttctattttaattcgagtctttaaaaagtgcaaaattaaatgcaaattcctcgagaaaaagcctcaagaattatcctagtgcttgctccagacattacagcttgaattctttcaagaattcctactgggatcaccccagaaattcgtctagagatttctcaaccaattctccctgaaattgatttggcgattcttcaaatgatgtttctctagaattttctcctggaaatgcttgagcgcttcaacgctactatctcctgtaattcgctaagggattatctctattttttttccaaagaccagaattctagttatgtttctactaatcattcaaccgaattctccagttgttactctgtcaagctagagcctcaggagttcagttggattgttgtcgaataaaagttcaagctacagcagcgtttcaatattagacggatactgatgtgaatctgaagatataatggaaatgttaacaagtaattataaaaatgtaataaaaaacagatattaaataaggatggggactggaacaatcattttttgcattgattgtattactgtatctttcaaaagaaactatgaaacaaggaatacctgtgctttaataatgtacaactgaagtcagttatttaaggaactatgatgatttgagtaaatagttgatcaagttgaagcattatttttctcttcacgtattaatttgtttcatcatttcttatttaatgaatttaattcaaa

SEQ ID NO: 678 - DNA, 1437 bp, Aedes aegypti
gcatcagtcatctgtttgcctttctcggaccaacacatcgagtccgcgctccgaatctccccgtgtgaattatccgtgtttagttagaagtgatccttgcgacttgcagtagtaaggaacggaacgatgagagcctttgtactgttgagctgctgtttggccctggcttccgctcgaccggaagcgggttactcatacaatcgtccatcgacgggcggcggctctcacggaggcggtggcggtggctactcctcgggaggacacggaggcggcggcggtggcggtagcggaggacatggaggagtgtccttcagctccggcggtggtggcagcagcggattctcgtccttcggtggaagcggattcggaggttcatcctcgttcagctccggcggtgccagcagcttcggtggtggatctagcagcttcggaggcggtgccagcagtttcggaggcggcggcagcagctttggcggtggatccgtcggaggcggcttcggaggcttctccggaggttcccagcaggccatcatccagaagcacatctacgtgcacgtcccaccaccagagccagaggaggtccgcgtccagcgcccactccaggtagccccggcccaaaagcactacaagatcatcttcattaaggccccgtccgccccagcctaccaagctccgcaaatccccctgcagccccagaacgaagagaagaccctggtctacgtgttggtcaagaagcccgacgaacagcaggacatcgtcatcccgacgccagcccccacccagcccagcaaacccgaggtctacttcatcaagtacaagacccagaaggagggcggagccggaggattcgccggaagcgttggcggaagcttcggtgccgatattggtggctctattggcggtcatgatagcggctccggagatcacagcggaggacacaccgccacggccccagctgcccagtacggaccacccggcaagtccggcccatactaagacacgaaccaccaccacgaacacgaacggatcattccggactcatcgaaccgattccgcggaccacgtagctagtcgaaaaaacacaaatcattgaaacacattaacacacacatccaagcggagtcagtctagctcacgcacaaacaccaacacaaatcacgttgttattgttgaacgctcttttgccggaggaggttccggttcgtccggcgtccaggaattgcaaggagccgtcgaatcggaacgccccaggcctctgttgtacataggatttctacttcacgaagcgaagaaaacaaattttcttaggacgtaggaattatttttacaacttcttacacttattattattattgtaatatgattaattgtaatcttgtttaattgttcttagaaaagatatgcaaattaaaacggtgacaaatttttagaaaaaaa

SEQ ID NO: 679 - DNA, 6105 bp, Aedes aegypti
atgtttccttgctctcgatttgtcttgcagggtgcatccgattcggagtcggcctcggaggagatcaactcggcgacggagatttccaccgattccgagttcgaccacgagcccagccatcgactgccgccgcaaatcatcatcaacgatacgcacctgcgaagaccagctaaagtacaggtaaagcaaatgacaatcgaaaacggcgtccgtcagcgacggcagtttgtctacaccaatccgcagcagcgctcgacctcccccaccgagttgtcgttccggtacgaccgcaccgggcgtcgggacatccacctggagttcaaacccctggtggaggtcgatccaacgatcaagctcagccagaatcgggcacctctttccattccacgacccggcgactacacgctcagcaaaaccgccagcaccgaaggcatcgcttcgaagaagagtttggagctgaagaagaagtacctgctcggagaaccagcgggcggtaccggagtgctcaaaagtggctctgcgtcggcgctggattccaagttcaagagcttccactcgaacatcaccgagtgtcagaagttactcaatccggctccggagatcagcccgactatgcagacgttcctgcagaagacggctccagctccaccgccgtcgttgctatcacttagaaaagaagcactgttgtcgggaagtaacgacgagaaggagaacgtgtacgatggtaaaatgatggccgggcttggaagtcagaagaggtacgccgagacggttaatgccactttggtggagaacaagcttaatgagatgaaacgcgaggaggaaggaaaaagagacgatcgaccaaacaacaatgagcgaattatcgaaacgatcgatctgatcactccggagaaggagaagaaggtagatggcaatcgacaggaggagaatggggaaaggaaaaatgaggaagatggggataagattgtggagatgagaaatatttccaacctgaagcatatgtacatagatttgacggcggattcgccgaactgtgatcggtcgttggtggaaacgacattgaacttcagcatgactccaccttcggctaaaggaggtgtaatgcagagtaatggagagctcaagaacagcgttccagatattataagcaatataaagatcgataagaacgagaacacggttgaggagatcatggtggaagaagaggaacgcacgagaagtccagcgcatgaaacgtcgattcaagttcctgacatggcatggagtcaagaccaagatgaagaggagttgtgcgaagatgacgaggaagacgatgatgacatcgattccgacagtatatcagattcttcaacgtcaagtacttccagtgtggaagatattccacactttattctagattcaaccactagtccggaaacgcagcacgatgagcggtttgtgcctagagtggagattcgggacaccgcaggagagttaatgcaaatcgatagtctaatgattatcgatgggaaatacattggcgatccggaagatcttaaactgttggagaagctgccgccggatactaaaatagcagcggaaatatctcagcaggagatgaatcttgatagcatctgcgttgctttggttgaagaacccaaaggtgaaacaactgaagatgacgatgaagaacgtgatcgaactccaacaccgccacaacaagtcgaaaatctgattgcgcctattcctcttccggtgcaagaactggaattgggacaagatacccccaagtctgccccaacaactcaaccgtctagtcctactaatccaaagcctgagctgaagtttgactcccgcaacgagaacaagctagaatcgatgataaaccttccgttggtgctagatcgtaacgatcaacctgtagagaaaccaagaaatctcaatttcactagtcgtagatcgccggataccgacgccgaaaagactcccttggcgccctcgcagcttctaccacagctggcaaaagcagagggttccgattcggaaaccgaactaacagcgcagaacctcacagaaaccgaactttccgattgggctgccgacgatgccgtttcggagaacttcgtcgacatagagttcgcgttgaactccaacaaaggaacgattaaacggaacaaaccgaaacacggtcgattgcagcagaagaaatccatatccactccgttggcaccgattgtcgtgtccaagcagacgcagcatcatcaatcttctgaggatggcattatgaagaaccttgccattgaagacattgagttcatggacacaggctcggaggaagaaagctgcatagaaacctattccaccacaaacagggcgatgttgaaaaatcgaggttatgtcgaatttgtggatccgagtgattctcggaagcttccctacacgatcgtgggaagcaatcagaatcaaagctactcgcaaacctccaagccagcgttggtggaagccatcaacaagcaagtggccggagtggactacatcgaacagggtgcatatttgctcaacagcggttcagcggacgattccaagactcccatgaacgaggagccaccgacgaagataacgtttagtgcgctggccgcgcagaacaaggtgctacagaatgcgcaacagcaaccggacagtttgattgacatggaagaggatagtttattggtggtaacctcatcgcaggggaccggagagacgacaacagaggaaagtgaagctccaacgattgtggcgggtgttctggaccgaaccggaacggctacaactggaagtggtagcagcggaaaaggtagcgttagttctttcagttcaaagcacctggaagtggaaaagtcctcaggtagtcccgttcgaaaggtatccacggagtctagttcggcgggcaaacggagcagtttggagaggaacttgcgaaaagactctttgaagaacaatatcgaagatattgggtacgatgagtacgtgaagaggttgcagcataaaatcgcacagatcagcagtgcgagggattcaatagaggtgaaaaagaacaaacgaaaaacatcaaaaggcgaaatcggttcagacgagaagctaactgaattgatcgaacatacaccagaaccggttgtgaagcctacggtttccagcatttacaatgagcaaagttcaatcgaagtgccaaaaagcgtggagaagaagattgaggagatcacaaaggaacgcgtcaagcagaaggacatcattcacgatctagtcatggataaattgcaaaccaagaagcaactaaatgccgaaaagcgtcttaaccggagtcgtaatcgcaacaacgctctcggccatccaccacttcctccaagtcagcctcaatctactgtctatcaaccaatcgcacctgagcggaggaaccgactgcttggccaagaggtcaatggtggcatcctcaatcaaccttacagcgcgacttctttaacgcattcaacaccaacagcaccaaccacccaaccaaacaaagagaacatcgctttcaaaactcctgccaactacatggtcactccacggaatgctgccactagcgtgaagaaacccccagacgaaacactcaccctaacagagcaactacgagaagaggcacgggcacgagcgcgactcaaatccaaccaagatctaggcctatcaccggaagaccgagttcaactattgcgcaaaaagttccacatcaacttacgggaactgaacgatcaggaatcgcaactccaacagcagaacaaatccgatgacaccaagttcaacgaacggcaccacaccaaactgatgacctccaagagcgtcaacgatgtatcgatactgaaaaatctgagcaacgatccggacttcatctcaccgacggatggccccggcaccggcgccgggtccatgatgatcggaagcaagctgaacgactatgtttccgatccaaatctggtgcagagcccaggggttccgttttctccgggcgaaaatgtgcagtccattgtggaggacttcctcggcatcaaagaaaaaatgtcgcacgttaccacctgcttcctactaccagtcaagcaatccaagtggaccaatcgtagcctctcgcccactgttcttgtggcctttgacgcctttgacagcagagaaataaggtcgctactactcaggcgctactttgaaaagcacaaggatgcaaagttgcgaaactgcttagcgtgcaccaatatttcggaaggagaaaagctgaccatcaccaacggtggcgcaggcgacgaagtgcgacttcgactgcgaagcaagtgcaaggaccgcgagcgcaggaaaagtctcatcgagaaggtatcggactttttcatcagccgaaagaaagaaaacagcgtatcgagcaacggttcgtcgcccaccaaagagaacaaaaagggcgaacagcagggtgatgctctggcggctccggccactagtagcggcagttcgacgaccaggacgggatctacctcgacgggcggaggatttttgaggttcaaaatctcaccgaagctgaaggataagtcgaagtcgtgtttcgatgtgaggaatattgggtttggtgtaaggatcaaaaatttcctattaaccaaggagggttctccgtacgaacggtgcgcctccgaagattacctaaagcagcccccatcgagtactagtccgtctgggcgcgaaaccatgaccagttccgtcacgacgggttcaccgtcctcgtcggtcaatgccgcgtcagcagttgccgccggcaatcggttcactccgatcggtcgcaaggaagccgaagagttggaaccaccgccgattccgccactgccactcaactatcagcgatccgatgacgaaagttgcaccacaaacgagccaaagaacgaactgaaaaaactacgtgcaatgacgaaggcatcgcgtcaagctgaattgaaaagactgagaattgctcaagagatacaacgagaacaggaggagatcgaggtgaagatcaaggacctggagactcggggcgtcgagatcgagaaggaactgcgcggtgagagcgaatcgctggagaagaacatcgagaacctcggtgccaacgacgaaggtctggtcaaggagtggctggagatcatgcgtaacatcacccggctgaaagtgcgtgacgaggagctgaccatacggcagcaggagctccagctggaacaccggcacgcgcagctcaaggaggaactgaacatgcgactgtcctgtagcaagctcgacaaaaactcgtcggacgttgcggccgagggtgctatcctgaacgaaatgttggaaattgtggccaaacggcaagcgctaagaccttcgctagatgctgcggcggcggcggctgctgcggcagcggctgccgtcggagtaccccattccgttgtcgtgccatccccgtccacgcggatgacgcaagattccgatatttaaacacagcagccaatgtgatctaaaaaaggggtctcgcactctccacctatctcactcccatggagcaattgaatggaactgtgttgcacctaaatcgacctaaaccgaccgtcaaatcatggaagagccctttgcgagtaacttctccgattcccggctagatcttctctgccaacccaacctgtgtagatatgaaagttaagcgttaaacagttgacattctgtacaaagattgattcgatagatgatggtgcatcgctatgaaatagtgattccattcccttaggaggacgcgtgaaaaatcgctgtgaggaaatgggttttttgaaattttcgaaattcgttcggaaatttgatacacagaagacagggaatgctatagtaagctgccagggacacaggtcaaagacatttttttttgttatttttaggagcaaagacgatcgaatttttgtttgttttagactgtcatttcagattttctttattatgtcgttattggaaatgtgttgctgattctattaagctatgtttattattatttgttgaccatcgcattgtagagatttgcatgacagggttttgttgatttttactttcattacaagtgtacgttttgcctttttt

SEQ ID NO: 680 - DNA, 11007 bp, Aedes aegypti
gtgtgcttgtcttctcggtggctttgtttacgaaattagtcgcgtcgtttgcacgcgtctcaacggtttgtttgcctccgtttgtaagtgctcttccgcccaatatgtcgtaatacaccttgagcaggagaaaactaccctaccgacagtgaacagtcgacacatcatcccgtcaggttgttatgagttttataaaacgcagcgtaagaagcgttctttgttcttcagaacgacgtgatttgtctcgcgccacgccacagtctcaagcaatatcctcagtgtagaaatcccaggagattcctaccaggcgaaaaaaacgcaactgacttgatgaccatcgtccactgtccagttgtgaccggtgatagttaccggcgaatgaatcccgcaatcagtgagcatgaggccgcgtcgctggctgcagaaatgttcgatcatttctgcgcggccacgaccatgcgccagattctcggtttgtacagaaacatgtgtgatatcctaaacctgaggcccggtccgctgaatgaattctacccaaagttcaaagcgaaaatccgcaactggaaggcgcaagcgctgtggaagaaattcgacgcccgggcctcccatcgggtttacaacaaaggtaccgccgccagcggaacccgtgtactagtcatcggcgcaggaccctgcggtctgcgtacggcaatcgaagcacaactgctcggtgctaaagtggttgtggtagaaaaacgtgataggatttctaggaataacgtactacatctgtggccatttctgatcaccgatctcaaagcgctcggagcgaaaaagttctacggtaagttctgcgccggttcgatcgatcacatctcgatccggcagctgcagtgtatcctgctgaaggttgctctgctgttgggtgtcgaggtgcacgaagggttatccttcatacgagaactcgaacccaaagatggctgtggttggcgagcggccgtatctccagaggatcacgccgtgtcgcactacgagttcgacgtgctgatcggtgccgacggtaaacgcaacactctggaaggcttcaagcggaaggagttccgtggtaaactcgcaatcgccatcactgccaactttatcaacaagaaaacagaagccgaagccaaggtggaagaaatcagcggcgtagcgttcatcttcaatcagtcgttcttcaaggaactctaccaaacgaccggtatcgatctggagaacatcgtttactacaaagacgaaacacattacttcgtgatgaccgccaaaaagcacagtctgctagacaaaggtgtgataatacaggattacggtgatccagcagaattactgtcatccgcaaacgttgacacgtccaagctactggactacgcacgagaagcggcaaacttctcaacgaaataccaaatgccgaacctagagtttgcggtgaatcactacggtaagccagacgtggcgatgttcgacttcacgtcgatgttcgcggcagacaactcctgcaaaatcacagtccgcaaaaactatcgattactttcctgcctcgtgggtgacagtcttctggaaccgttctggcccactggatccggttgtgcccgaggcttcctgtccagtatggacgcagcctacgcaataaaactgttctccaattcgaaaaacagcgctctgggagtgatcgcacagcgcgaatccatctatcggttactggcgcaaacgactccggagaatctgcaccgggacatcggagcgtacacgttggacccatcgacgcggtatcccaacctgaacaaatcctccgtgaacatgatccaggtgaaacacctgctggacaccgacgacctggccctgttggatcaaatgttcctggacacgaacgcgctgacggcgggaccggaagtgatcgtaacgaagcggaaacggcgaaccaacgatacggttccgttgggtactgtgctgctgcggtgggtcaagtcccagctcaagggtaacgactttgtgcaggagttgaccgatgcggcgcagtgctttaccaatgggcgggtgttgtgcactctgatcaatcggtaccggcccgatctggtgaacttggacgagctggacggttgcgggccggatgagtgcaacgagctggcgatatcgatcttcgaggatcatctagcaatcccacggatcatgtccggtcaggaatcgctcaccttagccggcgtggactccaagctgtggctcaactatctggagcagatttgcgaggtgttccgcggggaaattccgcacgtcaagcaccccaaactggactacgcagagttcaagcagaagcagcagatcgacagcatggaggagttctccaagctgcgacggttcgcggccctgaaggctacggcaccggccgccgttccggtgatcgtgcctggccccggagccgttgctggcttagggcggaagtcaaccaactatcacgaagaggaacgcatcaaacggagccgcagggtgctgggagcggaatctagtccaatggcctcaccacagaccgacacgacgaaacgagcgaagaaacgccgcagctacgaaaagtttggcaacattgtggagcgaacccggcgcctgcaggagatcgaagcgaaccggctcgatcggcagacgaagcgacgcctggcccgagcccagcagacccaaaacttcttcaccagtcttcacatgctgcaagcgaacactttactgcgcgaaagtggcgacgacagctccagtgccttcgaggactactcgctctttctgtaccggcagtcggcgccggagttcaccgatcgcgtcaaggagctagaacggaagctgctctatcccgatcgcgatcgcggtctagctgcggcgtacccgaaaggtctcgccggagccgatggcgaacagattagcgatcggatcaaatcgatggagcagcggatcggagggaagcatgttccgatcaccgagaagaagccgaaagatctgctgcgggcgatcggcaagatcgacagcagcgattggaatgtgaaggagatcgagaagaaaatcgaacaatcgaagaaagcgaccgacattggcaagagccgtgaacgagttccgaagtggaaccgtgagcaatttttagctcggcagaacaaactcacgcagcagccggatgatgaaaagtacagggacatcgacagttcactgaaggcgatcgaccgacagctgaaagagggccacaatctcgatctcggcgagcgtggcaagaataaggtggcttccatcgctggacagctactcagtacgaagcaacaacagcaacagcagcagcaacaacagcaacagcaacaatcgagtcagaaatcgacatccaaggccgcgttggttctcacttcatcaggcgtagcggagaagtgccatttctgcaagcagcgcgtttatttgatggaaaagatttccgcggagaacctgactttacacagatcctgcctcaagtgccaccactgccataccaatcttcgactcggaggatacgccttcgatcgggacgatccggagggtaagttctactgtacacagcacttcaagctgccatcaaaaacgtacaacaaaccggtgccaaagaagtcgttgacccgaacaccgcaagcagacaaacagcccctggcagccgcagcggcggtagcctcaactacacagccttccacgccggactccaaatcatcgggcttcatcaacttcaatctgttggatcgtggtgaaactccggagcgtatcgagttcgaaaacgccgacgagtccatctcggacggcgaggtaccgatggaggtcatcgacgaaaacgagtggaccgatcggaatttcggaaccgaatcggacgaatcggaggaagaaacgtccagctcggatgagtcggagagcgacagcgattcggactacgaggaagccgcagggtctccgctcggggcgcagacactgcagctggcgtccgagtggatcagcgataagcggttcaacagcatggttgacagtgacgatgacttctatggatactctagtgaagatgatgaagctgattcgcaaacggaaggcgaggagctggctcgggcacgagagatgcggatgcaggaggtaaaactgatgcctcctccaacgcttccaaccgacaccgaaactgaggttgcctcaacgcaacagcctccaccagtagattcttccgtattccctaatcttagcgcccctaatgttaataacccaccaccgctggagccagcagaatccgctgaagatagggctctgaaggagaaaatgctccagaagcttagcgttcgcgagcaatggctgaactcttctgccagcccgtcttcgtcaacacctgtcaccacagaggcgcctaaacccaaaacttccttctttggaggcctcatgaacagtcttagcacgcttatcaaatcggacaaaccagcacccaaaccccaaacgcctccctcttcgtcagctttacttgcaccaccaactcccaacgaaccaaaaccgactactccaattcaaacaccatccaaaaacgaacctccaccggcatccccgtcgccatcaatacgtcaaatgaagtcctccaccgcactcaaaccaccaccatcgccaacaccttctctgaagaagcagaaacgtcctgatgtacctccatccccaacaccatcacgcaaaaaatcgaaaacccctgagattccaccttccccaacaccatccctgaaaaagcaccgcaagcacaagaagtcttccgcttctcctactccctctgccggtagcgaagatgccgcctttgacgaaatgttcaaagacgacctgagcagtggtcgcagtactcccatttccaaacgtcgcagccgtccaaagtcatccagcgctattcgagaggatgccgatgagttcctcgagcaaatcaaaaaggaccaagctgcgctagacagacgcatgaaaaaggttgaggctaagaagttccaaagcaatatgcagtcgatcaagtccgccgtagagggaccccgtattgttggagttcgtagcgaaaaggatgtctccaaatttttcacctccgtcaagaaagaccagtttgaaccgaaaccgaaacatcttcctaacaaggacgtatctgcgttgcaaggagtcaatctgtctaagtatttcccaactagtagttcgactcccaccagcgccaaagcaagtatcggaacaccgtcttccgtgtccagcgttgaggggtctccaatggcatcacgaaagaaaccagatgatgttgaactgatgaaatactttggtcctaatacaacgaagtcttcaccatcgactccatcatcttcaaaggtatctccagcgatatcgaggaagaacagcgttgaatctccgggtgtaactcgtaaagcaatgcctgtcgccatcggtgccaagccagttactccagctgtattagccccgaagcctccggttgtaccgctccccccaaagaaaaatatcctagctttccaggtcgtcaaaaagtccaagactgataccaccgtacaacctgcagccccagtaaaaaatagcctggctttccaacccgtggccaaacaaaagtcaccttcgccaaaacccgtctcgaatgtagctagttctcctccaaagagtacgatcctgagaaaatctcccgactcagacgacaaactgtttgaaaatctattgaaagacgctcaagaatcccccaaaccaatttccaaacaatcacacatccaaaaactacccagccctcctaagcaacctgcaactcccgaagacgaactatttgaagatctgctcagagaaatcgacggatcaccaaaatctccccgtaagattccttccccaaaggcttcaaaaaagtccttaacacctccgaaacgccaatctcccaatctggacgataaactttttgacgatttgctagaagaaggtgacgagtccctgctagacaattttgacgagattcttggtctaccgaaaaagcgacaaagtcccaaacaggtaaagaagaaaaagtctcctccgaaaaagtccccaccgcgtgtatcgcccaaacattctccaccagccgcgaaaaagcccagcatcccccgaatgacggtcaagcgaccaccgttcaagatcattgttccagttaaaatgcaggagacgctggaggagatctacctcgccagtctgtcgaagctcgattcacgctcgacgtcgacttccagtttgaacagcaaagttagcgaccctggtgatctaggtaaggtcgatgaagttttcgaaaagctgctcgaagaaccggaaccgacgccggtcgagaaaccggcagaaccgtttaatattcagccctttcaggccccccagacgaaagccaagtcgagttccaatggagtcaagccgccagaagaaaaagctactagtaaggaagaaacgcagcagaggaccgtggtgtcatcggtattgccggtagttacaccttcaactccaacacaagcgaagaagatcatatctcaaacagcaactccgtcggaaactcccaaaatgcaacgtaaaactgctcagaatggacctacaaccgattctaatatgacggttgtagtcaaagaatctaaaattcccgtatcgacacctgtcttggcaagaaaggtgacaagttctccattatcaactccaactatggctaggaaggtttctcagatttctacggctattatcgtagacgatcaaacgaagaaatcaaatccagaagtcactccatcaaagtctacgggatcgacaccggcaaaggttatgatcactcaaaacataattgctcccaaatcagtcgcaattgttcaaaaggatcttccggtggataacccttctccggtgattcaggatggaatttcgaaattgacggacatatcttcgcctaattcaccactgactgtgcggaaaccaatcctgttgaagtcgtctgttgggctaggcacggattctcagagtaggaccaatgagagtcccaagtctgtatcgctgggaaacgcaaagaatgtagagattcctgaggtaccttttactccagtggtgcgccgaaaagcagttcaaccagaaaaagttcgcgagatcgaggtcgctactaaatcaactacggttacgcctccaaaaactaactcctcaaatgaagctgcggcagcagtttctacgattgcttctggtgctaaatttactccactgaccacgcccaaaatgcctccaaagttggttaattcgactgcaacttctgtgaatgctcctatcgaaaagcaaggatctaccgataaaataacacctaagacaactccagtgatgcctcgaaaactggttcagactcaaattgaacaaactgtaattccatacactttggatcggaaggccacactccagcccgaaccaatcaaggctcgcaaagtggacaaaccagaagctacttctacaagaagtcctaacgaaaagtcaccaatcgaatcaacgcacgcgactcaacaaaaggtaatcctatcagaaacgcctaaatctacggatagttccgaaaaatctaatccactggataaaatcattcctacaatcctatccgttgcggcaaagccttcggtgacacctaagcaagaagctcaaattccgacaaaagtttcccctaagactgacactcaacctccacgagaacgcaagctgtcttccgacgaaatctgtttcgaggaacttcgcaagaaacacgaagctattttccgtggtcaagacggttcgactgaagccacgcaatcgaagcatccagctgaacctaaactggtgcgggtgaaagaagtggatgttcctcgaacgctgtcggagttccgtagtgccatgatcatcagacatccccatacagaggacaaagcgggagaagaagccacccctgtactgcgtgagaagatcaacgaactggccaatgagcttatgccgggagcgaacctcgacgatgtagtcgacgaaatacccattcccgccgagcgtaagaagtcctccttccagaaaatgttcaacaagcttcaacgtgccaaaaccattgctgcaccggaaggctcttcgctgaagagtcttctgacacctttccgacgggaggagtgcaaaatggaagttattcgcgagggatccatcaaaaaacgatcgccggaccccgcgaagcccaagccgtctgaagaaccgaaaaatctgatgcagatcaacctggatcgctcgaagcaaatcaaggaaaagtacacgaaacagaaggcaccgtcgcctcctataccagtggcatcttctacgccgaaagaaaaaacaacccctccatcgttggaacggaagtcttcgttcaaaatccaaactaatgtcgttgaagctcaaaccccgcacaaaccggcgcctgtaccagtagagaggaagcaatcgatcaaaaagcaaagtccacctttggtcaccgagtcatctatgaataaaaaaatatctgaaaaggaagaccaaggtccgtcaaaacctatcccaatggaacgaaagctgtcgatcaagaagcagagcccacccttgagtgcggagagtacaccaaaaccactcgaaagaaattcttccattaagagtcaacaacctacaatcgaacgacgatcttcatttaaactgccagtaccgaaggacattgatcgacagcagagtattcttagtcgagaaccgaagagcaaggatcatgaagttcgcaactttgatgacctgctcgacagtgttgatgcaagagaaatgatcaatttcgatgatttgctgtcttccggagatgaactcgagcagaaacgatccgtcaagtcgaacaacgctgctcttttggaaccggctccaataccagctcctcgtagaagaagtccaagcgtgcaggaagcagccagaaataactcgctgtctgagaaagacttcaagcaaacttcgaaggagttgacggagaaattcttatcgaagacaaaaccaaagccagaggcacttacgaaggtagatccaaaattggaactaatgatgaccacgttgacagaaccggctgaagttttggagcaaacggatttgtctaaggattcaagcctcttgaacgcttcgtcttgcgatctaccagacatagtgaatataaccaagaagcaagctatcgaagcacagccagctttgaagatcttggatcacacagaaaagatcaaacagataacctcgcacatccctcaagagattcaagtttacactctgcatacggaggatcacaaaccggctgaaccgcaaccatcaaccagtggagttaccagtgactatgccagcatcttgaaagacatttcttccggcttgatgggaactgacatagtagagccagtattctacgaaccccctcccacgatcgataggaaacccaaatccgacttcacaacctataaacagatactgcaggacaaagctagagaaccggctgaacacaattcgcagcaaccgcaacgtcctcttcgtaagcccaagccaacagaacgaagtgtttcgccagcggttgccggacgtccattcgataattcgatttgcattgacccctggcgtgcgaagaggtcctcgagtatcgaaaatctagtggttgagcaagtgtttgtcaagaaggacgataaagttgttgacacgttctacatcgttccagagcaacagaaaaagctgaagcgaagatcgaaatctttcgataggttgcaggttcccgggtactcgggtagacgacatagcaaaaagtctttagaagagttgcgcgattttggatttgacattgaacctccgggtacttgcaaaaatcttgtgaaccctcgtttacgacatctgaactttgatgaatcggatgaagatctgtcgagtctaaggaacaaccggagacgagagaaccttaggaaatgtcaatcatctactgatacatctaaactagatgtagaagcgagcagagttgacattgatcgggaatctccgattcctcgtagcacagacttctccaaatgggaagccatcttagatcgtggtattccgtattacaaagagcctccagttcacaagaaagaagatatcaaatcattggagaggaagctggaagatttgaaaacggagtgcaaaccccgaagaaagatttccgggaaaaccccagccatcccgaaagactacgatccggaagaatacgttccaagaatcaatcgtagagctttggatacgtatgatgttcctgattctgaccttccaaagtggtatgatccggatgaatatgttccaagagcccaacgtaaccatgcttttgatcatgaaatccctgtcagcagtgcagtcagatctcgtcgtttgaatgagtttgatattcctaccagtagcacctcgcgtcctcaaagatcatctgcctacgaaatagacgtaccgatcagtcgaacaggcggaagatactatcccgaacctttgcatctggatgatcttccaatgacacatactttacccaaatcaaagatcacttcatcacacgtgccttacacttcaagtaggacctatgacttgccaagcagggatgtccctagaactagatattcccatcgccccactgctgacagtggtaccatcgtaaatcgcagccaaaggctgcacgagaaggcaaataagtacatccgttcacaagtaaccaaaaatgatcccaatccgtacattcgagagatgttggagaatgaaagcgatgacgatgcatatccaataactacatccacctctcatcgcgtccctattaccacaagttcgttccatccaatttctacctacggtacttccgggtcggctgccatgagccgtatcgctacaaaagccattacccaaccatctcggatgactcactacactcgtaaggacgttccttcttcctcgggtagtggcagtagatcttaccgtagaggaggcggcgatcaccacgatcgccgagacaattgtaccatctcctaa

SEQ ID NO: 681 - DNA, 2220 bp, Aedes aegypti
atgttcttaacggaatttctggcggcgatcctccaacaaacagcagaatacatctacacccttgagcaggagaagacccgactgctgtcgcaaaactgccagctcaagcgattactagaccagcaggatcacaacggagcagtggcagcagccgagctccagcaagccaccccacagactgttccgggcgtcaccgtactgaccgcaacagggacggtgacgacagccgccgtcatggtcaacaatggatccgccggagtcgtagccccggtggcgccggcaacagccccacaggtggccaccatcgccaagaaacgcaagattgacgctatcatccaaccggtatcggattcgtccgacgaaggactcggttccatgtcgccggaaccggtcagcctcatgcaggtcgtcaacaatgcctccggtacgacactggtcaccgcggtcaacggacgtgccgttgctccgtttaacgtatcggcgaaggactatttggatttgaagcaccagctggagatcgagcgacggaagaaggcggtgttcgaggagagattaaaggctttagaacgacagatctaccccgcccgggtactctatcaagaccatccggaattggtagagacgaccgaaccgctggaagaagtggttgtaccaacgataaccaaaaccgtaacaaccaaaatcacccgagagccggataatgtccaactaatcgccctggacaccggtgttgttggtggtaagaagcaactggtcgtctgcgggccggaaatcatcgaagagactgttatagcacagcccattgccaagccagcgattgttcccatcaaggaagagaaagtgttcatcaagcgatcccggtcgcgatcgcccacgatcgaaacggttgtcacattgcctcccaagaagaaccgctatccaacgatcctggaagcggccattaaagccgaacccaaagtggaagtcgagcgcatcgattcgccctcgtcgatcgtcgtcagcgacgatcatctatcgcacctgaccagcagtaaactggtcacatctcaacagcagcaagccgcctcgcgcatcaacacctgccgccacaatctagagacgatagtcgaggcgataagacacctcgaaggcgatgcattcgacaacgtggccccggctcagcatcaacaggcagcggcagtgcgaccagcggtccaagaagtaccgcttgcgttgaccacgtccagcaaacagaaggaacgcgaacatcgccaaagtcagctggaaccgtacctgacgttccggtcaccaccatcgacaggcgcctgtccaccagcctcctccgctacctcctcctccaccatcccttccagtaacacctccagcaaccccagcggaaaccccgcgatcgtctcagtctccatcactcccaccgttgcgctggccgccggcggttgtagtccctctccttcagccgcctcctcctcctccaccaccacctccgtcgctcaacagaccgcatcgcagattctccagcagcaccaacagttagcatccgcagtagcagcaccatcatcatcatcttcgtcgtcgtcatcgggttcttcatccctggtagccgccgcaaacgctgtcggatcggtcggcacaatcgtgatcaacagcggaggaggcggcgccagcggcaaacaaatgaagatcgtcagctgcaagaacgttgttggcagcgggacggccaacgtgatcatcaaataccggcagtctcctccccaacaggaagacttggagaaataaccgggcgacgacggcagcgccacggatcgacgtcgacggaggaatcttttttgttaattatttttatacagacacacacatatacggtatatattactttttcgcttccacgaactgacctgaatccccccctcgatgatccatagcatagcacaccaagcccctaaacgcgtgaccctcgtcggtattcctcgtacatgagtaagttgtgattttcatagcaattttttttatttttcatatttttgacggtagtttctagaaacggttctttaagtttatacttctatattggtaaacgcatttttttttgttttaatcaagcgaaagttgtagcgaagtgcgaagcggaaaattgatataactttttttaaggtatcatacaaaaaccaacacaaaaacacatactttgtaacattatatatatactggataagaatgttaggc

SEQ ID NO: 682 - DNA, 1138 bp, Aedes aegypti
ccagcagtagttgcggtgagtgctcagctgagttgatagcgcgatcgtcgtcctcgtctacggagaacaaggccggtagtggtctgtacgacagggagccaaaagcaggacaataagaaatatacagtggtgatcagcgggagataaggaactccccgttcaggtgtattggtgtgtgataagaaaccatcttcggtttgtttggactgagtttttgaactgtgatcaacattatcgatctctagggatcaagtgaaactgtccgattgtggacacggtgataacggacagctgtgatttcgatattgattgtgattgacattctgagtgattctttaagtgaagtatcggtttgagtcaagcgaattagaggatcggtactcggtgaattggatggtgaaattggaacggtacgagagaagcgctatctccagagacgtgccacaggaaggacatttactggtagcggagctgctgcagaggcagcttgttaaccggcaagattcttacgatctagcgaacttactattcgatcagtgtggagagtgcaacaaaatggcttgccttccccaatcggccttcgcagtgcacaaactgcgcaaaccacagaatgagaaggacctcgctgtggcacggctcagcaccgaaaagcaggactcaccgcgctacacgaacaacacgcttgacctcacgccggtcaagtacagcgataagctgatgaacagcatctggggcctctacaatcgctactcgccgcacaacttcaagaagaacaacggctccaacgagcagtacttcggcatgcagcagcctttcgctgttgcatgcgccgcttcggagatagccaactctgaagccaagtaccgcccgaataagaagtgaagtgtgatcgatcccagacgagtggagcctacgtatacggagatccacggaatggagtagtcacaactggaggaacttattgggccgttagtttttgttagatgtagattgtagtgataaaaatttgctcgtttggattagggtttcaaaattgactaacaaatttagtgttaattgggattaataggcatctacttttgactgaataaagtgttcaaatttatgaatttgattaggataactattggacaagtat

SEQ ID NO: 683 - DNA, 2341 bp, Aedes aegypti
atggaaaagcgtcacctacctgaaaaacaacgtcggctggcgataacacgatggatcggtcggatcaaaccccaaaaagtgcatactgcaaaccacgggcgtggcgccatttttgcgaaggttagccatactgggcaacagatgcccggcaccaacttcgatgcattcgcgccaacgaaccatcagactggtattagtcggaaacgtcgaggcagcatcgacaacttggacaacatcacacagtcttcgaatgggagcggaagttcggctccgggtacaccggaggacaacatcaatgtcgtggtacgggtccgaccactgaacgtgaaggaagtccgcaatgcagacgacatggtggtacagtttcccggaaacggacaaattctgtgtgatggcattccggcagctccgggaagtggtggccagaagcccaaactgttttcctataacgtagtcttcgaaccgggtgcaacgcaggacgacgtgctgcagtattctggcatcaaacggcttatcgaaatggccattgaaggcttcagctgcacggccttctgctacggacagactggttccggaaaaacccacacccttacggggccaccggaattgcacgaaagtcacggattggtgtttcgatcgtttctttatctattcaaactacttcaggaacgaaaagatacgaactttgtgctgaaagcttccttcttggaaatttacaacgaaaaggttatagacttgctcaacccaggaacagcgcgcaaacctctggccgtgaggtggtccaaaaagtccagagggttcttcgtcgagaatcttttcaccgttgactgcgaagagcttgacgatctgttagcggttctcgaagaaggtatgcgaaaccgctcggtgggttgccattcaatgaacgattactcctcgcgtagtcacacgatcctgacggttcatattacctcggagcagcaagccgaaggaggcgtgttcatatcaaagcagggaaaaattaacttcgtagacctggccggaagcgagatgaccaagaagactcatagcgaggggaagacccttgaagaggcaaacaacataaacaagagtctgatggtgttgggttattgcattgcatcgctgagcgattctaagaaacgaagtggtcatataccctaccgagatagcaaactgaccaagttgcttgcagacagcttggctggaaatggcgtaacgctaatgattgcatgtatttctccggcaagatccaacataacggaaacgttgaacacgcttcggtatgctgcacgggcaaagaagatccgtaccaagccgatcatagtgatggatccccgtgaagctttgattctaagcttgaaacgggagattggagctttacaggtagaaaacgaacatctacggacggcattgaatctacagtccgagtcgcaagaaatcaacagtcaggtcgattacctcgaacgacgacagattgttcgaacacctccaaaggtagatctcgagaaggttacggacatggaaggtagcgagctcaaagaactggtcaaggtgtacatgctggagaaccaggcactacggcaggagaactccgagctttacagcacacgggaaatgatcatgcgcgatcaagaagtggtctgccgagagaatgaaagactgttgaagaaactggaggatgtcaactcagtttgttgtcgttcaccgatcattcctgcaaggccgacgttttcggcagaaatgctgaatttgtcggcgagtggagatgatatgtccaacgtttggcagaatgctatgagcgtcagtagcgacagtatgggcagcgtaggtcgacacaaacaagattctttggacggacgcgtttcagcaaacgagaataaaatcccagagcttttgcaaaaggaacttgacaagagaagaattggcgatagcatacaaacaatcgcaaataatttgaaaaggcacaattcgtgggaaaacaatagatctttgaatagtgtgaaacttgcctcgcgaaagggttctgcggacagcagacattctgatcaatcccaacgcagaacatcacaaacgcgaatcattgacatgatcagctaagatgtaaaccgaagacgtacaatgagcgatcaatcaaggatatgcaacagggttaccaacgctggaataaatgtgtgtgatatatagcatctttgttagtaggacaatggaatgtaggaaaagagtgttattaaaagtgagagtttgtattgttacccgcagtcaggaagcgcacataaacaagatgattgtaaagaatattggaatcattaaataaaactgaaaaaatatgtgcatgtctctc

SEQ ID NO: 684 - DNA, 1071 bp, Aedes aegypti
atgcgacttgtcagcgcgcaaatcgatgctacccgttccctgtgtcgtgcttttggtcagaacaccctgcacccgagtacctgtccagccccattacattctcgacccgacatcgatcgtcataatcgaagcttcgaggaagcgataaatatcttgaacttcgatctcaccgacgaacttagcaatgctgttgatattcccactgaaagtccggaaagtaatcttcgtaaccactcgagttcgacattcatcagaacgtcggctaggcagaaacaaacaaaggaagttggcgttccatcttgcatccctgtttctacgaacactacagttccttcatttgtagatatccgctcaagcagtgtaactagtccaagtacactggctcaacaaaccgacgcttcttcaacatctgttccgagcacctcgttggctgggtccaaccttacaacctccgccgcaactacatctaccaacaccgctgcttccacatcaaccagttttgccaccattgtcgccgtgtccaatataatcgactcagctcgagcaaccaacacagccacaacttcttcttgcaccgctaccacccctcttgccactgccatcaacgccacgtccgttcctaccgcctccgcctccatcatcaccgctcctaacgccatcaccatcgcctctgattatactggtggcacctccaccggttcaaaagaagctgccacacaaaccgcatcagttccaaaaccctcaatgattcagtcaagcaacgcagacgcccgatttgcaattctacaaaggaacaacttacctgctgtttcacatcaaccacacagtggtcgagaaggtgatattgtcccgacactagctgtagcttcatcattaccaacgagaatatctacacaggatcttagctcacatcaagtttacggtcttcaaatgaaaccatctccaaacaatgcaccctacgtccaacaaccaccaactcccatccttcgtcaatcacatgttctccacaacaaccggcctcatcatctaagcctgccagttcgaaatcggttccaatcatcccttgtctag

SEQ ID NO: 685 - DNA, 863 bp, Aedes aegypti
gttggatgccactttcaaagaaagctcgacggatacatttttttgagtaacgaagtgcatgttgaactgtacatgcatgatatgagttccaaatggacaaccatagtaacagagagtaacaagttactgaggaactttaactattttgtacgaatcagattgcgaagagtactagtgtggaacgaaaattgttcatttagtccaaatggatttttatattttatgaaagacgaaaagctgtggtttgaagttccaagcagaggacaaaggttcataatagttgacaaggtagctctagggtgattccaaatggaatttcacacaattgtgttgaatctgatgtgtgttgaaaatatcagtgcaaaagcgcgccaactgagaattcagaaacgtatgagagttaaatcggaacggacggaaaatcgaggaatacacgctttgtgtacaatttatggagtatcctacgcaacaatcagtagaagccccaagatgttggtttctaagccgatagcctcattacggtcgtcaaatgtactcctaggggagatcgaaaacagaagcagcgaaacgtcagctgcttatgctcagaacataaataagatttcacgactattgttgaattatcgaattagttgtaaggattcaattcacctttacagagtttatttgataaatgtcagttctgtatatcattgtaataactcccagaaagggaaggactgttgtatacctgtatattcaaatcactttgatacctatgtcatatagatgtttctgtattgtgtgttatttgcatgaacaatagagtccatgggctcgagatatatatgagaatatacgaacgtcagttcactttaaaccct

SEQ ID NO: 686 - DNA, 1644 bp, Aedes aegypti
attgcagtgtgtaacgtggatcgttaactacagtttctcgtgacgattatagaattaagcaattgtgtaaaacttataaataagagccaacattttaatcgatgcccatgggtgaatttctgcgcattccgtcgatggaacagaccaaggaaattgctaaacattggctagacgataaaatcaatactgatgagctgtttgcatgtgccatctgccataatgcaataagcgtggaacaccccatccattgtccccagtgctccaacttgttctgtgccacctgcatagatcagtggttcaacaccggaggcccgcggccttccaccgtatcaagcgtgaaacgttgcccatgctgccaggcgaaggtcacaatgaatcaattcacctattgtcgcgtctaccaggaggtacgcgagatgatcgacagcctcaacaatagtatggaagaattgattctgcaactaagaaaacccgttgttttctgtgaaaaacataacaaagaactgatattgttctgccaggagtgccacaagtgtatctgcgtaaaatgtgtcttggtggatcggcaccgtgggcatatcgatcaggtgctagaattggacgacgctcgagaaaagctgaaaattgcgatcctgagggagaacaacttcttggtcaaccggctagctgtgttgaataaggtgaacgctcgactattgacacgtgaaaacgatatgcaccggtcctgtgacgcagtcgttaacgagatgaactttgcggtagacgctatcatcgaaaagatccacgaagacaaagatgaaaggatacaaaaggagatagcaccggtgaaggaagcaacaaaacgacaacaggaagaagtggagtcgatcatccagcagtctttcgagttggctaatgaggaaactagtcccgatgtattggtaaaaacctatcagatgatccaagccatcaagaaaatgcactacgaaccgtttcctgtggagcaaccccaagatataaaatttacgaacccgataaccccgcccccactggaagtgcgtttttccgttccctgcttctcgcagcgaatcctccggtcctgtacggtattctccgttccgcaaagcttcgacggttttatgcttcagctcaagggctaccacgattcggacgaggacgtaatcaaactttcgctccgcattctcgagggctacgacataaacgacatcaaagtagtctgctatccgatgcgggaaggggaacccttggtccggtgtatggacttgaaaaagggcgaagacaacacggtgctggagttttccaactttactgagatgggcggcttcctggataccatgctcgacgagttgatcatagagatgaagttgagcctgtggggcacctattacgctaaatgtgctcacaaggactggtgcatcaagaagctcagtggactcaaagaagtcatggaagatattcaaaaaagttcatgaatggggatacacattgtaagatcgcgctggacgtgacccgttggttataagcatatctatttatgatgacgttaactttttagcattgtatgaaattttgttaataaatattgtgcgataattgtcgatcagcataagaagaatcaataatcaatcatattttagtaaacgt

SEQ ID NO: 687 - DNA, 766 bp, Aedes aegypti
gggtcctgtggcgcaatggataacgcgtctgactacggatcagaagattccaggttcgactcctggcaggatcgatcttttttaggtttgtaacatttcctgacccatggtgctcaaagaatgcggtgggggtcaatttaaaacgggtcagtttcatgttaaaagattcgggcgggggtacacatttggaatttagaattagcaggaagaagcagaagaataatcaaaatctgatctcttgtggtgtaaaacgcaatggaaataggatcgtaaaattttacctggcttctagggaggaaccggaggaacgcatggaagtcgttttctgtgtccgaccaatcaatccgtgcttcggatgtgtcatgaatatttgaattgcattccggaaacggttctaatcttcgttcgctcgattgatgacgttttttttttcttttgtttctgtccatttcagcaaaactacttgatggagtttggttatttgcccaaatcgaacatcgaaacgggcaatttacggacaatggagcagctgcaggaagcggtgcgattgtttcagaactttgcgaatctggacccgacgggtaaaatcgaccaagacacgctggagctgatgcggatgccccgctgtggggctccagatctgcccagctcccgcgattttatgccatcgaacagtctcagtccgattcagttccagcatcggaggcatcggcgcttcgtcatccagggccagaagtgggagcatcccatcgtaacttggaggtaa

SEQ ID NO: 688 - DNA, 951 bp, Aedes aegypti
tcggacttgaaagggttataaagcaagctaattccactataaatggtgctctgaaaagcaccgatccacgataaatcatctgtgcagtgacaagacttacgatggcttcccacgtgattgttaagttcatcactgccgcaattctaatcggatcctgctatgcaaactactgcgaccaatctctgtgcaggcggggaccgcacgtggcctgcaatgctccaacacaattcggaagtgcatgtggccaggaaccgaaattcgtgaagatggacgcccggatgaagaaccttctcctgaagaaacacaacgaactacgcgccgaaatcgcctgcggaaagcacggttttccgcaagcagctcgaatgccgactctcgtatgggacgacgaattggcccacattgcgtcctttaatgcccggaagtgcatttttgcgcacgataaatgtcgaaacacccgcgagttcaaattcgccggacagaatttggccattacggctttcgctgggtacaacttccaagctgcggaccgagcagagaacttcacacaggagtggttcaacgaacacaaggattgtcccaagtcgtacgtcgattcgtatccaatgagtcacagcggaccccaaattggacacttcacgcagatggtcaacgatcgggcatggaagatgggctgttcgatggtgcactacaagaatggaagggtcatcaaatattacttggtgtgcaactactcgatgaccaacatgattgaggagccaatttacaccaggggtagtgccggatcgaagtgccaaacaggacagaaccctcagtatcgcggtctttgcagtccacgagaaaaggtcaggtcggaatcgtacagaggctaatcggaattgtgcgctggaatgaagtatcttttgaatatggatgaaaataataaatttgaatatgtcgaattggaaagtggaa

SEQ ID NO: 689 - DNA, 744 bp, Aedes aegypti
atgggcagtcgagtgtatgcaggaaaactaccgcacgatacacgggaacgtgatcttgagagatttttcgaaggatttggacggatcagggaaatcctccttcggcgtggatatgcatttgtggagtttgacgactaccgggatgcagaagatgccatttacgagttgaacggtgcaaagttgctgggtcagaggatcgtggttgaggccaccaagagaccacctcgattcggcggatcaagcaaccgtccgaaaccgccgcaaagaacttatcatcgtttgatcgttgagaatttatcgtcccgcatcgattggcgagaactcaaggcatatatgcggaaagcgggcaatgtaacctttgcggatgctcatcgagatagaatgaacgaaggagttgtggaatttgccagccggcacgacatgaagcaggcgttgaaaatgtttgacgacaccgagctaaacggaagatacatccggttgtatgaagaacgtggtagatcccgcagtagaagcagaagtagtagcagttccaagtcacgatcgcggtcgagatctcgcagtcgttcccgtggatatcaatcgaagtctcgttcggtgaagagttatcgtcgatcgaggtctcgcacggcatcggaggagagtcgcagtcgatcacggtcagtgtccgagtcaaagcattctggacgaagctaccgatcggaacggtccagtggcagatcatctagacgtacagaacgttcttaa

SEQ ID NO: 690 - DNA, 2789 bp, Aedes aegypti
agccccaagcgggttgagattccgcgcgcgaatgagcaagagagaaaagcagcacgcgcttggattggaacaacaacccagaagccagaagccaactcaacccactggggctgggggaaaaaagttgctaaacggttcacgccgcaccagttagttcccggacacggcattaagcggttcgatttcaagaggctgattcgtgcgtggggggattcgcgtttctcagttttggcgttgtttatgcttggtgctgtttttttgttcccgcaaaacttctcgaggttcgttggttcccgcgacagattcttcaattcgttcgcactcggaacggtttgtttacaccaagcgaccaatcgcggatattagacggggttgttctgtgcatgcaacgttgtggaaatagactcgccatgaaatatagcgaaaagtgaagcaaaactagggaacggcagttagattccgatatatggaaaccgagcttgtgaggcggttattggaggcttgagaaactggaccgaggagggcaaagagtggtgatacaaaagcaaccagttattacgacgaagggcttagtgattgagtgcaccaacaagagtggaggaaactaaggtattggcggaaaaattgacggagaaaacggagctccccagtctgtggtggatgaccgcggttcatggagaggcctgatgaaaaatggcaaattacacgaatgattacttcttcacgatggacactgatgatgtggagtcgtcgagcagcagtaccatgtccagcctgaacagtctgttctcgttcaccagtccggcagtgaagaaactgctcggctggaagcagggcgacgaggaggaaaaatgggccgaaaaagccgtcgacagtttggtcaagaagctcaagaagcggaaaggtgccatcgaggagctggagcgggccctgtcctgtcccgggcagccgtccaagtgtgtcaccattccccgctcgctcgacgggcggttacaggtatcccaccgaaaaggacttccacatgtcatctactgccgcgtctggcgctggccagatctgcagagccaccacgagctgaaaccgatcgaaacgtgtcagtatccgtttagcgccaagcagaaagaggtctgcatcaacccgtatcactacaaacgcgtcgaaagtccggtccttccgccggtgctggttccgcgccactcggaattcgcccccggccactcgctgctgccattccaccagatgaacgaacccaacatgccgcacaacgtgagctacaccaactccggtttcaacaattcgcacatgggcggaggcggacccaattcgcccatttcctcgcacatgggcccgaacagtcccatctcctcggtgtccagtccgggaccgatcaactcgaatcctcagagcccgtacggttcattacctgaaacgcctcctccggcatacagtcctccggaagatgggaacaacgtcagcagccaggacaacaaccagatggataccaatcagatgcatggcgaggtagccccagttagctaccaggaacctccctactgggctagtatagcatactatgagctgaactgccgagtcggtgaagtgttccattgcaattcaacctccgtcatcgtggatggctttaccaacccttccaacaactcggaccggttctgcctcggtcagctgagcaacgtcaaccgcaacagtacaatcgaaaacacacgtcgtcatatcggaaagggagtgcacctgtattacgttggaggtgaagtgtacgccgagtgcctctcggattcggccatcttcgtgcagagccgcaactgcaatcaccaccacgggttccatcccagcacggtgtgcaaaatcccgcccggctgttcgctgaagattttcaacaatcaggaattcgcccagcttctgtcccaatcggtgaaccacgggttcgaggcggtgtacgagctgaccaagatgtgcacgatacgaatgagcttcgtcaagggttggggcgccgaataccaccgacaggatgtgacctccacgccctgctggatcgagattcacctgcacgggccgctgcagtggctggacaaggtcctgatccagatgggatcgccccacaatgcaatcagctcggtgtcgtaaggcggaagtgggaaatgggaatgaacgagacattggatggggatgaatgagtgcactttggttgcaatgcgtgtggggacgaggattataaactgatttaatttttagcgaacgcctgttcggatgtgtgagcaatcgatacgaggagaaatcggagccgtttggaggagaaggaacgatagcagttgtgcaagtatgagatgtgcgtgggaatgttctaaagacaaggttcgctcttctttttaagcacccacaatttgtacacgttatagacggaggtagtttttaagcgataatgatagtgtagtgacatttattttttaaagtaatgatttcatatttactattagtaacgatcaagtgatttgctgtcggtagtggtaggtgcgtaagattgcaaaattttacgcggtcataaaaacaatctattttcggacaaagtttgcaaacagaaaacaaatcttcccaaatttgatataaaagtatttttttcctcaaatgtgcaatttttccaaacaaaaaataaaacagtttgccattattgtttcgttgcagttgaatggaaagcttaacgatataatcaaaatttataagatttatctataaaatagtgtagcagaatatattttaatacaagtgcttctttt

SEQ ID NO: 691 - DNA, 762 bp, Aedes aegypti
gtcagaacctttttttgtggcgacgatttggtgaaacttttttgtttgttctattataaaatactgatggaaacggtgagcggacatcagttaatcggttaccgtggagctgtgaatagaggtttcattgaattaaaatgttcaaatttgttttggcggggtttgccttggtggcggtggccagtgccttcgaggaacatgaattcgttagcgaagtgaagcatatcccgtacaagtggtacggtggtatgcagggaggaatcggcggtggcatgggaggaatgggtggtggaattggcggtggaatggaaggaggatggaaggaaggcggtgaggactactactcgtatccgaagtacaagtttgaatatggagtgaaggacatccacaccggtgatcacaagagccaatgggagatgcgcgatggagatgtcgtcaagggagagtacactctggatgaggctgatggatcgaagcgtattgttgagtactatgctgacggaaagaatggtttcgaagccaaggtgaagaatatcggcggaggcggtatgggaggaggaatgggaggtggcatgggaggtggattcgaaggcggctaccatggaatgggatatagctacagcaagctgaagaagtacaattgatgcaattagaatctatgttgactgactgaaatgtgatacgctaattcgatacaaatatactagtatgcacctaatcgaaactatgtcttttatttatttgagattggaagtgataaca

SEQ ID NO: 692 - DNA, 621 bp, Aedes aegypti
atgctgttgatgatgatggtgatgaatagtttgctcattgccgtcacgcttcagtttgtgagtcacagttttctggactatcacgaccccacaattgaggactcgtaccaacagcaggccgtcatcgatggcgaagcggccctgctggacatactggacactgccggtcaggtggaattcaccgccatgagggatcagtatatgcgatgcggcgaggggttcattatctgctactcggttaccgatcgacacagcttccaggaggcgtccgagtataggaagctgattgcacgagttcggctcaccgaggacattccgttagtgctagttgccaacaagttggacctgcagtcgcaacggaaggtttctactgaggaaggcaaaactttggccaaacagtttggttgtcctttctatgaaacttcagctgctttgcgacactacatcgatgaggcgtttttctcactggttcgggagattcgaaggaaagaggaacaaagggatctcaacggtggttccagttcggagaagctacactcccgacggcgtagccgctggtggcggctgcgatccatttttgcgttggttttccgacgtcgtcgcaaccccatcgggaactaa

SEQ ID NO: 693 - DNA, 1152 bp, Aedes aegypti
atgactgacagcgccgaaagcacaaccacccccaccactgaagctgctcccatttctgctgcatcagctgatgacgatgatgacaacattactgacccaacattgccacctcttgatgacacccacagcagtgatccagtgagggagaactccgcaaccactagtggagatagtgatttagctacttccatcgctgacatgtccgaaagtccccagaaatccgataccctgctcacggattcggagaacaccaacaacgaaaatcgggtgatcgaaatggaaagtgcttcgaatccggcaccgacgaaaagtagtgatgaaccaccctcggtaaaagtggatgaaccggaatcttgtgcgaagaatgataacgaagatcattccgaagacaaacacgcgaagcatgtttcttacgacgagcaaggggaagcaatttataccgatccggaaactaagtatcgctacaagtggtccaaggcgaagaatgagtgggttccgttcgatagtgaacattaccggtggtgtgaggaaagtgaaaagtggattcccaaagagaatccaaaagaaacggaacactatcggtggtgtgaagaaacgaatcagtggattccgaagcagcagatttcggaagagggtagtgtttatagcaatgaagaaggggtgcaccattatagggacaaggaaggaatggtgcacttttgggatgaagagaaaaaagcatggttcccaaaagttgatgacgatttcatggctaggtatcaattgaattacgggtttgggaacgatagtgcttctggaaatgaaaatgttgaaggttcaacaaatgaggaagaacctccggaggttccagaacaagaaccattgccggaagagcaggttacccagcctcagggtaaaaagcggaaaggtcctccggaaccgcccaagtggttcgagatgaagccggaacacaatacgaaagtatacgtatccaatcttccgttggacattacggaggaagagttcggtgaactgatgtccaagtgtgggatggtgctgaaggatccccggacgaacaagctgaagctgaaactgtaccgcgattccaatggggcactgaaaggcgatggtctatgccattacatcaaggtgagatttattgggattgtctaa

SEQ ID NO: 694 - DNA, 942 bp, Aedes aegypti
atggatttgcctcgaattgtgacggttgttagcttgttgcttccggccatccaagcggcaaccgttccagtggatcagactttgatgttcaaagagatcgattcattgctgagacggtgtccttgcgtaccgatcaacacctgctacagccaaggggtcagcttgaacgagcagaacttcctgaacaccaacttcgagtgtgaggatcacacgtacaatcattgctgtggaccgtattatcaaacggttgggaacgaagacttctatttcgatgaaaacggattcgatcggcaaggtgcctggaggaaacctccagatttgatgtcttcaaacattatgataatgttaccaccggaaccaacgacggaaagtccggaatcgctcaccaaagtacacttagtctatccggaaacgactccgaagccgactacggaaagtatcgaggaaaccacacccgaagtcactacccaagaaccttttaaagattatgttgagactacgccaatggacgaggacacaacaacggaactagtcacaactacaaccccgtcgacaacctcggaaccatcatcgactactagcaggacaaccctgtccccgcaagagcaacgcctcgcaagattacagaatcgaccaccgtacccgacaagggtcagatctacaagactatcgacaaccacaactaccacttccacaacgaccacaacggaggcttcgacgactccaaggttttccaccatcaaaccagtcttccatccaaattcacgccacagacaggccatgaacaagttgaggctattcgtcaaaacttcgaccaccccatcctccgctgagtacgacgatgattacgacgacgacgaagatgacgatgaggacgacggtggaactagaattagggataccaatacggccgaggaagacgagggcgaagacgaactgtaa

SEQ ID NO: 695 - DNA, 1593 bp, Aedes aegypti
atgcattgcaccatttgctatgaaacggacgaaaaattaacggcgattgaagtcgatttaaccacacaacaccatctatgcaaccgatgtctgacagacctattcacagcggagttcgagagtgatagcgaagattccgatataaattttgagatcaaacacgatccaacattagaaaacgaattacatgaagatcaagaattgatcgaaggcgacgagtccttcgacgatgatattagcataaagtcagaatcgctagcactgcccgatggtacctattctaactcgaatgtgactcaagatgatacctctgcgttactggacgaaaagcctagtgtaatttctctagaaagcttgaaggttgagtgctcgttttgtggcgaacgcagtgtcaataggaaaactttggcggatcacatgcgagcatgtcatccggaggagaaagtcaatcgatgcctcatttgtcgattatttttcagaggagttcagcagtacgaagaacacattcgagatgatcatggtgggtttagtcaaagatgcgatatctgcttggaagggtacgtacgagatgaacagtggaagcataggactaactgcttgggacggttggtatttgaatgcgttgaatgtgaagaaaggttcatatctagagaaggatttgagaaacatgtttctaatcatcagaacagtgaggatcgcaaacgatctacatataaggaacgaagaatacatgaacatgttttcacctgtgcattgtgtgaagacgacaaaacctatgaagagaacatctattggaatcacgttcatgaaattcacgacggccatcacttgcggtgtccacattgtgccaaaacgttccgcaatcggaagcacttgatcgtacacaccggatcgcgatgtaaagtcagcgcaacagctcgccaaaaatctgccgaaatcaacgaacatgaaccttccaagtgcgacctgtgctcgaaaacgtttcgtaaccgtgcgctcttgaagaatcacgtggccaagatccacaaagccaaggcggccgtttgcgatctctgtgggttgagttttgccaacagggcccagatgcgataccatcagaagaagtcccacaccgaacctgcggaaaaatgtccccattgtacaaaacggttccatcttgcggcggatcttcgacagcacctgacaactcatgaaatgacaggaaaatttgtctgtgaagaatgcggtcgagtattcaagcggaaagtcggtctcgaactgcacgtcaaatcgcaccagagaaataatggccagctgaaccaacgaatggtcccaggatcaaccggaaggcatgcttgtgaactttgcgatcgcaggttcaaacacaattacattcttgtagcacacatgaaaacgcacgatccggatcgagtgttggagaagaaattcgcctgtaaggaatgtgataagaaatttgcaactagcgcggggttatattgtcatctgaagggcaaatatgttcatcagaagatgacctgcccggtgtgtaatgcaattataaaaggaaaggaacggtatgcagtgcatttagctgcacattccgatcaaagctaa

SEQ ID NO: 696 - DNA, 1374 bp, Aedes aegypti
attccaaacattaagtttgttttaactggtacggtgaacgtttcacaaacagttgattttatgtcgaacaatatgaatcttagggctagaaactatttaaagctatttgagcagtccataccaaacagtaacagtatctggtagagtccaaatagtgttgaacaatttataatcaaaactcaacagaaattggaaacaacagtctgcggaatggtttcgtgcttatatttcgataactcactatcacaagcgtgtttcactatatgttacttttttctaacagtttggcatactgttgcacgtattggtatttgtatgcgacgaattaagcaacatttgtggtacacgcttcaaaaaattgtcacgaaggccacgtgagtatcgtattgttagcagaattcttttaatttttcacgcaaattaacgttaattacagaaacgtaaagcaataacatcttggcttaaaaaatatcttgctctcatttccttttacttggaaatgtgtgaaaatgtgggaccagtttttttccgctaagttacacacagctgcttgcaattttttaagagtgtgtctctttgcacaagcacaccgatagaagaaaaaaaatgcaaaaacgattccgaaaatttgcagcaaaacaaggattcatcaacgcgatttaatagtgaaattagtgtcgtttgcatctgctcataatgcgctatcaatgtcgtcatcaattaggacgcgatgcggcaaaaagccaatcaagaatgctgctgcaaaacatggcaagccgttgtcgttactgtcggagcaagggtcgatttactacgactctaggtcaaagtggccatcggaagaacagcttcaaacattgctgccttctatcctcagcaaaccggacaacaatccagtgatccccgaaagccgcttcggattcgtctcctgtggtaaccgtatagcatcccggagaacaaaccaaatatcaaaaggtgcccaaagaccatccctaaaacgaatgtaattctgtcgaacagctgcttccagtgtgagactgataaagagagtggtctagaataaatgtttcatgtaacaatatttgattcaaacctcataaataaaaaaataaatttatttatgctgttaatgcgcttctgaattgcatggatgaaagtatcttttgaataaattatcaaaataaatgagacaaataaattaaaggggacccagggaggtttttttttgcatattctccaaccattacttaaccgttcgccagacagtaggggattgaaaaaatggattatatttcaacaatttgggatactattcattgaaaattttgttcgagaaaatgacgatttttttatagttacataacttaaccgcct

SEQ ID NO: 697 - DNA, 972 bp, Aedes aegypti
aacaaataaacgtgttcggttcggaatcgacgtcgtaccgcggaataaatcagtttttcccgtagaattcgggttatttccgctgtagttccacacaaatcgaggaaatggaaaagtacgccgtccctaacaaactcccggccgaggagattagcattttggcacagcgcaaagcccgtatcaagcgcgaaaccgatcaatgggttcggaagccgctgccggagaaccgcaaaaagaagttctgcaaacctgagctgtttattgccgattaccgcaaggccgagcgtgattcgatgcggatcaagaggaacttcttgaagaccggtgtacagctgaaggacgatgggattgaacacggacggttgatcttggtgttccgccatcggggtaagttcatttccaacaaggaagtgatgcacatcctggccaagctgggcttgccgtacaagcggagggcggtcctgctgaagctcaccgagggcgtccacgccatgctgaagatggtggaaccgtggattatctggggctacccgaacatcgccacggttcgcgagctggtctacaaatatggcctgttcaagccggaacagggcgagaagggaccgaagaagattccgatcgcgtcgaacaaacaggtcgaggagaagtttggtcacctgggaatcatctgtgtggaagatttgctgcacgagttgctgacggtgggcaaaaatttcaacaaggttacgaagattctgcacactttcgagctgaggtcaccggtggacggatggaaaacggcccggaagggaaagctgcgggcgttgggtggcgaggccggttttcgaggggatgaaataaacgagttcttcaagaggttgctgtgaggcggaactcggtcttaggtatgtaagttacggcgtttagttattaagattcatcttctccttgattctgtgtaaagtttaatacaaatttactttgtaaagcaaa

SEQ ID NO: 698 - DNA, 1118 bp, Aedes aegypti
ccatcaccagcgatagaaatcagttttagcataaattaagaaatttgtcgggaaattagcgaaaattcgtaccaaaatgacgttgaaacaaaactccgttcagaacaacatgtcgtttgacccatttaatgagcctctgctggctactgggggctacgaccacaccatcaagctgtggcaaccgtattcggggctgtgtcagcgaacccttcagcacgcggattcgcaagtaaacgccctggacatcatcccgaacggaacgattctggcggcgggtggctatcagcacattcgcctctacgacatgaactacaactatccgatgatcaacttcgaaagcgtcaccaaaaacgtgacccgcgtggggttccaggaggacggcaagtggattttcaccggtggcgaggattgccgggtgcgaatctgggacatgagctcaccaaatccggcctgcaagaggatgttcgattgcctaacgccggtcaatgcggtgtgtttgcatccgaaccaggtcgagttggccatcggaagccaagggggaagcgtgtatctgtgggacgtaaaatccgacgtccacgaacagttgataccggaggtggaagcgtccatacaggacattgccatcagtcccaatgggcagtacatggccgcggtgaacaacaagggcaactgctacatctggagtttgtccaatagcattaacagtgagacgcagcttacgcaaacggatcccaaattgcggatagaggcccacaagaagtacgccttgcggtgtaagtttagtccggattcgagcttgctggtgacctgttccggggatggaacggcacgaatctataggacggatacgttccaactgcatgcggaactgaaaatcgagaagtattggatgtgggacgcggtgtttaccaacgattccaagtacttgttcactgcatcatctgacggacacgcacgattatggaagatcgaaaccaaatctatcgaacgagaataccacgggcatttgaaagcaattacagcccttgccttcagagacggttcggcgaaaacctagatcaccaacaaattgcagaatatacaaactagttttaaggtataatgtaataaatctatac

SEQ ID NO: 699 - DNA, 1209 bp, Aedes aegypti
atgatatccgggaaatcgttcaggcgcatgaacagttattatttagtgcggctggtgctactatcgttttatgtcttatcggttttgatgggatttactgtacaaatttacgacaaatctaaaggcaaagtttatacatcgaaaatattcgcgttttacagcatttctctatcggttataatgattattcattataaatcttctgatctattattcagtagaagtgatgaacaaagcatggttgcaaaggcagtcagtggtattgaggcgaccttactaatcaatgttatgctgataggaactattaggagatacataacgaggcgcaattctgaagagctgttcgatgactttatgcgtgttcaaaaatctatcaattacactccagtggatttgtatcgaatacttaatatgaaagcacttaaaatggtgatgattggcatcattttgttgacaatctctattgtgtttataactattcacaaacttgaaaccgaaagcgaactgtggataattttcgatgtgttcacgacgatgtatccaaaggctttgattgttaatcttgcctcatggtattatttggaggtactgtatgtgcgacgttatctagaactggtgaatgacatgctgaacaatctacaccataaaatagctcgtgagcttcacattatacgattcggaaagtgctctacgaaatattcttaccagctgctccgaattatgatgatacgcagtcaaataattacccttgcatcgagactaaacaagttttttagtcttcaaatgctaactgtttttacgctgatttctgtgttggttctcagtcagatgtattctttattcctcagtgtttaccgtttgaacagcaattccagcagtgggatgttgtatagagatctaacaattcttttcgtttttatgctggtttcttatgaagcatattgcatagccgatgtgtgtgagttggcaacggaagagtctaacaaaacatcagaaatcttgcatcggtacaattcgttgcacatggacgcacaactaaagcaaacggttgagatgttcctgattcaattgatgcatcatccaatcaaattcaccgcctgtggaatgttcacgttagactattcggtattgttctcgataataacgtcggccactagttatctgattatcctcattcagttcgagttggccgataactgtaggaagggt

SEQ ID NO: 700 - DNA, 6060 bp, Aedes aegypti
atgcctaagccagtggtacaggttggtggcgaccccgatccctccgaatggctcttcatttcggaggagatgaaacgaattgatcagagcaagccttacgatgccaaaaaggcctgctgggttccagatgaagccgaaggctatcttcttggtgaaatcaaagcaaccaagggtgaattggtgaccgttgccctacccggtggtgagacaaaggatttcaagaaggatctggtaggccaggtgaatccccccaaatacgaaaaatgcgaggatatgtcgaatttaacctacctcaacgatgcctctgtgttacataacttgagagaacgatacagggctaggctgatctatacctactccggactgttctgcattgtcatcaacccctacaaacgctggccgttgtacacgttgcgagtcgccaaaatgtatcgtggtaaacgtcgtaatgaagttccgccccatttgttcgccatttctgacggtgcctacgttaacatgctgacgaacaaggaaaaccaatctatgttgattaccggcgagtctggtgcaggaaaaactgaaaacacaaagaaggtcattgcgtactttgccaccattggtgcgagtaaaaaggataccgaaggaaagccgtccctggaagatcaggtcgtccagaccaatcccgtactggaagcctacggtaacgcaaagaccgtccgtaatgataactcctctcgtttcggtaaattcattcgtattcacttcactgcatccggaaagctggctggtgctgatattgagacatatttgctggaaaaggcccgtgtcatttcccagcaaacgttggagcgttcttatcacattttctatcaaatgatgtccggatctgtaaaaggattgaaagatatgtgcttgctatccaatgatatctacgattaccacaatgtcgctcagggtaaagtcactattccgaatgtcgatgatggagaggaatgtaggctgaccgatgaagccttcgatatcttaggtttcacccaggaagaaaaggacaatatctacaaaattactgcagctgtcatgcacatgggtggtatgaagttcaagcagaagggtcgtgaggaacaggcggaagccgatggcatagaagaaggtgaccgagtcgctaaactgctgggttgcgttacggatgatctgtacaaaaacttgctcaaacccaggatcaaagtcggcacagaatacgtcacgaaaggtcagaacaaagatcaggtctacaatgccgtcggtgctctttgcaaaggtatcttcgatcgtctgttcaagtggctggtcaaaaagtgtaacgaaacgctggacacgaagcagaagcgtgcccaattcattggtgtactggatattgctggtttcgaaattttcgacttcaacggtttcgagcagctctgtattaacttcaccaacgagaaactgcaacagttcttcaaccatcacatgtttgtcctggaacaggaagagtacaaaaaagagggcattaactgggcgttcatcgatttcggtatggatttgctggcttgtattgagctgattgagaagcctatgggtatcctgtccatccttgaggaagaatctatgttcccgaaggcaaccgatcaaacattcgccgagaagctgatgaacaaccatttgggcaagtctcccccgttcatgaagcccaggccaccgaagccaggtattcctgccggtcatttcgccatcggccattacgccggtgtagtgtcatacaatatcacgggctggctcgaaaagaataaggatcctttgaacgacacggtcgttgaacagttcaagaagggtgaaaacgccctgttggttgaaatcttctcggaagctgcaccagtcgtggccgaaggagctccaccagcgaagggtggtggccgtggtaagaaaggtgccgcctttgccacagtgtcatcggcttacaaggaacagttgaacaacctgatgaacactttgatgtccacctcgcctcactttgtccgttgtattattcccaatgaactcaagcagaccggtcttattgacgctaaattggttatgcatcaactgacctgtaacggtgtgcttgaaggtattcgtatttgtcgtaaaggattccccaacagaatgatgtattctgatttcaagcagcgatacctcatcttggctccagctgccatgcaagctgaagcagaacctaagaaagctgcggaaaaatgtttcgaagccatccagctggatcccgattcgtaccgtatcggtcatacgaaggtattcttccgcgccggtgtactgggtcagatggaagatttccgtgaccagcgtttgtccaagattatgtcctggttgcagtcctggtgtcgtggctatttgactcgtatagagttcaaaaagatgcagtcacaacgtaccgctttggaagtcgtacaacgtaatctacgcaaatacctaaaacttcgtacctgggcttggtggaaactatggcagaaagtcaaacctctgctgaacgtttcccgcgttgaggaccaaattgctaaactcgaagaaaaagcacagaaagccaccgaagcatttgaaaaggaagaaaaactccgcaaagaactggaagccttgaacagcaaactgctggccgaaaagactgctctgttggactccctctctggtgaaaagggagcgctacaggaataccaagagaaggccgcgaaattaaccgcccaaaagaacgacctcgagaaccaactccgtgatactcaagaacgcttggctcaagaagaagatgcccgtaatcaacttttccagaccaagaaaaaacttgagcaggaaatttccggtcagaagaaagatgcggaagatcttgagttgcaaattcaaaagattgaacaagacaaagcttccaaggaccatcaaattcgaaatttgaacgatgaaatagcgcatcaagatgaactgatcaataagctgaacaaggaaaagaaaatgcaaggggaagtgaaccagaaaaccgcggaagaactacaggcagcagaggataaagtcaatcatttgaataaagttaaagccaagctggaacagacccttgatgagctggaagattcattggaacgtgagaagaaactacgtggagatgtcgaaaaagccaaacgtaaagttgaaggtgatcttaagttgactcaagaagctgtttccgatcttgaacgcaacaagaaagaaatggatcagacaatcatgcgaaaggacaaggaaatctctgcactgtctgccaaactggaagatgaacaaaatctagttggaaagcttcaaaagcaaatcaaagaactgcagggtcgcattgaagagctcgaagaagaagttgaagcggaacgtcaagcacgtgcaaaggctgagaagcagcgtgcagatttggctcgggaacttgaggaactgggtgagcgtctggaggaagccggcggcgctacctctgctcagattgaactgaacaaaaaacgtgaagctgaactcgccaagttgcgccgtgatttggaggaagccaacatacagcatgaaggtaccttggctaaccttcgtaagaagcacaacgacgctgttgctgaaatggctgaacaagttgatcagctgaacaaactgaaaacaaaagcggaacacgatcgtgccaacatgtataacgagctcaacaacactcgatcagcatgtgatcagctatctcgtgaaaaggctgcccaagaaaagatcgccaagcaactgcagcatactttgaacgaagtacaaggaaagctagacgaaactaatcgtactttgaatgacttcgatgcagctaagaagaagctatctattgagaactccgatctgcttcgtcaactagaggatgcagagtcgcaggtttcgcagctcagcaagatcaagatctcgctaacgcagcaactcgaggacactaaacgtttagctgacgaagaagcacgagagcgcgccaccctccttggtaaattccgaaacttggaacacgaccttgataatctccgggaacaggttgaggaagaagcggaaggtaagggagatattcaacggcagctcagcaaagccaacgctgaagctcaactgtggcgcagcaagtatgaatccgaaggagttgctcgtgccgaggagctggaggaagccaagagaaaacttcaagctcgccttgctgaagcggaggaaaccatcgaatcccttaatcagaagtgtgttgctctggagaaaactaagcaacgtctatctactgaggtggaagatctgcagcttgaagtggaccgagctacatccatagcaaatgcggcagagaagaaacaaaaagcatttgataaaattattggagaatggaagcttaaggtcgacgatctggctgccgagttggatgcttctcaaaaagaatgccgtaattattccactgaactcttccgacttaagggtgcttatgaagaaggtcaagaacaacttgaagctgttcgtcgagaaaacaagaacttagccgatgaagtcaaggatcttctagatcaaattggtgaaggtggtagaaacattcatgagattgaaaaatctcggaaacgattggaggctgagaaggatgaactacaggcggctctcgaagaagctgaagctgcgttggaacaggaagaaaacaaggtgctgcgagcacaactggaactatcccaggtgcgacaggaaatcgaccggcgtattcaagaaaaggaagaagaattcgaaaatacgcgtaagaatcatcaacgcgcccttgattccatgcaagcttcgctagaagctgaagccaaaggaaaagcagaggcgttgcgcatgaagaagaagctggaagctgatatcaatgagcttgaaattgctttggaccatgcaaataaggcaaatgcagaggcacaaaagaacattaaacgttatcaacaacaactgaaggatctccagggtgcccttgaagaggaacagagggcacgcgatgatgctcgagaacaactcggaatctctgagcgccgagcaaatgcactgcaaaacgagctggaagaatctcgaacattacttgagcaggctgaccgaggccgtcgccaagctgaacaggaactcagtgacgctcacgagcagcttaacgaagtatctgggcaaaacgcatcaattggtgccgccaaaaggaaacttgagtctgaattgcaaacattacactccgatctcgacgagttattaaacgaagccaaaaattccgaagaaaaggccaaaaaagctatggttgatgctgcccgcctagcagatgaactgagagcagaacaagatcatgcccaaacacaagagaagctacgaaaagccctagaacaacagatcaaagaactccaggttcgattagatgacgccgaaacgaatgctcttaagggaggaaagaaagcaatccagaaactagaacagcgcgtgcgtgaaatagaaacggagctagatagcgaacaaaggaggcatgcggatgcgcaaaagaaccttcgaaaatctgagcgtcgtatcaaggaacttaccttccaatcggaagaagaccgtaagaatcatgaacgaatgcaggatcttgtcgacaaactacagcagaagatcaagacatacaagaggcagattgaagaagcagaagaaatagccgcattaaatcttgctaaattccgcaaggcacagcaggaactagaggaagcagaagagcgagctgacctcgccgaacaagcagcgactaaattccgctcaaaaggaggacgaggagggtcagcgcagcgaggaggaagtccagcattaagtacagtataaatgtcagtggtgtgtcaaatcaaccgttcaatcgtcagcagacgaatgtagcagcattaatgcaaaaccagttgcatggtatgaagattccgtttttttacgatgagctatttataggatgacaatacgatacattgagtgacgaaggtatatctatttattagatataatgtaaaaacatttataattagttttataaataagagatgcgaatatataagagacgtgcataataat

SEQ ID NO: 701 - DNA, 406 bp, Aedes aegypti
gttcaaaaatcgccagtactggcgccagcacatccggctgcacgtggtcggcgaggtgaaatgcgaaatctgcggccgaatgacgccgaaccgggtggcctaccggtcgcacaagaagaacgcccacggagaccggaaccacaagtgcgaatggtgcggcaagagcttcactaaggccctaaccctacgggagcacgtggcttcgcggcataccggggccacactctattcgtgtagtttctgtccgaaaacgttcaactcgaatgcgaacatgcactcgcaccagaagaagatgcacccggtcgagtggctcgcggcgaaaacgagcaaggagactagcaaggcgaaagcgcgggaaccagggtcgggggaggtggaatccgaggacgattcgatcgatacttaa

SEQ ID NO: 702 - DNA, 1176 bp, Aedes aegypti
atgctttggctaatttggtgcgtgcttttcggcagcttacgactcggctcgacctacagtgccgtcttgcaaaatgaaacggagtttgatctagcggaaggacaccgacaaggaaggctgtttcctttctacacaattggtcgcatagcaaatgttccttgtctggccagcaatggtttgaaagggacttgtttgattcgaggcgaatgtgcggataaccagggaattttcggaggcagttgcagtactctcacaacgcaagcgacctgttgtatttttagcagaacatgtggagggtcgaccaacctgaatagcacctatttcacgaaccccggatatcctggctcatacaatggtggaggaacatgtacatttaccataactccatgcagctcttcggtctgtcagctaagaatcgactttcgatcactgaacctagcgcaaccgaatggcgaaggaaactgcctcacagatgtattgacaattactggtggaagttcagaagtcccttcgatctgtggtgaaaacacaggccaacacgtgtacattaacttttccgaactgaacccaattactattagggtgagtaccacggctggatccctcgtcgaccggatgtggaacttgcagttatctcaaatttcttgtgcatcagagtttcgagctcccgaaggctgcttgcagtactacttggaaccaagtggagtgattagtagctttaattatggattcggagcaaatccgaatctcaattctctgggagccaccggaacaagacagattgccgggcagcggtatggaatttgcattcgagctgcacctgaccggtgcacaatcacatatagtttgccatctacagatggatcctacgctttcaccgtatcgggcgatgccgaagttcttgaccctaccctgatcggaatgggagttttcggtgagaatggtgatatttgcacaacggactatgtggtgataccgagtccggttgttaccgatgtcaatgcagcgggagcagtgtttaccgaccgattctgtggtcttgggctgttctctgtaacaagtcaagtgaaaccattcgtggtttacgtagtgtgggatgataacgaaatacctgatgtcgcaaacagaggatttcgactcgcatattcacagaatgcttgtacgttaggcgcttga

SEQ ID NO: 703 - DNA, 948 bp, Aedes aegypti
gattattcacagcccaaagcggtattcttcacctgcatggacagtcgaatgatccccacccgatacaccgacacccacgtgggagacatgtttgtgatacgtaacgccggcaacctggtgccacatgccgagcactttcaggatgagtacttcagctgtgaaccggccggtctggaactgggctgcgttgtgaacaacatcaaacatatcattgtgtgcggccacagtgactgcaaagccatgaatctgctctaccaactgagggatccggaattttcatcgagaaaaaaccgccggatatctccgcttcgagcctggctttgcgagcatgccaacaccagtttggaaaagttccaaaatcttcggcaggtcgggctggacaaaccgttgatattctcttcggaaacgccgctgcgcaagtttgtggcctacatcgatccggagaaccagttcgccctggaggacaaactgtcccaggtgaacaccctgcagcagatcgaaaacgtggcttcgtacgggttcctgaagaaacggctcgaatcgcacgatctgcacatccacgccctgtggttcgacatttatacgggtgacatttattactttagtcgtaactcgaagagattcattccgatcgatgagaccagcatcgagcaactgctggatgaagtgcggcggtactattcttaggatgtaagagggatgcatcatgtgagatagggtgacaagtgtaggatgttacaattgtgtgattttatatggatttttttgtatagatattgtatagataaagtgcctagaatgtaaattgtggtatatgtagtgaagtaattttcatatttttggtagtgcagatcaatgatacaaacatcgatagcgcaggaggtatgcccgaagattttgtatgtttttttatatatttttgttacaataaaatatattgaatcaaat

SEQ ID NO: 704 - DNA, 867 bp, Aedes aegypti
atgaacgggctaagctttagtgagttgtgttgtttgttctgttgtccgccctgtccgggccggattgcgtccaagttggcattcttgcccccggaagcgagctatgatctgaaggcggacgatgccgccaatagtaaatttacgctgaatctgctggatcgggccgactggcagtacggcgaccgggagaaggagtgcttcgaggcgttctttgcccggtcctccaggggaaaccgaatcgcctgcctgttcgtcaagtgcagcaccaatgccagattcacactgctgttctcccacggcaacgcagtggatttgggtcagatgacgagcttcttcatcggactaggccagcggataaattgcaatatctttagctacgactactcgggatacggtatgagtaccggaaaaccaacggagaagaatctatacgccgacatcgatgcggcgtggcacgcgttgcggacgcgctacggcattagcccggagaatatcatcctctacggacagagtatagggacggtgccgacggtggatctagcaagccggtacgaggttggcgctgtcattctgcactcaccactgatgtccggcatgcgggtagcgttcccggcgacgaaaaggacctggttcttcgatgcttttcccagtatcgacaaagtacccaaagtgacctcaccggtactggtgatacacggcaccgaggacgaagtgattgacttttcccacggaatgaccatctacgaaaagtgtccccgagcggtggagcccctgtgggtcgaaggggccggacacaacgacgtggaaatgtacagccaatatctcgagcgactgaagcaatttgtatcggtggaactggttaactga

SEQ ID NO: 705 - DNA, 1218 bp, Aedes aegypti
atgccatccaccgtcaatccagccgttcccgctgccagcgcatccatgctgccccatgatagcaatagccacaacaacagtctcaacaatagtaaacgaagcaacacttccgctcgcagcagtggaaacaccaaggccacggtccacatcaacgggatcgcggttgaccatttccagcagaactcggacgtcgacgaggatcgcagctcgatggcggcctgtcaaaataacgatatccatggattcatctcctactccagcgatagcaaacaacgaaactcggaatcgtcgttggccatcgctaccagcatgtcttctgccggtggtttgttaagtgagtcaatgacaagaatcgaggaggcttccgctactgccgccacaccgttcaacaaagaaggtaaaaatgatccgaatcggcttcaacgaagacatagcgaaaccgttgagcgccggtctattggcattcaacacggattgaaatccggctatcgcaagaaacaccagcttcgcaagggtaaaacacaagtagaagaaatcatcgtcatttccgatgaattccgaagacaatcactttcggatcagaaggtcagaattcaacgggcaaagaagtactcccaatcgatggaaagcatcgacaagcaagtggacgaacaaacggacaaaattggaggtggagtttttgaatgtctccacctagaaaatgacacgctgacggttgtggtcgacagcaacatcccagtaaatggacataagaagtcaaaatctaaatccgttgacgacatttcgcttagttccaatcacaacgaagaagagtttcctccgaccggcgcactgtccaatgctgccaacagtgtggaactggttttcatctccgatgagtttgtccaacgaaaaacgcgtaccagctccgatgtcataatcgtcgatgcgaacaagaagagtttcaaacggcgaaagtcgaccagcaagaatttgatcatcatcaccgatgactacaaagaaaagtcgtccaccgccaagagcgacgtcaaaatcgtcaagagcaattcgctcaaatcgaaagacccccgccgcaaaacgaccatttccaattccaacagctttctgacctacgaggaaccgttctcgccggaaacgctagagagcaaagacattgggacgatgtttgccgaggcaagtgccgctgctgcgtccgcctcggtaactgcctccaagtag

SEQ ID NO: 706 - DNA, 2307 bp, Aedes aegypti
tcgacgtgtattgttcttgtcccagtaatttgtgtctggggtactggaataccggaggaaccctcgagcgtacgcaaataatcataaactgagattatttaatgtcaagagaccctacctaggtactaccgaaaggcacgtgctcagtgtggtttcatagttggacggtatagtgaaccagaataaaataaaaacaatgatgaatctgagacgagccctctcgaaccctaaaatcctggccattacggtcatcgctctcgtcgcaatagttgccgtcgccatcgctgtgcccctagccgtcaattcaggtgacgaaaatgaccaaaaagctgagaaacagaacgccttcttcgggcgtaccgtcctcgatgaggttccacttatcgatgggcacaatgatttaccgtacaatctgtacagtttcgaacgcaaccgaatcaacgatttcaacctggatcgtgacctgaagctcgatcccacgtggggcaagtccaagagcagccacacggatatcccgcgcttgctggagggcaaagtgggggcacagttttgggtggcgtacgtgtcctgctccacgcagtacaaggatgccgtggagcgtacccttgagcagatcgatgtcatcaaacgcatggtcgctcagtacccgaagtatatgaagtatgtgacgtctgccgatggaattatgcaggcattcaaggagaagaagattggctcgctcattgcagtagagggtggccactcgatggattcccgtttggcgatgctgaggatgttctatgaactgggggtccgttacatgacactgacgcacacgtgtaacactccttgggcggatgcttccccggtcgatggcaacagttcggctgtgttgaagaacgtaaccgagtggggcaagaatgtgatatgggaaatgaatcgtctgggaatgttgatcgacatttcgcacgtgagccatggagtgatggtggatgtgctgaccgaaacgaaggcgcctgttattttcagccactcgtcatcgcataacgtgttcccgcatcatcgcaacgttcaggacgatgtgctgaagatgctgatcgagaacaatggaatcattatggtgaacttttacacctcgtttatcggcgggaacaccattgattacgttttacatcacctgaactacatcaaatccgtaacgggcccggaccacattggcctgggtggcgattacgacggcgtcgatagcaccccggaaggcctcgaggacgtctccaagtatccggatttgttcgatatgctagcgaacggggcctacagcaatggaaccactttcgaagcgtggactcgcgaagatctgcagaagttggctggactcaatttgttgcgcgtgttccgcgaggttgaaaaggttcgcgatacaatggcaaagatcagcccgtatgaagacctgattccgtaccaggagtttgttgatgcaggagtggccgaccaaccctgtatgagcgacatcgacatccacaagagttagtttgggcagtcatcacggattgtttttataattcgatttgtttttaatttgttatcaggctgtttgtagtagttgttacacacttttattatacatagtataatagggggaataaaggtcagatgtccacagctaatgatctagaatacatgtgtcacagattcgatttccatcagatccgcgcatatgtcgtcaatgcgggtaccgatcttcttggccacctccaatttctcattcgccggcagggtcaaaaacgtccaaattagatctccatcgacgacgcaacgtgccgggttgatagggagcttcttgacggttttgattgtgcggaacgctttcgggttcaaaccgcacagatgggggctgtgcgtcatcaggacgttctgcaacatgaacaaccttcggtaggtcttttccggcaggggtagaacatatccgatacctccgtccaaggtagcgaagtacgtcgtatgtttgcattcgtagttgctgttgcgtttgtaatccatttcgtgaaagtcgcactgcacacggaacatggagtttatcttttgtcctacgtgatagtcacattttcgcagcaatcgttgacctccaaaagattcgcgcgattccggttggtacatgtaggtgataatgttgcattgctcgtccgatacgaggaaacccaggttgtggttatccacaacgtattcgatttggaatacgttcaacggctggtaatcacgcgacaccagagacagagtgcggtagtcttcttggaagcgaagtaaactgacggatttgtaaacgtctgc

SEQ ID NO: 707 - DNA, 1737 bp, Aedes aegypti
ttcgttagtccgggacatctcgccagacatggaaggattcacacgggagagaaacccttccagtgcactctttgcgataaggccttcactgaagcgtccagcctgaaggttcatcttagaacccacacgggcgagaagccgtaccggtgcgaactgtgcagctggagcttcgcgcagtcctgcaatcttcagtcgcactaccgccgcagtcatggaccattccagtgttgcgtttgcgaggagccattcttcgatcgggacctgctccttatccacgaggaaactcacgttccggaggctccctttgagtgtcgctactgcaacaccatgtttggggctcttccccacttcagatctcaccagaagaacatcttctcgaagaaaagccttaaatgtgagaagtgtgagaaggtcttcgagaaggaactcaccctgaagaagcacatggacatggttcacccggtcgtctcgagtgtttcctccggtgatgggtcgttcctcctggaagcgctgaaaaccgatgcccgatccctatcccccgcggccacaaagtccggcaagatgccgatctcctcagaagtggaagtgccagaaagcgatgacgattcaagatgtatccttcgccgccctccgatcagctcgaacagatcttctgcggtcaacctgccgccgattattccctccggtccgttccgctgttcgttctgcctgaaagagttcaacgagcacttcggccttcgacaacatatacgtgccatgcactactcggaaaagcgccacaagtgcaaggagtgcaacaaaaagttttccctgggcatcagtttagccattcaccgtcgtgtccacacgtcgatccgcccatttacttgcattgtatgctacaagacattcacccgctcgacggccctgaacggacatctatcctcacattcctacgttcgcgtcaagtgtgccgaatgcggagaagtgcagctcagcgtgtataactacatgaagcacatcgaaaaattccacccggatttcatgcagaatgtggccgcctatcggacccaagcggaaactctaatgcaacgtcgccggcagatcattctggagattacagaaggtctggcaaaacaccgttcggaaattcccaacgtccttgccagacttcgcggagagatcggtccagattccagaagcgctggaccgcgcaaagataacgacgaagacgaagtaagttccagcgagcaggttcaaacgttcaaacgaggcagacccgactccagccagtcggaggaggtcagttccgcatcggaagagcaggaagctcgccggtcaacgatgaaacgcgaatcgctcccggcgttacgtgccgaattacgtaaacgacccctccgaagcaacactgctccagacgagctggatgagtcggttctgcctccgtttagaaagtacgcccgcacgaccacgggcagttcttcgcccaatctgaagcgcctgctggaacagaacagtcccagtccgctcgcttcggcggagaacagtcgcgaggctaccgaacaagggataccaccagcagtgaccgttaaagatgaaccatccaattagaagtggttttatgttaattggatttcctggtaatcataagccgtatatcgggctcaatccctatggcttatatagtgctattggcattatatcagccattaatcaacactttggcccaacatgcggattattggttacctgggtttg

SEQ ID NO: 708 - DNA, 1230 bp, Aedes aegypti
atgagacaaattttcgcatttctagcgttattgctagctctggttcagatttccggtggcactctgacgccatcggatgtcaaggggaaaggtaagaaggtgaaggagctgaaagtgaagcaaggaccacaaccgtccagtgtctttgatcggggtctgattcaggaggaaccatccgccaaggatatcctggtggagagcggtgcatattacgaggagacggcactgaaaaacttcaaggggacggtgttggggtatgtcacaccgtggaataatcatggatatgacgtggccaaaatttggggaggtaaattgaactatgtttcaccggtctggttgcaagtattgcggaaaggaccaaagcaatacgagctgggtggagcgcacgatatcgatgccggctgggtgaaagatgtacagaaggcaggagaggcgatcaataacaaagtcgttccccgcgtcctgttcgacaaattcaccgacaaagatttctcccagcttctgacctacagcgaggagcgcacaatcgccgccaagctgatcctcaacacggtccgaaagtacaaatttgacggaatcgtcctggaggtgtggtcccagctggcagcgcgagtcgacgacgaatacctggtcgggctggtcaaggagatctgcgaaaccctgaccggggctaatttcgattgcattttggttattcctccggcacggaaggaaacctacgatctgttctcgcggcgccattttgaatcgttggttccggtggtgacggccttctcgttgatgacctacgattactcgagcatccagcggccgggtgcttgtgctccgctgtattgggtaaagaacgccgtgcagcacatttgtccggatacggcggaggacgtgaaggagaaacgggcgaagattctgttggggttgaatctgtatgggagcgattacactcccaacggtggacagccgatcgtgagccatgagtatttggccttgctcaaacatttgaagggtcacctgacattcgatgaccatgatgtggagaatttctttgaagtgaaaacttccaatggacggcatatggtattctacccgacgttgttttccatcaacgaacgactcaaattggccaaggacctcggcacaggaatttccctgtgggaattggggcaagggttggactacttctacgatcttttctagtcaagttgaataattttatacctactaataacgaag

SEQ ID NO: 709 - DNA, 694 bp, Aedes aegypti
atgaatgactggataaatcgaaacagcggatggaagcatggcccatctccgtcagagattgctgccacaattgcggctgccaagcaagcatcagctcaggtgttgatcgcccagcagcaggttcaggccgccaaagataacgtgctgaaccaacagaaggtcgccaacgaaaaggaagcatccgctgcctacgcatcgcagaagagcgaggccactgcagccgttcaacgttcggaagccgcggcagcagctcaagctgtggttctagctcaacaccgactggccgccgcaaaggccaatgtggctcatcatcaacgtattgcagcagccaaggaatcgttggccgctcaagcgattcagagttcggcgaaggcagcggctgctgaaattcaccgtgctgaaattgaagctgccaaattagccgcccatcatcgttcggatgctgcttcactcaaccatcacgtcatagccatcaaggatgagtctttcgctccccttactttcggaggtaatcagattcccacgacacagctgtatcgtgcattggccagtccttggaatgatctttcctccgtttcggcacaaaacccgtgggctaatggattctccgttggtggtcagggaaaacctgtctggggttaaaccatatgacgaagaaatgattatgaaataaatgttacacttgatactctct

SEQ ID NO: 710 - DNA, 1227 bp, Aedes aegypti
cttcggcagagcaaccaagcaagccagtggctgcagtttctgaatctctgatcttctgagaaatggcgaccaaagcgccgaattgctgttgaaaattagtgaatttagcgtttttacggaaaaggttcggtacttacaatcgacgtgttgtaacaagcaaagggaaagggataccgaagaaggaagatggagcgctaccaccgccaaactccgctaaaagtcctgaagtccatgtggcttgcgatccgagaatcgaacggacaggaaatcgaacacacccgactggtgaaacagttgcagaagattttcacttcggcgggagatcaaatcgagtcctacgtcacgaatgccgttgtggataacctgatccaggtggtggacaatccgaagcgaccgaaacccaaatcggtctatcactacaccttgccggatataactgatttttcgttcccggaggagcatccggatttctactgctacgagtgccatctggaaggtaacgtgcagaaatgtacggattgtctccgggtgtttcaccgggaatgcgtcaagacgttgaccgagaagcacgccaaattggaggaatacgtgaccaactacaaacgggtgaacatatcggattttgggctggttgcattttcggcacctacggttgctaatgtcgtgacgcctccggtcgatgccaacgagaatcacaccgcgccatcggacgaagttccggcagctaagcttctgttgcgtcgtcccatctcgatggacaccatccagcagaaaattgaggattccaagtacgagcggctggagcagttttgtgcggacattttggacatagctcataacatcggaatcattcatggagcgacctcccttgagtacaacgctgtgatgtacttcgtaacggactgcatctatgatttatttgagattcgtcagtgtccggattgcttccggcactccaatgaaaaggccgaaccggattggtttgcaaggccttgcaatacgcgccatgagcttgtgttcgccaagcataagggctaccagtactggccggcgaaggtcatccgggtggtgaacaacaagtacgatgttcgcttctttggcgataagcactcccgtgccgttgttgacactgcctttgtcaaacccatcgatagtgacttggtgcagttgaaaatcaatcctaaaaagcccggattccagaaatcaatggaagaattgcataagcac

SEQ ID NO: 711 - DNA, 1082 bp, Aedes aegypti
gtcatctcttcccaaggatcactacgcgtacggcaaccagccagcgggacccatcgacgttatgctgaggaatgcgggcattgggccaattattttctcgactacgccggttccggtgcaggtttcgaagaaacgtggccgaaaaccgagaggacatcccaagaggatagtagatttgattggcgacgatgccagttcgacatccgaatcgttagatcaaacctcacagcagagttcaagttacagccctggaactccacatggtcgatcgttcaataatggtcatggcagtgtggagaagcgcaccaccaggcagacagaaaagcggcctctagaacccactgaaagtaacgaaaactccccagcttcatccaagaatttgcgctttgaccaggatgtcctcccgttggatgggtttagctcatcaacgacgatgaccccggttcgaagtagtgaaagtgtgtcccttgggtcgggcacatctgaggaatctctgaaaccacgaagcccgcgcatcaaagcccagttgaagcgacagtattcagatgacgtggtgaagttgaaggcgttgatggacaaaatggacgatattgataagattaagcagctggctgcggatgccctccaggaagatatcaatcgctggcagcaaaaactacgcagtctagtcaaggagtacacttcgcgtcttagtgaagtgaagcagaagcaatggctgcgaacacgagtccatactgcattgctgttggaatacgtcgtattgttcacgggagtgccaggaaaaggattggccgacgcataagaagttgcacaaattcaccaccaagcatcagcattcgtgaaggtgcagcaatctgtaagttatctgctccttttttgaatcgatctctaccataatcgctgtcgacccgtacatttttaatctggtaggtattattactgataaggcagtatctttgttcctattatttgtttatgaattactgcaataccatgaattaagcgcagtatacacgataacaaaggcacatatgaattgcaatgtatcgtttttgttgaaagtcatttgttgaatttaataa

SEQ ID NO: 712 - DNA, 2701 bp, Aedes aegypti
tatgcgtagaacggcagtatatgtatgttattagcttaatttagaaaattaaacagctcgtcctctgttataattttaggtttcgcacgacgataatctaccggatgcggtgtgccctgactgccttaccaggctcgttgatgcatttaccctgaggaagctaatacgcgactcggagagtgcccttcaagccatagcactccggttgaaggccgagaaagctggcgaattgctgatggatccacttcaattggaacctccacccattgaactatcacacccgaaggaacccggggccagtgggggtaaagccacaaaatatcccaccgacgaacaaatcgaaagcatcgaaacgtttgaaacgtacaatgttatcaaactgaggggcgtacgatgttgcggttgtaacgaaattttgccatccaagcaggatttggtcaggcacagtcgtttggagcattcgcatcgagcaggggggtcacaggcgttattccaatgttcaacttgcttcgagcgttttcccaaccgaatgaagctgttgaatcacaacaaaaactacgagtccgatgaaatttaccactgcactgtgtgcgacatcctgttcgacatcaagtaccgcttgttgcagcatcagaatttgagcaaagcgcatcagattgttccggatgcatctacggacggtcaaggcaacgacaactgtaaggggacgaaggagcgaaggcgtaaccagtcgcgaaaacgtgctgcgaaagagttgcactacccggatggggagtttatcttgtcgatcgatgaaactcaggaatatcagatcatccatatggcaggggaacgatgttgcggatgtgggatggtatttcataattatcaggatctgatagatcattgcggagaagtacatccacggaaggatgatgacagcactagctacgagtgcaacttatgctttgaaagattcgaacagatacagtcgtacaaccgacataaaacatccagggtacaaaaagagattttctactgtaagttctgcgacgttgtaatcgatgtaaagtttaggtttgagcagcatttgaaaaccagcgttgcccatcaatcagctgttgagagagcaggcataaaatccaactttcccgttgacgagaaatctatttctgaactgcgtgcgctggagaggaatattgaagtcttggaaatcgatggcgttcgttgctgtggatgtgactttgtatgcaacaccagagaggagctggaagatcattcagaggaaaggcatggatttgaaagagatgtgttgggtaacagcgacgagtttgaatgcgatatctgtttcaaacggttcttgaaattcggattgcttacatttcacaagaacctagctcttcagaaaactttatacaagtgtaagcattgtgatgaacaatctgaaattaaatatcgaatcttgcagcatctcgctgaaaacgtgcaccatatttcggatcaaccagaaccaacttcagagtcagaaccgaaagtgttccactgttgcttcgtgaagtgctcagtgacctttgaagaccctaacgatctgctagaccacgtggaagagcagcatgctccaaagcgtcgtgaaaatgctcgggaacgtgaatcgaatgcgttcatctgctatgtgtgccacaagagtttcaaaaacgaacgctcgctgcaaagtcaccaattcccgaagaaaaccgaaaatctacacgtttgcagtacttgcaatgcaagctttctgtacttatcggcactgacaaatcacgaaaagatgcataccggaataaaggaatacaagtgtgatgtgtgcgataaggaattttatgatgagcgggctctaaaagtgcaccaagtgtgtcacaaagaggaccgaccctatgtttgcgatatttgttcgaagtctttcctcagaaagggtaacttaagggtgcacaaacgctgccattcggacaacatctgggagtgtccacactgtaccaacaagttcaaaaccaagcaatcgctaaccctccacattcggagccataccggagagaaaccattcgagtgtcactactgtaccaatcggtacagccactggtccgatcgcaatcgccacgaaatgtccgcccataccaaagtgcgaccgcataagtgccccgattgcgaaatgaccttcattcggaagcgccagctaacgctccacgccagaacccacacgggcgagcggccgtacacgtgtcacatttgcgaccgaaccttcgtgcagtcgacctacctgaagaagcacttggccacgcacgagaagcatggaacgaaagtcaaggaaacggaatacctgatcgaacttatgcccgaggaaggcgagaaggagtttgaggttgtggagatggtagagaacgaccagcagatgctggacgaggggaactcggaaaacgatcggatgagcgaagaagaaatggacgatgatgaatgaatgtctgttacgtatttttgtaagtctacattttcctataagataactccaagaataaatattacagcaagttgcgtacatgatagagaaaatatacacaataataccgaattcatatcaaaatgcgctttagttgtactccttcgttatgttcatgtttttgatgcaagttctgctccaccacataattttctggatgcctaatacttaggtactgtccattaattacgt

SEQ ID NO: 713 - DNA, 851 bp, Aedes aegypti
gaagacgttatccaaatgaatccgctccaaatcttgcacctagcattccgcaatcacttactttttaaccattgacagctcaatcacacggcagaatgtgctcctcattgcgtgcactttcaaccgtttctctagttattctactagcttcgacctgtagtggcacctgtaacgaaacggaatcgtcaccttcaacctgtgacgtacattcacgtgaaaaacggtttcttacctacgtcgtcaatggaggagtggccaaaatagttctcggaggagtctttccggtgtatttccaccacaagctgaagagaagtttgaacgcggccgtgaacgttcaggcaaactatcgaatcccagcggacataatctggcctgttccggaggacattttccggcaacgcgtgaataatgattttattgacaacagcagatcgcaattgtatcgactgttggagcggatgatcgatacctggggaagaaatggccggacttgtttgctaagaacgatttgtgaattggcggagacgcctctgtcgcataatgggatgtttggtgagatattggatgtcatattcacaccaagcgactccgatgttatagacaaggaataccgaatggcacggaagtatggaacccatggagtgagctgttcgggagttttcaaggaatgccctaacggtcacggtcttcttgacgcgatcagtacagttctaacatctaaggttatgtttaattgacatcgtcttattgatccataatgctgaacagcacatttggatttcggctaagctgtgtaatactttggggccactctaccgtatgcctatctaaatataaatttaatccatgtt

SEQ ID NO: 714 - DNA, 1509 bp, Aedes aegypti
atgttactcgtgctggcaatcgtcttagtgctgttgctgattctgctggtggacagcaccctaaaacaccatgtgggtaaatttgccagatccttggaatcggttagccccaactatcccctgttggggagtgctacggtgttccttggtcacagtgaagaacgaaggtttgagaatttcatgaacatgctccgccaagtggatcgaattggcaagggatggctaggtccgcaactgatgttctatgtggcccatcccgaactggtgcaaaaagtgctgacggatccaaactgcagtgaaaaaccatttttctacgagttttcccggcttactcatgggttgttctcggcaaaatattccatttggaaacccaaccgaaaggcactgaatccaacaatgaatgtgaaaatgttgaatagtttcgtgccgatatttgagagattttccagaagtatggtggagaagctgaagtgttaccccgaagggactccagtggatatcttggatttcacaacggaatgtgcgttggaaatggtttgtggaaccacgctggggacggctctaaagaagggtagtggcaaaaggaagtttttggaaagcatgcaaacatttatcagtagggtagctaccagaacgctaagtgtcagtttgtacaatgaaagtttctatcggcttacaagagcatacaatgaagaagaaaacgctcgaaagtattgtcttgattttgcaaaatgtatcatcgaggagagacaacaagtgctagttaccgaaccacagagtaagaactccgatgaaaatgaagacgacgatggttatcaaattcgccgaccaaaattatttatcgatcaagtcctgagcggtaacaacaccgaagctgatatctcaacgcaaaatttaagtgaacaaatccttaccatcatggctgcgggttacgatacttccgccaacatggtcgcccacagctgccttttcctggcaatttttccagagcttcaggagaaggtagcacaggaaattcaaaccgtacttccagattgcgaacaggaactaacagcagagacgctcaaagatcttccatacctggacaagttcttcaaggaatgtttgcgactcaccccggttggatctacaatagcaagagttaacatgaccgatattgaactggatggatgccgcataccgaagggcaacatcttcatctttaacttctacgtactgcatcgaagaaaagatatttggggaccgtacgctgaacagttcgaccctgaaaacttctcaccagaacgttcgaaaggacgacacccgtttgcattcctgccctttagtggaggctcaagaaattgcatcggggccaggtatgccatgataagcaataaaataatgattatccatttggtgagaaactttcgaatgagtacgaagattcggttcgaggatttaaagtatcgcatcaacgtaacactcaatctggcatttaagcacctgataacactggaagcacgacgatga

SEQ ID NO: 715 - DNA, 956 bp, Aedes aegypti
agtcagttttgcagcgcaggcaagcgaacagcgccgaggaaattcgacgattcagctaaaaaaaatcttgtttttcattgaattcaatccggttttctcgcaacaataatcagctcccatcggccgttcaaatctgtgataaaagtcgaagactatcgtgtatctcttgcaggataaaggcagcgctaacgtaaaggtccccaaaacaaaatgactaacaagttgaaaccctatggaagcgacagtgacgatagtggtgatgaaggcgcagactttgacgtggacaagttggaacctctggaagtaggccccggggaacacaagctccagtatacgtactgtctttggttcgcgaaaaaaggttctcacagacctgcggagtacggcaaatcgctacactttgtgggacggtgcgccagtgtggaacagtggtggacattgtattgccatttagttaagcctaccatgttgacatccttccgaaagttacatttattcaagagtggcataaaacccatgtgggaagacccaggaaatgtgcgcggcggcaaatgggtcattcggttgagaaagaacaaagttgatcgagcgtgggaaaatgtctgcatggcaatgctcggagagcagttcttggtcggtccagaaatatgtggtgtcgtactttcgacgcaattcccggaggatctgctgtccatctggaaccgaactgccacagacacaaccagcaccaatcgaatccgggacacgttacggagaattctgaacctggccccttcgacacacatggagtataaaccacactgcgatagtctcaagtacctttgaaactgcttcgccgtcgtttggcgtatcgttattatgtcgggttttcctcttattctgtaactcccaggatgaatggtcatcctcaaaagaaataaaaaaaagaaatatgatagctgaatctgaatgactgg

SEQ ID NO: 716 - DNA, 1557 bp, Aedes aegypti
atgggctctgccaagttgattgagcaattcaacaacgaattttccagtgaagtgattcctccagaacaacctcaagtgtcgtccaattcgttcgtattcaacccgcaatcgttttcttcaccaccatcgcgtgcgctacagccaaccgtcggggctagttcgtccaacccggcgcacaagtattcgtattcggtcgtcgttgctccctcccagtcgtcggttgatccgtgcgtttcgctatcgatcgagaaaaatcttgaatcggactcttctactgtggcctcctacgctgcaccgcaaggcggttcttacagcgtcgaggagtacccggacggaagcagagcggccgtctgtctcaccaaagcctccaacgtgtggacggtaacgttcttcctgatgaccatatcgttgttcttcctgctcccgttggtcatcctggtggtcctgtatgccatcatcgccaagaatctgatcgccagcaacaactcgcggataaaaatccgcctcagcaaaccggaactcagttacaaagcgcggaagcaggtggttctaatgttgggcgccgtagtcttggcattcttcacctgtctgctcccgttccggatgctcaccctttggatcattatggtgtccgaagaaacattccaaaaattagccgtagaaaagtactacaacctattgtattttagtcgtattatgctctacctcaactcggccgtcaatcccatactgtataatctaatgtcgtccaagttccgaaagggtttcctgcggttgtgccgctgcaggcgactctggggacatcctttgaggcgacggggtgggaaagtgcgtggaaggtcggccacattcacaaccacaacgacctcgtcctatctggcgagttcatcgattcggaaaagcagtgaaaagtacacattatcattggacgatttacgctttcagcagcttccagtttgctccaatggacttccaatggcgtcgacagaaagtggcacacggggtaaagatgcgtcctcaatagtagtggtcgtcagcgatgatgacgaagaacccttccagctaagtagattctacaggatgaacctactgcggcaatattccactccattgttgccgtgctacgaagatagggggagaccgccattaccttcgaccgaaccgtcagggatcaatagcaacaaatcagtcgaaagtgcggtcaagcgtcaagcctttaatgtgaccttcaaagaatccgaaagacgcaaaaataacaacaacgactctgccggcagtaatggagttatccttgtcgaaccggggtcagcctggggtaatctgtttaatccgtggaaattgaaatttatccggcaacagacgacaccacctcaactgcaagaacaaagaccaaactcacatgttgccagtgccaaagccgccgtcatcatcggggtggagagaaggctgtcaatgagtccccgaacgaagaagcaaatgtcacttgacgaaagtttgttgggggcccgtggaaatcactgcacggtcgaaggtgattctggcgttggtgaagtttag

SEQ ID NO: 717 - DNA, 1152 bp, Aedes aegypti
atgatgatcctttgttcattgctaggagtttcactcctagcagctgttgcgcattcagccgctccttccgaaaggctaccgacgctcatcgaacgagcatccgccgatgagagatatcggttacgtcgggtttctgagccactatcgtacaagttgtatctcgatatcagtgacgaaaatttctactcctatcgaggttcggtcgatatcgagatgcgatatctggatacgtccaatcacttctacctcagcagtgatgggctagttatcgatcgggatagtatcaaagtgaccaaacctaacggagatgatctgccgttggcgaatttggatacgatggacaagtacgaaatgctaatcttttattttaatgaaagattggaacaaaacgcaatttatcaggtgcacattgagttttccaataacatcggaacggagctgaaaggattgtacaggagtagctataccgtgggaaatgcaacaaggtatatagctaccacccatttcgaatcaacatatgcccggagcgtattcccatgctatgacgaaccatcctataaggcctattttgatgtcacaatacgtcaccgttctcaataccacgcactgtccaacatgcctatcaaggagcgagttcaggatggtgaacagcactcaatcactcagttcgagaggtctcctttcatgtcaagttatctgctggccttcattgtatctgattacaaaactttggcagaagaaacagatcacatcagagtatatgccccggagaaccaagtgcaacacacaatctacgcacgggaattcgcacagaaatcccttcaaatactggaagatcttttgggtcacgagttccagctgcccaaagtagatttgatcgccattccggacttcaacatgggtgccatggagaactgggggctcataacatttcgcgcggtttatctcatctacgatgacgcaacgacaacggctcgcaccaagcagaatattgccgatctgattacgcacgagttcgtacattcgtggtttggtaacgaagtgactccggagtggtggacatacctctggttgagcgagggatttgctagcaaatcgtacttgccaacgacggatgtcagctaccgatcgacatggctttggctgctttag

SEQ ID NO: 718 - DNA, 3511 bp, Aedes aegypti
atgatgatcctttgttcattgctaggagtttcactcctagcagctgttgcgcattcagccgctccttccgaaaggctaccgacgctcatcgaacgagcatccgccgatgagagatatcagttacgtcgggtttctgagccactatcgtacaagttgtatctcgatatcagtgacgaaaatttctactcctatcgaggttcggtcgatatcgagatgcgatatctggatacgtccaaccacttctacctcagcagtgatgggctagttatcgatcgggatagtatcaaagtgaccaaacctaacggagacgatctgccgttggcgaatttggatacgatggacaagtacgaaatgctaatcttttattttaatgaaagattggaacaaaacgcaatttatcaggtgcacattgagttttccaataacatcggaacggagctgaaaggattgtacaggagtagctataccgtgggaaatgcaacaaggtatatagctaccacccatttcgaatcaacatatgcccggagcgtattcccatgctatgacgaaccatcctataagtcctattttgatgtcacaatacgtcatcgttctcaataccacgcactgtccaacatgcctatcaaggagcgagttcaggatggtgaacagcactcaatcactcagttcgagaggtctcctttcatgtcaagttatctgctggccttcattgtatctgattacaaaactttggcagaagaaacagatcacatcagagtatatgccccggagaaccaagtgcaacacacaatctacgcacgggaattcgcacagaaatcccttcaaatgctggaagatcttttgggtcacgagttccagctgcccaaagtagatttgatcgccattccggacttcaacatgggtgccatggagaactgggggctcataacatttcgcgcggtttatctcatctacgatgacgcaacgacaacggctcgcaccaagcagaatattgccgatctgattacgcacgagttcgtacattcgtggtttggtaacgaagtgactccggagtggtggacatacctctggttgagcgagggatttgctaggtattttgagtactacgtgacggcacagattgaagacgaatggcacttgtgggaacaattcgtggtgaataatgtacactcggcgttttcgcaagacgacaaggctggtaatcgaccaatgagtttctacgctaccgaaccggatgtattgaacggcttgtttgactatgtagtgtatgccaagagtgcatcggtaattcggatgttccagaacgtcattggcttcgaatcgttcaaggcagctctcaatgattacattgcaagtcgtagttacatgaccacgcacccagattatctatatgcaagtattgaaaagtttagcgaagtcgcaatgccaggtagcgttaaaaccgtgttcaacaactgggcagataatgccggttatccggttgtgacagtgaccagaaatggaaaattcgtaacatgtgctcaaaagcgtttctggatgccagtggaaggggaaacagcccccgaggatacgaaattttacgtaccgctcaattatgccacctcggcagaagctgatttcaatgatacaacagccgttgactggctaactccagatattccagaatataccaaagaattgccgacagatgtcgattggatccttgtgaataaacaacaaactggattctacagagtgaactacgataacaataattgggctgcgttgaccgagatgttaaagtcagaaaaattgtatcctattccggtcattaaccgtgcgcaactgatagatgatgctagcaatctagctaaggcaggagagttgagctatgaaattgcattttccctgttggaatacttggaaatggaaagcgaatacatcccttggagcacggcctacaatgctctaattcatttgaacagaatgttttcgagtaatgaaaactactcaagattcgaggactttgttcgaaaaattacatcccgaatgtacgcaagaatttcactaaccggaacgaccagccacatcagtagactacatcgtggaaacaccatatacttggcgtgttactttggagttacggcttgcgtagaggactcccaaaatttaatgcagcagatgatgagtgatgaatccttcgttgttcccgaggaggcccaatccgcggcattttgttccttcagcaaacatatatcttctctgaatgaagatttgatgcagatgttctttgaacggtatctttcaatgaagaacaacgacaatggtttggtcagtcgcttcatcaccgggatgggttgcactagaaatacaacaatgattgagctatatctagcattgaccaccacaaatctcccgggattccaactgactggtacggaacggaatcagattctggtgtctgtgctgagcggtagccccgaaggactccgagcaagtttgaaatttatgctagaatactaccccgatgtatcgtacatggctggatcggttgccaatatattcactgagttcggcaacagaatcaaccaaaaagaacaatttgaaacgcttcaagacatcgttgccaaatatggaggagtgttcacagaatcggtatattctgcggctgggcgggctcttgttcaagccgaaaagaacctggcatgggtggaccaacattcggaagcgatcagcaattggcttgtctcaaacgattacaccctcagtacgacaacggtcaaaccggataaaggtggagcttcttcaattacggccgggtttctactgacactagtcacaattattgttgctttaataaactaggccaatctatagattacacttttgatccacccaaagtggtgacttattctagtgaacactgctacagcatcatcttcacagtcggttcctcgagtgtaaatccctaccagataagaaacctgcttctcgtacaatccgtgcgcgtagtagttatagagtccacttcctgcatcgtgacagatgctcggcttattctcaccaaaagatccgtcgaatgcaacgcacacctctgtcgaagtcacattagaaaatttgatctcctcacatcgctgttgatacaacggataggcttgcagatcaaactgttgttccttagtaccaagaacttccagcgcgaatggaatatgtgaacggttcttccacaaacaggcagggattacttcctgactgacggtgactggtagcattagcttcagcacagctaggttattctcgtggctatttgcaacgtgaagaggatgcataattgatttctcaacatcaattttttgagtggtattctgtccgactataacaaacaagctttcgtcactggaaaacctgtaggatttgatgatgattagatgtttagttagaagaagatttctatcgtatttaccttttaagacagcttgcggaagtgatgacaaactccttggaaatcaatgtagcgtcacatgcaatttcc

SEQ ID NO: 719 - DNA, 1290 bp, Aedes aegypti
gattttagtgaagtcaaggattataatccgtttgagcatcggaagatcgcgaaacctaattcaacaatcgggacgctgattcatttggtgaaaggaacgttgggtaccggaatactttccatgccattggcattccgcaatggaggatttgcttttggcatcgtgggaaccgtcatttccgggattatttatgctcactgtgtttatctgctggttagcacatcccggaaagcctgtcgcagaagcttcgttcctatgctagggtatacagaaacagttgaaaatgtgtttactcatggtccccgtggcgttaaaaaatacgccattttagccaggtttttacaagttgtcaaaatcttgcaattctacttgctaatatgtgtatacttggtctttataggaaacacattgaaagatattgtcaatcatgacttccagctgggttgggacacccgcgtgtttatcttcctagcggctgtcccactaattttcactacccaaatacgtgaactgaaatatcttgttccattctcagccatcgctaatgcattgattataacagctatcggcattaccatgttctatatcttgaaggagcccatttcactggagaacagaagtatgtggcccgcctggaatactctaccggcgtttatcggaactgttatgtacgctcttcttggaatcgaatacgtgctcccaaatgagaataaaatgaagcgtcctgagcatatgctgggcaactgtggtgtggtaaacgtagctgtttgcttcataaccgctctctacacgatagttggagctttgggctatgcacagtacggtgatgacaccaaaggttcagtgactctcaatctcccggccaatgaagcgctagcgaaatcaacccagctgctaacaataacagcaatcatcctgtcaaccggcctaatcaactacgtcccaacggatatcgtctggcggaagattcagcacaaaatcgaccccaaacggcacaactttgcacagatctcgttccggttcggtatgttggtccttctgacggccattgccgtgggtgttccggagctggaaccgtttgtggggctgactggatccatcagcggtggatcgttggtagtgatcattccggccgttatcgataccgttttccgatggcccggcggattcggacgaatgaactggatcttgtggaagaatgtgttagtgttggtgtttgggttgttggtgttgggcattgggacgtactttagtgtcgttgatattgtggctatttatgagaaagaataa

SEQ ID NO: 720 - DNA, 2239 bp, Aedes aegypti
atgttggatttgttcaccatttttaccaagggcggaatcgtcctctggtacttccgaggcactaatcaaatattcgccccctcggtgaatgcgctcattcgaagcgtaattctacaggagcgatctggagtgtacgatcacgatggattatcgcttcagtacaaactggacaatgaattcgaattggtttttgtcgtcgcattccaaaagatccttcagctgtcgtacattgataagttcttgagcgatgtccacttggagttccgtgataagtacaagaacgaccttagggttgaaaatcggaattattcaaatttcaacttccaagatgatttcacgcgcattttggaacaggccgaaaagtggggacgaatgcaggcaacgcttccgaagcaaatgcgtagctacgaagattcccataaatctaagaagacggttgcatctatgattgagcgcaagggtgaagagaagccagttgggggtagcaaaaaatcggtaaaaattgtagaaactaagaatgaggtgccggagacgattgttccagatcagatgaatggagcaaatgacgatgttatcttggaaaatcgtaagaaaatgatggaaaagctcaacaagaagaaaggagataagccaaagtctccgaaatcccctcctcaaaagtcaggaaagcaaatgcgtgtctgggacttgggaggcaacactagagatttgcccaatttggatcgctccaaagacaaaccggaagacatgaagagcgattttacaccgaccaatgccattattggtaccatgaagggaggaattcaggatatggaagttgaaagcgatagcgaatactccgaggatgaagatgaagaggaggtacaagcctatgccaacagttccagtgctgcaccagttaaaaaatccggtggtgtcttctccttgttcaagggcttggtaggatcgaagaatcttactcgtgaagacatgcagccagcgttggacaaacttcgcgaccatttgatatccaaaaacgttgcatccgatatttctcacaagttgtgcgaatcggtagcggtcaaattggaaggaaaagtcctcggaacattcgacaccattgccacgactgttaagaatacattgaccgaagcgttggttcaaatcctatcaccaaagcgtcgcgtagacattcttcgcgattgcttggaagctaagaaaaacaagcgcccttacgtgatgagcttttgcggagtgaacggcgtgggaaagtctaccaacttggcaaagatatgtttctggctgattgagaacaacttgaatgtgttgattgctgcttgcgatacgttccgagctggagctgttgaacagcttcggactcatatgaggcatttgaatgctttacacccaccggagaagcactcgggaagaaatatggtacaactttacgagaagggctatggaaaagacgctgccggtattgcgatggaagccatacggcatgccaaggattcggccgtcgatgtggtcttgattgacaccgctggtcggatgcaggacaacgaaccacttatgagagcgttggctaaattaattaaggtaaatgagcccgacctagtgctgttcgttggggaagctcttgtcggaaatgaagccgtagatcaactggtgaaattcaatcaggccttggcggattattcctcaaatgaaaatccccacatcatcgatggaatcgtcctgacgaagttcgatactattgacgacaaagtgggtgctgccatatcgatgacctacattaccggacaaccaatcgtattcgtcggaaccggacagacatataccgatctgaagaagttgaacgctaaagccgtcgtacatgcgttgatgaagtaaattacaaatctatgcttcaatttgtgtctgcctgtgttttgatcttaagattcagatgtcattgtgtcccagttccaattttgtatcatttcttcaacgattttacccaacgattctattccgcttagcaaagacattatagaaatattccagcagggttagacaattgaaaatttatctcttagctacttattgttctatttcacgaaaatgtgtacctaatagtttttcgttctgggatgtgtattatcattgtactgttttgctattttgttgtgttttataaatggaaaactattattcccatctccgtagtcctaaaaatatattgacgggatgaagcagttctatgaagctattcttattt

SEQ ID NO: 721 - DNA, 2112 bp, Aedes aegypti
ttttgtccggttctgattccctgacgccgccgatcaaaaataatctggcgcacaggtcagtctagggtaaatcaccaatagttaaacgaactaaaatctcgttaaccgttatgtttgacaaggatttgaccagttcaacgattggcaaataaccctttcttatcgaagcccgccgtacagcagattgtcaatcgcgaatcgttaacggttttataagagcacgattgtgacccaatacaactgtctggccggttgcaaccgctctatctgtctgctcccgagcagcttcaatgatttggccaaggcattgtctgtggtctgtgacgcgactcacgagtatttatgcatggcgaaaatggcaaacgcaaaaagtgtgtcccaaaaccttgatatggagtaaacgcacaccaaccaacttgacttggtattgagtctttggctgtgcgaaaatcgtttcagtctccagcgccaataactgaaaagtatgcacgattatgaccggtaatacgggtactagtttgtgtttatacatcaagtgaaacggttgtcttaaaacagttattgtgggttatcttcggaccatgccaatcacggtagaaagtttagaaaagttcgttgagattcgtatgccgtaatagacaagaattttctaatttgaatactgttttttagaaaagatgcagaggaatacgatccttttgcgcacaggcaaattaagaagccgaacacaaccatcggaagcttcattcatctggtgaaaggatctttgggaacgggcatcatggccatgccattggcgttcaaaaacggtggactgctatttggtacgattggatctatagtgatctgcatcatttatgctcattgtgtgcatttgctggttggtacatcacaaaaactatgcaggaaaactcaaacaccagttctagattacgcagggacagcacacaaagcatttgaaactggaccgttaaggataaaaccgatggccaaatatgtatcgtatgaaaaatcctccgttccttagtataacctagtataatgcacttttccttctagcatttttatagactggatgttggtgatagatagtatactatctatttgtctgtacattgtcttcatagcagaatcgatgcaaggcgtaatctacaaccaacaaggtttagattgggatactcgaatgtacatcttaatactaatgattcccatcgttatcatcatgcaagtccgggagctgaagcaacttgtcccattcacggcagtagccaatatgctcatcatcgcatcggtgggagtttcgttatactttatcttcagggaaccgatatcacttgccgacagaaatctttggccgcaatggactacctttccctcattcgttagtacggtcctctttgcaattgctggaatcaaaacggttcttccgatcgaaaacaagatgaagcatccgggagatttccttcgacccctcggagtcatgcagagtggtctcgggatcctgacggtactttacggagtaacggggttctttgggtatgcccaatacggagaaattaccaaggggtcggtaaccctcaatctaccaagcgatagcggttgggcagaaacgacacgactactatccgccatcggtatcctagtttccctaggattcaccctatacattccgatggagatcatctggcctcgactggaagcgaagatccccctcaggtggcacaatgtgggacagatcagtatccgaaccgggttggcaattgcgatggttggattcgctcttgttgcacccaaagtggaatcgtttatcggactgttgggatcgtttgggacggcagtgttgtcagtattgctgccggttaccgttgatacgctctaccgatggccaacggatttcggttggtgccggtggagattagtgaagaactcggtgttgatattgtttgggctttttgtgcttacagtggggacgtactttgggatattagatattgttgcaatatatcagtgaggaattgtgtcgttattgttatttgtgttaaactataaaataagagctgagagtaccaaataataaacagatatattgacatttttactcagaaagtaaca

SEQ ID NO: 722 - DNA, 445 bp, Aedes aegypti
cgctgctggaccaacaggaaactgctcaatctcgtcgccctgaaagaattaatttatttctcagagttgtgtgctatagaataaatatcaatcatgactttcaccaaaagcgtagatcaaacaaccatactgcaaggcgaccggtcaaaactcaaggatctactgcgtctccgattgaacgcttgcggatggagcgaccaggtgcgattgctgtgccgggaagccatcaaggaacaggattccatcaactgtgacgccctggtgcagcaagtgacgccaaaggcccgtgccctcataccggacaccgtcaagaaggaattgctccagaagatcaaaaccatcctggtccagcaggagggtatcgatatttaggtagtgcttaggttattgaaggatgttttgagggcatgacgatgaaataaatttattataagagtgtaggtat

SEQ ID NO: 723 - DNA, 1359 bp, Aedes aegypti
atggcaccagttattcgttcgttctacaaagacgcaacggtattggtttgcggtgccactggctttcttggccaaatcctgctggagaaaattctcagagtgttggagccgcgaaaagtgtatctgctgatacgcaggaagaaggggttcgatgtacaacaacgacttcataagttgatggagggagtggtgtttgatcgagttcgatcgctgcctattgtgtccaaggtgcaggcaatcgaaatggatatgactcaaccagacttaggcctgaatatcgagactcgacactgtctcgtagaagaagtccatgtagtgttccagctcgctgcgagcgtaaacttcatgactccattggaaagtattctgaaagagaacgttcaatacaatctgcatctgtacaatttagtgagagaaatgaaaaacttacgggtagcgatgcatgtatccacgctgttttccaactgtgaccgaaaggttatactggaaaaggtttacagtgatgtggggtttggagggtacgactccattgcagaacatctaagtaagttggatgaacaagaaaaagactccgtgacaccgatgataatcaagcaacatccgaacaactacacgttttcgaagaaatgcatcgaagctaagctacagcaggcgttctccgatatacctattggaatattcagacccccttccattaacgcaacctatgaagaacctctcgccggatgggtgaacaatctgtatggttacgctggatacacagttcctgtgattatttggctgtatagtgcttatttcattgatgattctataacacctcagtttgccccggttgactactgtgcaaatgctttactgctgtgcgcagttgatgtggcaaagaactttaaacacaaccagcgtgaaattccagtcttcaactacgcggacaacggattacctacattgaaagatatttttaactattcaattgctacattaccatggccacggaatttcatttatcgttactttatgatcacctgtacaaccaacgagattcggtatcgtctgggggtgaagatgatgcttgcccacgcctcgattcttgatcgggtctggatttggagaggttatcccggcggtatacggaaaggcatcgaacgagcgttgcaaatgatggataaaactcgactggtgggaacaacgacttgggatgtggaagtggccaatatcatacgaattcagcaggatctggatgaggaggagaaagcgatttttcggtgcgatttagggaatgtgaactgggaacgccattacagggattatgtgcaggggatcaggaaatacgtgctaggtgcaatgagaagtaaactgtaa

SEQ ID NO: 724 - DNA, 2253 bp, Aedes aegypti
gccgtctatatacaatagacaaaaccgcaagcacgtagtttttagcgtctattctgctgttcaccgcttagcaatgcttttaaaattattcgcgatattttctacgttcagcggtatctactgctacgtagattattcctcatcaccagtagttgacatccgaggactgggacaggttcgcggctcaattggtcaaactgcttggacagggagagtagtttacaaattccaatcgattcattatgccgtggctcccgtgggatctttgcgtttcaaggctcctattcggaccggcccttggtatggcatcaaagatgcaactcagcctggagtgcgatgcccgcagatgaccgaacgctacgtcaatgtggacaacgaggattgtcttacgctgtcggtttactcgaatgatttacacgcctcccgtccggtaatggtgtacatccacggcggatggttctacatgggaggagccgacatgttcaagccagactatctactagaatcggacattgttctggtggtgatccagtaccgattgggaccacttgggtttctgagtaccttgactgatgcaattcctggcaacgctggagtattggacgcaatcgcagctttggaatgggtacagcagaatatctggaactttggaggggatcacgcacaggtgacaattttcggacaatccgctggagcgtctatggtttcgatgctgcttcgcagcccattggtgcagagtcgagaagcgcagttattccaacgagcaattatacaatctggatcgattttcaatccaaggcacctaactgattctcctttggagggcacatgggacattgcaagacgtttgtgccatgaagggtacgacctagagcagtgtttctgtaacgcttcagtggaacatcttctgagagcttttctcaatcatcgtgcggcagcaatcagaagccgtggattgacgttcgtggcgggatccaacattgtaattggaggtccttctaggctctttccctatcatcctcaacactatctccgaaccacgaatccagcgattgcggtcatggcgggaactgtttcccaagatggtttgtacttactggatgaactttaccgctttcaacccgagctgcctacagtttttaacgatgcacatgagctaagcgactacattcgtactctgcacgaaaagtttggcccaacgagtttcaatggtgcgctggaggcttacgcgttgaaaacgcatatttcaaaagaggataaagaagagttgcgctggaacaagctagtgactggttttactgatatttgtgcaacaagtggactcgaggcagcggtgttaaccgacgtacagaacctcttccggatcagtccaggcaacgtttacctctacagtttcgactattccagttcgctggcgagagaaaaggaccacttcgtaccatttccctacgtgggagctgtcgaacacgaggacgatctgcagtatctgtttccgacgaagcagatgaacgccgacgatgtgaaagtggccaagctgatggtgcaactttggacctcgtttgctattgatggaattcctagagcgaatgagattgctactgcgtggactccgatgaaatcactatttggaccatacctgaaaataaactctgtgtgtgagcagaatgtcgactatcgagacgagtttacagcaacttccaggaaatatgaagctgtgaagatttgattttgttattaacacctgaaatattgtatttgttttttttttttattgctgacgatactactgtactgatactgatacttactgtagcagaaaagttaattatttaagaaagaacagtatatcacacatttgtgtcggaatggaaaagcctaaatttttaaaattccctgaggatctgtcaattcttctgatgatacgttaagaatttcatcttagaataccattagaaaatcttacagaaataatccaagggtgatattccttaaggctttttttccaagagatctatggagatctatgcaagtagttattaaggaaatctttcagttttaacttttataaatacttcagaattttgaaaagtgctacaacagtctttataactcattttttcttaaaaggaactcttggaaaaatctgaaaaaagcgtttcttgaagtagtttgtgaaccattttctgaaagaatctcaagggtactatcagaaatcttaaatagaaggattaaatattttttgtgtcatggtta

SEQ ID NO: 725 - DNA, 2564 bp, Aedes aegypti
tgtttcgcttgtttcggtgaacagccagaacagctgatcgccgccgcggcgcaaacgaagaaagacactccaaagcaaaccgtcaaaattcacatgcgcgcgtaaaagaacaagaatccagagcgaaaattgtaccacccaaacaccgcttaatcgcgatttttattttgaacgcgacggtccttcttttttcgtgcttttgtgaatgaaacatttttactgcttgtgaaatggtaaatgattgaaaagtgagcgtgagccaatgtcctttacccggaaatcggaaacaacgacgatggattcggacgaggaagacgaaagttttgaccaggattgggataccctccagacgataacaaaattcgatggtgttcgatccaaggatgaactaacgtcgttaacccgtgcctcaacgagactgatggacaatggcctccaaagtcgtattgctgccaaagcaagtacaccggtatctttgctggtggagagtttggtccagcagctatgtgccctcttggaagcggatccggaacgatccaaggaactctatgaaacgatctgcgagcgacttcatgcggttaatctgatcgacgaaacctactcaatgggggaatttgagatgatgcgtagtcagtaccagaaagcactgtatcagttagtcagcattgcccgaggacaaaatctgccggttccatccttggagaatatttggcccctgcagccggcgcttggattggaatggtctcgctatcaccgagaatttaccgagctggatttcattgccggaggagggttcggaaaagtgttcaaagctcggaacaatctggacggaattgtgtatgctgtgaagaaaatcacaatcagatcgaccactatcaagaacgttttggtgcatctggcagaggtcaaaaccttggccagtttgaaccatatcaacatagttccttacaaagcggcttggcttgaaccgcttttggcaaatggagaatcgggaagtggttcgaatggtagtggaaccggcatttccacaattgatgatgacgatgaggaggatgaagatgacgatgataacgacgaggaagaagaagatgagcggatttctaatggagtatctttcagttacgtttctggatatcagtctagaaaacgaaaatcaacgttaaacgattcactcaaactacaagatgacacagatgacttcagcattcaattcgaggacagcaatggagacaggacagacgaaaataatcaacagttagccgaattggaggacgctcgaggaagtctcataaatttagaggaatcacaaccccacgtgaagctgaaatgggcaactctctacattcagatgactctttgtcacctcactcttcgcgaatggttggacgatcgcaatcgtttcccttgcttcgaagagttttaccacaatttcctacgctgtccacgaagagattgcactactactgccaatccgaggaactccttctgccgtcaaacatcaaaactcagctctggaagtagttctggagattctggccctttgattgaacctaaaagtagtatgccaagtcctccacaggatgataaatctgccaatcacacgccacagcatttggacgtaataacggatgttcttcaacaactgctaaatggcctaacctacatccactcgcgaggaatcgtccaccacgacatcaagccgagcaacattttcgttagcgtcagtgaccatgacaaagcgatctccattcagttgggtgattttggcctagcctgtcccctccagagctcccatacaggggctggatttgggacaccactctacgccgcaccagaacaactggaaggcaaatgcgatccgaagtcggacatctatagcatgggtattatactcttggaactacttattcctttagaaaccgatatggagcgcgctgatttgatcaagcaggttcgcaaacagcagttcccgaaagatctcgaccgggaatacgttgagttgctcaagagccttctcagtacccgtccctgtcgccgtcccgataccttcgccctgacggaagccgtcaattgcatgaagctcaaccgggacaaagtcatctctcagttgaaaaagaacctttccatccaagaggaggaaattcaagcactcaagaataccatcgacgaaaagaatcgtcgccagatggaatcccaggaagaactttctctgctggagttgcgaacaagcgaatcgctgatcctaaaggaccaagagctgagaactaaagatcaggagattcatcggctgaaggaactgcttaaaagttatcaggaaaaggacaccggtggagatggcggtggaaaggaacagtagtgagctgaaaacgtaacgtctgtgcgtgaactttgtttttttatatcatgttcacttatgatcatttcattgacttgattgcgtacgagtgattccccggctgtagcagaaataggtactatttgaacaattcttagaattaagtacattttgtaggatatttattacggcaataaaagcagtttgcttcaacagttacaaacttaaa

SEQ ID NO: 726 - DNA, 1785 bp, Aedes aegypti
atgtgcgtagaatacattatagcggtgctaatcacttccgttgtgatttcctgttttggacagcattcgacgccgattgttaacattcaaggacttggcagcgtacaaggttccgtcggttatacggcttggacaaataggacaatttatgaatttcaagggattccgtatggtgaagctcccgttggcacgttaaggttcaagccaacggttaaggctgcagcatggggcggtattcgggatgcttcaaaaccgggcattcggtgtccgcagatggacaaacattacgtcaacttggataacgaggattgccttaccttatcggtgtattcgaatgatgtaagtttgaactcggatcgtccggtgatggtgttcatgcacggtggatggctattctggggtggtgccgagcaatacaaaccgaatttccttctggagtcaaacattgtattggtggttattcagtatcgtctaggaccattagggtttttgagcactatgtctgaagacattcccggaaacgtaggaatgctggatgtgataactgccttggagtgggttcagcaaaatataagatattttggtggaagcagttctcaagtgacgatatttggtgaatcggctggtgctgtcgctgtttctgcaatgcttcacagcccgctagtgcaatcccgatctacgcctctattcaacaaggctattcttcagtcgggatcagtgtttgttccatgggctataagtgacgacccaattgaggggaccaatgatatcgctaaacgcactggctgcactggagttgccttggaacaatgtctacgtggagttgccgtaaaagacctactggaagcattccacgatcatcgagaacaaaccatcattagccgtggatacccttacgtagcaggaactggccttgtcgttggaggtccatcaccgctctttccgcaacatccgaaaaactatttggagaacgtcaacaagaacatcgccatcatggctggaacaacttcgcaggacggtttgttcttgctgaatgaactccataagctacaacctcaactgttgcagactcttaacacgtcgcacgccttgttgcactacgttcgaatactgcacgaaaaatttggacagaccaaatatgacggatcattggagggctacgctttcaatcaaaatttcctggtgagcgagacggatcgattgccgtgggcagatctggtgtgtagtttgactgatgtaagtatttgcggcatccacggtatcaaagctccagtgatgagtgaggttcatgccttctcccacgtgaatcctggcaacgtctacttgtatagttttgactattcgagtgaactgattcagaggaacctatccgtgccgttcccacacaagagaccggttcaccatgccgaagacatcaagtatctgttcccgtgggaagctttggacgaacgcgatgtgaagatggcaaaaaccgtggttcaactgtggacatcgtttgctatccgtggagttccttctgcggacaatgttggctactggccaccggtcgacggtatacggtcgcatgatttgggtattgaccttcattttaaatatatattcatttcaggattgttcggtccatatctgaaaatcaacattgagagtgagcagcggaacaactacctcaatgagttttacgctactgcggacaaatatcgagtgttaggaggagctggaagtcgactgacagtttctgttggatcgattattctagttctaatgattgcattttcgagggttttg

SEQ ID NO: 727 - DNA, 1236 bp, Aedes aegypti
gagactctttgtctatcattaccggcactaccatccagccgcagtgtgggtagacgaccaaggttaaacacttcttcagccaaactccccgcctaatcgatcgcgtgatcgcgagataagttttgaagatgcgacaaaaaacactgactcttgtggtcttcctagcactgtggagcaccgttagtaccagtgaactgctcgacttgagctgcgacgatgacaaagagtgcgaaatgtacaatagcagtgccgtcaagagcacgtgctcgaccggtacttgccactgcgaactggtaaacggcggtaatcaaaccgattgcaaaccggtggtcaccaaagcatccaatcaaatcggaggaccatgtccctgcatggcggagaattcgtactgtaacgagaaaaccaaattatgtatttgcaaagagggatttattccgagccgggaggccaagcggtgcatgagcaaatccgttgaactgggaaaaacctgcgagatcgatgaacagtgcattgttaacgatcacttctcgcattgcgatgactcgcacttgaattgtacctgctccaaccacttcgtcatctatcagaagaagtgtcattcgataatcgcaacgacagagaagttctgtcaacaggacaaggactgcacgaaccaaacggccaactccatatgccacgaaaagcaatgcatctgcgcgggaggatttgtggcgaacgcagagaacaccacctgtctgccggtggttcactacgaacaggagtgtagcgattcgaaccaatgcatcgcccagctgggtatcggatcgctgtgcagcgaagggaaatgtgtttgcaacgagcagtactatccgttcccgatggatgcccagaatagcaccgacaaggaacacaagatacacgtgctgtgcaagaggagagtctcgcacggtgagagctgtaacgaagataaggagtgctaccagttccatcgtggcccccatgagcagacaatggagtgcttcatgaacgagtgtgtttgcactcatggattctacgagaaaggaggcatctgcatcagtcacagcggctcttcagcgattaatgtgtcatctttagtagcaatcttggcgttgctagctgctttctattcgaaacaatcattcacctgttgaatagttcgtatatatgtgtatattcaaagtgtatgttaaattgttgatttattttcctcaataaatatttgtttcgcaactcaac

SEQ ID NO: 728 - DNA, 1250 bp, Aedes aegypti
caacaactcagtccaataggtcattgttctgaaccttatcgtgtccgctacggtccaaccagaaacaacacacgttcaacgcgtgcaattaatcttctactttgtaaatattccatccgttcccaaaagtaacagtttacaatggagcaatccagttcgtccatcgcggatttctggaccagtttcaagcctgttgtaccgtacgtgccatcgccggactcgtaccagccgaaggcagaagccccagttgaatatctggactatttggatattgaagcattttacgacagcgtcaccaccggtgacgggccaacatgctgcgctaaagccgatagtccatttctgtggggatcacaagcccaaaactcttcgtattcctacgtggaaactgacgatggtcctttggaccagaaaaacagagactattgtgaattaacgacctttcaacactccgaagattatccacaaattgagcactacagttcggttgctcaggaaattatcgtgcacacaatcgatgaatcctcacttggtgtttttgagcaaaaagctgaacaaaatctacctcaaggagttcctccagttgtgtcagagcacaacatggacgaaccagacacccctgttacaatcaagcaggaattgtctgaacccattaaatctgcacctgacgaaaaagtgacttcgaaacagaaagtcacgtcgaggttgccgctgaaaaagcgtcgtattgtgtttagatttcacagctcaaccggtcaacatccctgtcctgcttgtgaacgtaccttcaaccgtccaagtcacctgacgcaacattacaatgctcatcatacgggtcccttggatcagcggtgcgaaatctgtggcaaacggtaccgtctacaggaggatttggagaagcatcaacttcgccacaaagagcagaataaatcgttcggctgcgagcactgtccgaagaagttcaactacaagttcgacatggttcgtcacgtgaaggctgtccacacggaagcgcccttcaagtgccagttttgtgagaaaggcgtggtacggtacgatcatctgctacttcacgagaacaaacaccggcggatcaacaacaatgctgttgccaaggagattgctaagaaagccaagagggttaaaaccgggaaagtagtgcgtgtcgtctcccagaacaagaaagagaaacctgagcctgactgtaaagtcgatgaacgtttgggaataaatacgcataactaactcag

SEQ ID NO: 729 - DNA, 348 bp, Aedes aegypti
atgggaatgtctttgctgagcattatcaaacaattcacgatggacaagatgaaggaatcggctgccggtgaaagcggtgttggcggaggtggaggcacagttggcaccatgggtagcgacgaatttcacagcgaattttacaacactgggcgcatagggcgacggaacgcactaccagacattctagggtcgcactgcaccacgacgacagccgacctgccgacgcagatgggagcactgagtacctcggattgctccaacaaacccgttaacgcgtcatctgcggtcagcactaacaacatgatggccaataccccaacgacatcgaccaccggaagtggatcctaa

SEQ ID NO: 730 - DNA, 1846 bp, Aedes aegypti
atgggtaaaacgccaaaaccaccaaaacggtatttcgatacggccacagaagaaaaggctaccgataagccgaagaaaattaagagcaaatccaccgatttctccgaggggtccactaatgcaacaagtggaaaaattaaaaaggaattcaaacccaaactagaaacggacgccatggaagtaatcacggtgaacgatcgtcatgcgcggccatctggtaagaaaaaacatggcctacggaaggcgcaaaacaagctggaagaagttcccgttgatccagcggcgttggcgagatattcccgtggacagggtgtagctgttgagggggtgaaatcgaagttccaaaaaattcaccagaagcgcaaggacatcaatatcgagttcgctacagagcaggcagctcgagccgaaattcttctcaatgaggaagaaggatacctggaggttgatgatgatgaactgaccaccgaagttagtcaagcggaaataattaacaacgtcgatattacaactgcagcaaaacacttcaatctacagttggagtttggaccataccggatgaggtacacgaagaacggtgcgtatctgttgctgggtggcaagaagggccatgttgcagcattcaattgggtgaaaaaatcgttgctgtgcgaaatgaatgttatggaatcggtgcacgatgtggcgtggctgatgaaccaaactatgtttgccgttgcgcaaaaaaactgggtccacgtgtacgatagcaaaggtaccgaactgcattgcattaaaaccatgcatcgagtctccagattggaatacttaccctaccacttcttgttgaattccgtaaacgatgaagggtatctctcctggatggatgtttcgattggcaaaacagtcgcatcatataatacccgactcggaagcaccaatatgatgtgccaaaatccttggaatgcagtcacttgcttaggaaactccaaaggagttgtttccatgtggtcgccttcggtaagagatccacttgccaaaatgctctgccattcgatgccaatgactgcgctcaccgtggatcctaccggtattcaactagctaccgctggcctcgacaggaccattaaaatttgggacattcgtcagttggaaggcccccttgttacttacaagttacaaactgctgcttctggaatcgatatatcgcaaaaaggactaatggcaatttcgttgggaaatgtctgtgagatttacaagaaacctagtgttgtgcaacgtgatctaaagccctacttacggcagcgaacatcatccacaattgccaacttacgcttctgtccgtatgaagatattttgggaatagccacggccagcggattcacatcgatcatcgtaccgggctcaggcgaaccaaacttcgactcactggaggccaatccattccaatcgttgtcacaacgtcgcgaagacgaagtgcacagtttgctggagaagattccgtcggagttcatttcactcaatccgtcccaaatcggagaagtggatgttccgtccctgaaggaccggctggaatcgaaggccaagctcatgacgatgaaggtgcccaaaattgacttcgaaccccgcatgaagaatcgaatgtcgaaagcaaaacgcttcaagaacaagcagaaagtgaaggaagtgctgcgcaacgaagcgattcagaacatcaaggaggcgaagcaatcgctcacagcggaagcgcgagagccacagggatcggcggactttattccactggaatcaaagagcgttctggatcgctttcgcgataaaaaggcgaagaagaagtgaacttgtaattttagtgttttcttaaata

SEQ ID NO: 731 - DNA, 1301 bp, Aedes aegypti
ttgtttcgaattgaagggaatgcggtgctaaaatagtgattatgtgacaagcgaagcgaagaaatcgaaaacagaactctacatgcaatggatgaaacgaaattggaaatccttgacaagcatcgtacataaattcagaaattcgcataaaaattgttcttctaagtatgctatgccagacaactctgggacgaccgttctcgtttccggacggcactcgggcaaacggtgaatcacgatcaagacaggaacaacacctcgaaggccgcagcatccgaggtggttacagtcaagacaaaaccccggacatctacagccggtacaacgtttacgagcacgaagccgaagaggaatatcggagaacatcgactacattccgaccgtatgttaccttcagtacaactaggcaggcacacaatcgggcgccgaatgctcacttcaatagacttccgccggcgaagaatgacgaaccgatagaggcggagtcggatgatgattatgatgacggagatgcccaggatggcgtcgacccaccgccggaagacgccgcggaagatttcagcagtagcagcaatgggggtgttggcagtaaaccagtcaccttcaacaatctgctgtataacttcaacaccgataaattcggaggattgggtaacctcttcggcgagaacagacacaagtacaaacacaaattcaagcggcggagacccggtcaaccgtgcattccgtatgatctcttcaaccgtctcagaaccgggcgcgattccaacggtaatcgaatcgatccgaaaactttgattccaccgctgaacctggtgctggccgatgtgaactactactctccatcgaataactacaacggccatggggtggcctcggaccacacaggttctgcaggtaacggtggagccgtgttcaacaaccatttctacgacgccgtcggaggatatccctgcacgggtggatacaaaccgatccacaggccacatggaggtcctttgggattcttcggacagggaggactgttcgattggacctcgtcagcggattccgtccaaagtgatcccggtgagggtggaacgggcaacaaaccggctgtggtgttcaatctgaacgatgccatcgatacagtggcaacaaactggagacctggggagagcttccaaatgatgatgaaagtgatagcagagttcatatcgtccgttgcgggaggagctccggttgctgctggagatgctgtgggagacgccgtggataccgttcggaaggttaacaaagagtttgtcagtctgtttgcttag

SEQ ID NO: 732 - DNA, 1218 bp, Aedes aegypti
atgcagcagatttcttacttttggtccgataaggggcctgccggtgattgtttttggtggctggatgtgctgttacttcttggaggaattcacagtgaatcgacggcaacttgggctcacgaacgcaagattcgcataatttgtcgatgcttgtttgcttaccatgcggtcgcatttgtgcttcaattaaatgatgcgttatatgaagagaagaaagcggctctcgttgtttgggaactgatgaaagttatctttatatttgtggcttacttgaaagtggtattagtagtacagcttaagggatcgattgcaacgttgcgtcagtttatccgcagcaatcacatttgttctggtgatatagaatatgatgaactagagcaaaacaagttcaataagattgtcagaataaccattcaagtcgtatttgttctaataataattgatacgcttattctgtcggttccaaacttctcgaataatgatttactgaaattaccacatcttctggcgttgactggaatgtttccatcgtacattttaaaaatccttctcactagttgtttgggaatttcggtaataccaaaatactttgcttgcacggcatgtgttggagctgttctaataggaatgcgaaccaggcttagaatcttggctcatcgttttgagcatatttcacagcaggattttacgagtgaagaaaaggcctttgaatgtgtcaaccgagacatacaagaagcgttagctcagcacctggaatattggagccatttgaaagcgatgaaaattatggtgagcaaaacatttctaaaggtgcactacttttcaatcgttgctattggatcattgatttatgtctgctgcgcaatgggagtaaacggtgtgacatttgttattggtgcaggaaccgtgtcgtttttaatggagtactatttgttgtgtcatttggttgatttacttcaggacgaagctgactccatcggatatcatatttttagaatatgcgcccaaataccctacaactcagagttacgttcagaatatgttcaattacgtaccactctgatgattgtctggatcaacactagaaacggcatatcgttgaactgcctaggactcttcgaaatcaccacattcaccttcgtaacccttattgatgcagcgtactcggtattgatgttcctgatcaaaatgggtaagattgtagacactgatgggtga

SEQ ID NO: 733 - DNA, 2514 bp, Aedes aegypti
gctcgctccaaaaccattgtgtgggatcagcaaaacaatatcgtgttgtcgaataagagatagctgtatatcactattgtagtgattgtctagcgtcttggtgtttttttttgtgtcgcaagattgtaaaatccgttagatttgtttgtgagtgatttgtcgtattagatagttcaacatgctttcaggagatcgcctctccgacaattgtcacagagcaaatccttatatcgagcagcgtgcatccacaggctttgatatggatccattgggagacaattcgccactatggggagccacccaattgaactaccccgaattcgcccgccaatcgcaatggcccgacagcagtgatcctcaccaccagcatgttatgcaatccgatggatacaactcatatccagttgcaccgatagagggcagctacatcgagctacgaacatccccggaaatcgtcgaagccgattctaccattgcggaaaatggtggagtcatctaccatgattatcagcaactaccggcaggaccatcagcggcggacatgtttccggttcctactgaaatcggatcctatccaccggcggaagaaggaggttctagcaaaaacatgtcaccagacggaggctactcatcaccaggccccgaatactacgcatcgtaccaaatggtgccgcaagcatactcagacgcatcgccatatcagaatgtggaatctccaccagaaagtgaaacagtgaaatatgaagtgctagaggtgaaagaagaaccggaagtgtaccgaagtgatccgtatgctatgggatacccgcaacctagcaatgtcaatcaagtgcagaaatacaacgccaacaacaaacctgtcatccatggcaatattctaataaaaccagcaaacaactccgagccatcgcagcagtacgatcagtttgaaatacttcatctgcacaaccctatgaactatccggcccaagcatatgcccaagtggaacccaacgtccaacagcacattccacaagaaccaataaaaatcgaagtgaagatcaatgcaccaccgcagcctcaaccacagctgaaggcccagactaaacaacgcaaacctcgtagatcgcgtccttatcccaacgtgtcatacaatcagcagccatcggcgtcgattgacttggatccgccagccccaacacccaagtaccgtgtgcttcatgccaatccaccggttccaagctacagcaaaccacaagaggaagaatcggaagaaaactgcgcgcgaagatccgctcgtccaagtgtcatcgagtgcagtgattacaagtgcaagaaatgtggcaccttcttcgcccgccaatgtggcctcacccaacaccagaagtggatccacgccgaacggaagttccaatgtgaacggtgtggcaagaaattcccgtcacaggaagacctcaccaagcacatcaagcgccacgacatgaaggacaagccgtttaagtgcccgatatgcccgaagcagttctgccacaagaatgaccttcgccgtcacatgtatcgccacgaggagagcacaccctacgtgtgcgactcgtgcccgaagtgctttatccgcaaggaccacctcttggcacatcagttgtcacacgatcgacgcgaaaagagatcccacgataaggaaaacgggagcccgatgtaagtacagagaggatcagtgagtgcaatcttatcggaagaggtcctaagtaaacaccaacggagaagagccccgctaacactacgccactacactatgcgcagacggctgcgcaaagcaataatccagtagacaagtgcaatgcttttaaagtttgttctattttatatatttatatttgtttaaaattccaatccggtgactaatgcaatagttaaagcagatgctatttagatggcccggaagcaatctgcgtacttctttcggttcctttttgtagtgttgaatagcgtgagaaatggacgttgcgaatgatgagtgaatgtgaagaactgttgccgattacccagattaacggaataaggaagtgaaaatcgaaaaaaaaactaaattaattcgcattccctattatttcgatatctacttgtattttatgttactattgtttgtgtaagtaagtttacgaatttacataatgctcattatctcaaaatattgaggtcgtacacgaaacagtattaatgccagtaggcaaatgatcattaataactaaatatttaaaaaatccatgaatcttggcgacaattgaaaagtgaacgttaaaatatatacattttcgacgtaagagaaaaagactacaaataagtctgagagcataggtaataagtgatgtgagatttattatacaaacagtttatacgtgaaaagtttacagtttttagccaattttacctaaaaactatcaatacaattgactttttaataaatgataaaatatacggtcggaagacatcaaaagcatctagaacttttcatcagtaaacctaatgaaatacagt

SEQ ID NO: 734 - DNA, 1686 bp, Aedes aegypti
atggagttcccaacgaattcactgctcaacgacgtgaatgtgccgaatcacatcgatgagttggacgaattgctcaacagttcgtgggatcacaatgcgatagatcagtgcgacatggatgcattgtatgcggagctaaaccgatcgctgctgactccggattcgtctccagttgaagcgaacaaagaaagtgatgtggtgtctatggggaagaacaatgatacggttccgaagaatcaagtgaccagcagtgctgtgctgactccacagtcgtctccttatatgtggaatcaagcagtagaacatttgcaaacagttcagcagcctgcttcaaattgcagtttcacttcggtaagccagcaaatggaggctaactataactacattcggatgataaatgctgttcaaacgccgaaagtcgaaattgcacagggatattcaaacatcagtggtgatattaatgtgaatcaagttagtgaaaaacaagaacaatgttgctttgatatagtacagcagataaaaagtgagccaatttaccatgagcagcaaccggagcgagcaagagtcatgcctgcgccaagtcaggtgacttaccagtcacccagagaagtgttcctggcgcaaacatctttttctccattcacctacattccgtattacacgcaacagagtgcaccaaattcgaaacctccagtcacaataaagactgatgacgataatgtgacagagcaaacgacaattccaatattcacgttggcgacgcagtcagaccaagaatctccggcggacacaattgaagcatcagtaacgactggcacgtgttgcgaatcgcccgacacaatagaaccggctcctggattgacttgcgctgaatacatttcttccgtgcaattggcttcggatagtccggaaacctcggagacttctccaacctattacatttatgttcctgaatcatctccaagctcggatcaaatgccaacattccacatattgttgcaaccacatactagccagccatccgctatgattcccgtattaacggaatcagcttcacaagaggcagttgtccaaaccatcgacccatcagccgattacgtccaaattcagaataagtacatcattccttccgccggctccagcacaacctacccggtagaagaaatttaccgagtcgatcgtccggaagcatcgtcttccgaaaactccactccgaagatgaaaccacgcaaagttaacctcacgtatgggagtaaagtgttttgccatatctgcgacaaggagttcggcaaacaaggcagctaccagcagcactggcgtcaaaaacacgaagaggatcgaccattccggtgcaatacctgcggtaagtcttacatcacggagcgtgacttgcgtcagcaccaacagaaccacgaaccgggcatgaagcagtggaaatgtagcgagtgcgacaatcgctacagacacatgaaggatcgcgaccgtcactacgatacgcatcatgggacgccggcccattcctgcatgaaggaaggctgctcgaaggcctttgcacggcgcgatcacatgttggcgcacatgatcagtcacgacaaccgagagctgagggagctgaagaaagcactggacaaagaggaaaaggagaataatcggaagcagaggggacgcaagcgaaagatggagtga

SEQ ID NO: 735 - DNA, 819 bp, Aedes aegypti
atggcctatgtagtggctcccaatattgaacccttccgcaagggtcaaacttttgcaacttggatccgtcgtttaacctatcatttccgtgtgaacaaggttcaggataacgataaaaaggatcaaatgtacttgttgggcggtgattacctgttcagcgaggcagaaaaactttatccgacggaggcactgttagatgaagtgtcctacgaggtgctagttcaaaagcttagggagcgtttagacagaaccgattctgtattgcttcagcggtaccattttagttcgaaattacaacaggccggtgagtcggcaagcgattttattttttcccttaaactacaagctgagcattgcgagtttggggaccagaagaacaggttgattttggaccgtcttctggttggtttgtcagatactaagctaaagcatcgcctcctcactgaggacagtgccaagttaacgctagaacaggcggaaaagatcattgcgacatgggaaatggcggcgacccatacaaaagccttggcaaacaatgaggatgttggcttgatcatggttggaaacgaggcgacgactaccgctcatccaacccaaatccggctcgttaaggacggaagtggttcgggtcagccaagacggtcgatggtagtggtcgataatggtcggtcgatgctgactaccgctgagcccggaggaacggccgtaaacgatgacgatgtccggcaactaccggatcgaagcagcccgagaacggtcgctcaacccggagagagaatcgtggaggaacccgatgtccggcaaataccggatctgagt

SEQ ID NO: 736 - DNA, 3285 bp, Aedes aegypti
atgggcaaggagatcgacccggccgacattggcaaacacccggatctgatccgcaaggcacaagcggaaatgacccagagcgatgtgctggtctgcggccgatgccacagcgtgttccacttcatcgagctgttcaaggagcacaaggagcaggagtgtcgcaaagagtccaccctgaaggactgccgcgaaaccaaggccaaggtttgggcgtttttgctctggaaggccgcccagctgaacaacgatggagtggattccagcgcgggcaacgtcaactcctggaagctgtaccagacctgggttaagctggaggagtcggtacgggagacctggatcgtggccggtcgtacgatccaatcgttcgccaggatgggacaaggaaacctacaggaaatgcctgtaaagatcactaaaactatcatcgaaagtggaccggatgaaaagaaaccgatcaatgccattgcctctcaaccgacgaagccgaatcagtttacgccgaaccggaagcctgatattaagacagggttgtcaccggtggcgacttcaacaccagccagagcacccgaaccggaggtgaagaaaccgccgatttccactcaggtcaagaaaccggaaccggctttggtgaacaaagcagcaggaaaacgttccgtcgccaagcgtactactggtaccggcgagatcgtcgaggaggaagtcgaaaagattttggccaagcggttcaacccccgtcgcatggaacatgaatacctggtcaagtggaccaaatttgcccacgatcagaacacctgggaaccgttgatccacctgcagacctgccagagcgtcctggaatacttcgaggtgcagctggccaagcagaaggaacaacgggcagcggcagccgccagaacactacaacagcaacaagcggagaaggccaaggccgcttctgcagctgtagcggtttcttccgcggcatctgctaccactaccactcctacttcgggtccaataaccgttactatctcaccagctccaaacctgacggtcaccgtgactaaaacggcctccccgggaccagcggctgtagtgacgactcaagccctgtcaaccccacaacccacaaccattcccgtagcactgacctcaccgcttggaggaagaccttcgcgtaactccaagatcaacgccatggacaaggtcaaacagtgggttgggagtagcccattgacccaagccggagggagttctggcaacgaagaaacgtacggcaaacgtaagctcgacagcgactacgaacccgaagatgaggacgaaataactatcaagagggtcaggaccgacagcggagcagtgaaccaggcgttggtcaaagctcaacagagtggaaatgtaaagatcgttcctgtcggagcgaagtctccggtgaaggtggtgaatggagtcggtggagtggtcaaaaaagaggaaggtaatgccgcggaagttattgtcaaaacggtgaaggatggaaccgctagtggagtggtgaagaaacctgggttcactggcgccaagaacgttgcaggagaagctcaggttcagattgtgaaccgaggggaagtaccgaagcagggcgtcttcaaggttaatgccaatacgccttctccgcagccatcgccaattccggcgcaaagaccaactcctcctggaatgaccacaaccacaactacacgaatcgtccggaagaacatcggaggaactcagcaacttgtgaaacaagtcgtcagaacaaccgttccgatccagcaagctcaacaacaacaagctcaagctggccaccagcagaggcaacctttgcagaagatggtgaacaacagcagtcctgtcggggcacccattcccaagctgaccaccaacattgttcaacgcagctctctttcacctggactaaccaacaagcctccaatcaatcgaaacattcgcagtgctcccacttccaagaccacaaccccagaacagaaaatcaatgctctccggaagcaaggcctgaacgttgtcaagcgagtcgtgtccccagcgacacaggtagaacacaaacccgcggtgggtggccacgaagaagaagaagacgatggcattcccgatccattcccatccaatttcaccaatccggctcctccatcgcctccaagagccatgaccctttgccctgtcaccggaaaagtactcggccaagccgaaggtgaaccagcaccaactccggaaagtcacgacgacaaagcgaaactcaaaaagctcccaatgcatcaacagcagcagcagcaccaccaccagcaagagcagcatgacgctcagcagcagcaggagcaggacactcaggttcagcagattctcactaatgaggacggttcgccgatcattgtggcgggagaggatggcactctgtaccaggtggccggcaagaacgcagaaggtcaaacgattctgatcgcacagggggcggatggcgagcagcagtgcgtcctggtggcttcccaggaaggtgaaggcgaagaaggtgccggtggagtactgacactggatgcggccgtttccgaggccgtggctcagatcggcggtccgcaggagggacagcagatgaccgaggagcaagctgcccagtacaaaatgcaggaaggcgtcgaccccaaccagcagttgacgatccagacggaagattctcaagatggacagattacggccgaggtggtgcaagcggatcaaccgtcgccaggtggcacccggcgagtggttctgctgctacccgatggcagtttcatgatgaccgaggtaaacgaagaacagtaccaatcgttaaatttggtaaattagaagcgaatgcgttgtgtctcttcagaatgttaactagatatttcaagcaaaacttatcttagatcgtgtatgtcggcttagatatacgcgttagatttagtctgactgtaggtaagtgaagatcaagtgtgttaatttttgacttttatttagcaatataaagttccatactgtctagtgtacagatgcttcgaatggcataccatttgctttcaatcgagaagttccttctcgacttattatgcatatgttcgtttagccgtagattatgtatgtaaaagaaaccgaacttattaagacgtttaatataaaactgctgaccgggaatgttcgaatacgagcaaattctaataagctttagacgatttaaaaatattagattgtttgatttgcgagacaatgtcaaatgagaacagtgtatcatcaagttaatttatagcctaaaag

SEQ ID NO: 737 - DNA, 1482 bp, Aedes aegypti
cgatggtcccttcaatgatttataaccactgtacataataagaatcatagttgaaagaaggttcctcattatgcgcacgtcagaaaaatacgaatcttcattgaagctcatctgaatctaaatatgtccaaatatgaaactcaactcattccaaacatgtatttgaagatgatatgtttgtatttaaacagtgtacgaataaaacgtaaagataaaaaatgggttcgtaatttgacaaaaactaccaaaaagtattatttcctacgaaacaatgccatatgttctcaatttatacaagttaataaacagataatattgattattctaatttgttgaacctgtgaaaaatgtaatacgaataattttaggtaattttaaaacaataaaattatttacaatgaaatgctcaatcaactacaacttaattataaaaacgtaatttcgaacaaaacaataaagcattcattttattttgaaaatttatgttttaggtataattttttgaagaataactagttgaagtacgggcaagctacataaattgtagttttcaactgacaccatgattcggatatctgacaataatgtatgccattgattgaactaatattgattttttcgcaggttttgtgggcattacacgaaaaagatataaaattcacaaaatatgaaattgacgtcgcaaacgatgagcacttttctgaatggttcctagagctgaatccccggggagagttgccagtactgcaaaaaggccttcttatcgtgccaggttctacccggattttggactatttggaagaaaactatccgaacaacaaacctttaaagttacgttggtgcgagaatgtgaaattacaaaatctcaaaaattcgctggataagttaccaataggtgttataacaatgggttcgttcctccatccaaggacagtagtagctcccaaatcgccctttgttcaaccagttcgatacaccattctcgagcgggacgaatcagtcagcaatcgcttgagaggctacgcaaaggcatttccagccttcagtgaggtactgcagaagaaggcagagtttcacgatcgaaagcgccaaatgctggccagcgagcagtactttttacaattgttggacgttttggatcaagttctggcagatgccgaggcggaactgacaaaatcgggcgacgataagatttggatcgcgggagcagacatcagtctgctagatatttcattgggatgtctactgtatcgtttgtacgttcttggcttggaggatcgtttctggacagtcgggaagaaaccacagctggagaagtacttcaatcgaattatggcctcggaaaatttccagcataccctgcctacgaagacatccctgctcaaaacgatttggttgaacacgccatcgacgtacaaagccggtattgcagcattttccttttcctcgatgatcataggatcgaccctgctcaagagatag

SEQ ID NO: 738 - DNA, 2421 bp, Aedes aegypti
agcatttcatccaaggattattactgtaaatctgccaaacatttttggagtaagtttaaggtttaacaccaggtgatactatagcaatcatacaaacctttccatggatcctgtccgatgtttttttgtctaagaaactcctatgacttcttcaagggttcagtaaatcttttagaagtccttgtaggagttcatagtagtacttacccaagattaatcagaggaggccctgaaggtatcggcccaacggccctgaaggtatcggctgtaaatgaccccgtgcgcaaaatcgagctcgctgctctagtggacgcaacataagtacatatatgggtatgaacttctaaataggatatggactagttccttctaaaataggttccaggtgcccttgtgcccagaatggtcatactgacaaatcaattccagttccattctaggattccatatattttatttaaagctaaaataatttaaaaacgaacaccttgagttattctatggatcttagtatggacgattattagggttactgaaatatctcctttgaataacctcgatgagaactacatcatgagatgcagaagaggaattccagaaggaaatactggtggaaagtcataaaatacctgacgggttcgggtttaaaaattttaaatttttcgtttcggatacgggtcggaaaagtcgggtttggtaagattcatgaattagagtaacaaccagaaagcttctttatgtatcagaaacaacgaatttatctattttcaaaactcaggttccggagcatatgtatgcctctctgacaggtaatttccatacgatatttaaagggcttgtgtagtctcaatgtttacccaaatgatctcaaattttgtaaggacggtcagaatctgaactataatcgaataagcggtgtgaagaaaaaactatattttgaatcccttaaatatccagttaaataaattgtttagaaaatgcatttttttacagaacacagacattactgaatatgcactagaggctctttcgcggagcaacataaagaaggtactccttgtaggtcgtcgtggcccactgcaagcggcttttactattaaagaactacgagaaatgctcaaactgccaaactgtgtcacaacttggagaccggatgatttacaagatttagaagaggcacttcccagtttgccccgtcctcgcaagcgaattacagaactgatgatgaaaagcctgtcggaacaaactgcccaacaatcgaccgccagtagcaatagttttcaaccgatatttttccgttctccggtgaatttcatcggaacgaatcgggttgaggccattgaatacgccgtaaataaactcgtcgacaatcgggccatccccacagatgagcgagaaacaattccaaccgagttggtgtgtcgcagtatcggttacaagtcggtcaacgcggactccagtttgaactttgacgatagcaaaggatgcgtttcgaatgccgctgggagggtactgaagcggacgctaactggaagcgaccaaacgatcgacgacattgaggataagtatgaaacaggattgtatgcctctgggtggcttgcgacaggccccactggagttatccttacaacgatgaataactcgtttggcgtggcagatacgatttgtaaggatttcaataacaacgttattcgagtaaaagaagataaaccaggcctggatacaaatggtaaaagggtagtcacctgggaagggtggaaactgatcgatgccgaggagtgccggcgaggagaaacgaaagggaaaccgcgggagaaaatagtcaagattgatgagatgctgagcctagctgatggcaaatgagacgcataaatggcgaagctataaaatggtacttggttgcgtatgacgtattgtggtaagtaatgaaattttttgaataattctaaactaaattttcaacacgctggcgtatgggattctatcaacgtattttagattaaaggattaaaattatattcatatcaatttatttgcgaaataatgccttgaacgagaagaaatttatttaatccgaacacgccggatagtgcttaccacttcaatcaaaagatcaaaagattgtaaccggactggaatatgatgtgaaaaccccggagaaatgcatactgtgcatttatggcaagcattgtcgtcaaccgttcaaggcaaaggggcatcgaaaggactgagtattggaactgatccactctgacttgtgcggcagccggtacttgctgacattcatcgatgaagttagacggaaactcgttgtttattttctgacgtcgaaaacggaagtagtcgtagtgttgtaagattattaggattttgcggagaacaaaattggagaacggatcaagcgaatacgaacggacaatg

SEQ ID NO: 739 - DNA, 964 bp, Aedes aegypti
tcagtttttggactcgcagtgagcctctctcaaaacataatacgtgggttgatggcacaaagtaaaaaaaaaggaaatcccgctagaaaagcaaaagtttaagcagctttaacttagatattttaaagttaatcaaagtgcgacgcgatggctgacctgaagaaggacctggacgagtatctgctgctgcagagcgatcagaagaaaagcttcaaactcgaaatgccaaagatgccctcgatatccactccagggctggtgagtaaactctttggcaagaaccaggaaagcgaagccaacagctggcttaaggatccccaggaaacatgctgccctaagttgagccgaatacaaaggatcgtaggatttgtgacttgccttggcctgggagtgttctgtatgatcgtatcgacattctacattccggtgttgatcctgaaggcaaggaagtttgccctattgtacacattgggaagcatcttcttcattatgagcttctcgttcctgagcggcttcggagcaatgttccggcagatgttctcccgcgagcgagtagccttgtccatatcgtactcctgctgcctgacggccacgctttactttgccatggttgagcaaagcaccgcgctgaccgtgctgttcgcagtggcacaaattatcaccctactctggatgatcctgggaacgattcccggtgggatgaccggagtgaagttcttcggacagatgttccgcagttcggtttccagtacgctaccggtgtaaaagggaccgtagttgactaatccatttttagttttgtaagaatatgtaagaatatctctgaacctaagacgtcactactgagagatctctgtgatcgaagccgaaatgaaaactgtattacacatattatatatatttggaacggtacatgtacaagaattcttcaataaaatttctctaactattccatgaggctaaa

SEQ ID NO: 740 - DNA, 3362 bp, Aedes aegypti
aatacccgcgaggaacgaatctccaacccacatggcggcaataacaatgacacgccgaacaatctcaccgtacaaattccgcaacagacgcgatcgttgctccggcactcgaacagtatgtcgtcgaatccgcactcgaactcgagttcaacgccggcctccccgcatctgctgtcgaacagctccagtggtcacctgcatcacacgctctccaacggaggaacgctgcatcatcatccccagtaccagagtcagtcgtcggtaagttcccaaagttcgtcgatcatttcggcagttccgccgctgcagcggttactcgaggatcacctaagtaagccgtcaccttatgctatgattgtgataccaaacaacgggggatattgggtagacggtactgatcacgatgcggggtacgacattccgtcacacactacctggagggtgggaaagatcgagtctgacgatacggcgaaatgctaccgacggttcttcatctcgagggagcactcaaatctggtcggacacgacgatcaactcggcccagtattgctgtctattaagtctgagaacgtagctaaccaagaccacattcgaatactgctccggctaagaaccggaaccatgcacgaaatcattccagcgtcttgtctagggtcgaatccatccccgatcaagatggcacgacttctgaacgatcagataaatgtagatagctttatgcccgtactatgtcccaaagcttcgacgttgattgccagctacgacgaacacgtgcttgtcacgaatttcaaatttggcgttctgtatcaacggtacgggcagaccacggaagaggaacttttctgcaacagtgatacgaccccggctctcgaagagttcctcgatctacttggacaacgaatacgtctccgcgatcacaaaggctatcgaggtggtttggatattcagaatggtcacacaggcgatactgccgtctacgaagtattcaaagagcgtgagatcatgttccatgtttccacactgctcccgtacacggaaggtgatccgcagcagcttcaacggaaacgtcatatcggcaacgacattgtggcaattgtattccaggaagagaacaccccattctcgccggcaatgatcgccagccactttttgcacgcattcatcgttgttcaaccgctggagcccaacacacccaactgccggtataagatttcagtaactgcccgggacgatgtaccgttcttcgggcctacgctcccccaaccatcagtatttaagaagggacctgagttgaaagaattcctcctgaccaagttgatcaacgcggagaacgcctgctacaaggcggacaaattcgctcagctggaactccggacgaggacttcactgctgcagaacttggtcgatgaactgaaggagaaaacccgagactttctgggggctgaccttctgggagcccccacctcacctaccccagaaactcccaaatcggaaagcggtttcaccggatcgcggttcatcgacacggtgaagaaggcgttgaacgcccggcttcgctcccagaactccgaccccacgaacggaagtgtcgaatccaacccaaagcatcacaactcgatcaagaaatccaaggagatctccgacgtgccctgtggaccgggacaagttgttaacatcggtcgatcactatcaaaaagtagtacgacgggctcgcggaagtctcccaacgattcggtggcctcctcgccggacatcacatctcgctgttcgctcaatccgaacaatctgaacaacaacaacaacagcaacgcatccaacaacaatcatcaccatcatcatcacggtggaaatggaggcaatcatcatggcgccggtgccaaggggctttccaatggcgtcagcaatggcaccggtaacaacaacaataacaacaacggcccagtggcaatgtccgaaactagtgacgactccagtttgaacagcgttgatctggatccgatggatgccggagcgacgtacatcgacagcgacaccgggctggaatcgatgtcctcggcggacgccacgaccaaggcctgctcgctctgcctggacggagaccgggcggaacgatcgacgaatgggggtggaagcgtgatcagcgtcagtgtcggaaccggaagtaccggaggggacagtacgcgggatcttcgcagcagtaccggaagtggcggtacgaacgttagtggtggtggtggtggtgttaccgtcggagttgccggcaacaccggaatgctgctggtgacgccggacgttgtgcagcagatggacggcttcaagcaggaaattacccggctgaagtgtgataaactggatctcctcaggcagaatgtgacctgccagcgtgacatcaaacgactacgggagcgtgaactttccctgcaaggtgacctggccgctgccgggaaggaaattcttcgactacgcgatctactgaaggaatatatgccgtccgccgcagctgaacctctctaaatccgtctcctcgagtcgacctcgaacggataatccaaatcctcccaccacatcctttttgcgggccattattgtcttcacaataagacgcattcgttcaagatagtaggcggtggagaaatggaagcagcattgtctctgctcttatcagccggctttcttccaactacaatcgtctaacatcagcttagcacacaaaatcgtcgtctcgtttttataatcgtcgccttcgtcgtcgccatcattggtgctggttatcgtcgtttgtcgttatggtcgtcatctcgtctgtgctgcttccgagtgcaaacatacgtattttgtttcctatagtgttatcctggaataaggattctcgaaaatctctttccctcctcattagagaagaaacaattaagttttaatatatttttttctttcaaactaatatatgagtgaagagagagagagagcaatcaacgtttacgagtgttttctgtaaaaagatctttttttaatttattttaaacttcgtaatctcttctgatataaaaaaaacctagcgcggtaagttttgttgcctttcgctttctaattgtagcacgttttggtaggtttattcttgttgaaacaacatcgaagcagccgactttttcacttttgcactttgatctagttctctctgctttccgtcgttgaccatgggtacgggtgagcagtattgatcaaccaatgtttgctgcgattgctctttattgtgattgaaattttagcggctttgctctctgttgctttccaattcaatgtcaatgaacgaaatatgtaaataattgttttagcttgacgcttcatcttcgtgttgactttgc

SEQ ID NO: 741 - DNA, 2107 bp, Aedes aegypti
ctgcgagatacggcagccgatttagaagtgctttgttaagcacgtgtttacgtgtttcgttgatttgttgccgccacagaaaaaatgggcaaaaagaaggctaaccagttgggtcgatccctgatcaaggaccgcttcggacagggcaaccggaagaccgtggacaacaatagtatgctacacacaaccgaagtccaggacggatacgattggggccgtttgaacctgcaatccgttacggaggaatcgtccttccaggagtttttgcgaaccgccgaattggcaggaacggaatttcaagctgaaaagttgaacatcacctacgtcaatccgaaggccaaggttgggctgctgaccacaaacgaaagggttgccatcgagcggaaacaggtggacaagaaggacttgctgaagattccgagacggccgaaatggaccaaggaaaccactccggaggagttgcaaacgatggagaacgaaaactttctggactggagaaggggattggccgcactgcaagaggaggacgggatgttgatgactccatacgaacgcaacttggacttttggcggcagttgtggagagtggttgagcgatcggatatcgtggttcagattgtagacggtcgtaatccgctgctgttccgtagcgaagatctggagcggtacgtgaaggaagtggacgaacgcaagatgaatatgattttgatcaacaagtcggacttcttgaatgaggatcaacggacggcttgggcacggtattttgatgagcagggcattctggtggcgttcttctcggcggcggaatccgtggaggaagccaagagggaacaagaggaacgggaagcacgggaggatcaaagcgaggaggacgaggcagatgaagtgaatggcgagctggatcagaagctgaagggattggaggtgaaagttgaccaggtggaaaaggttcttgagaaattggaggagagaatagagcagctgacggacgatggcaatgcgacctcaacatcagattccagcatcaaaatacgtaataatccaaaaattctaacgaacacggaactcatcgcgctctttaaaagcctccacaaagaagagcgtgtcaccagcggattggtaacggtcggtttggttggatacccaaacgttggtaaaagcagcaccatcaacgcggtgttcctcgagaagaaggtctcggtttcggccacacctggcaagaccaaacacttccaaacgctctacgtagacagtgagcttatgttctgcgattgccccggtttggtaatgcccagcttctgcaccaccaaggccgacatgatcctgaacggtatcctgccgatcgatcagatgcgagaccacgtccctccggtgaatttgctgtgcactttgattcctcgacacgttctcgaggacacgtacggaatcatgataacgaaaccattggaagcggaggatcccaatcgaccgccgtttgctgaggaacttctgcttgcattcgcgtataatcgggggtacatgacggccaacggacagccggatcagtctcgtggatcgcgatacgtgctgaaggactttgtcaacggtaagctgttgtactgccacgctccaccaaatgtggaacagaacgaattccacaagtttcccgagcggcagaaggaggaaatggacgttaagctgctgccaccgcgacaacagagagccatgaagatgggaaccaccaccggcaaggacgtcgacgcgcagttcttccaggaccgttcggcgacgggcttcgtcaaggggcgtagcgattttcccaatgtaagggtaccgggtgcggccaatccgcaggaagccggtgtcatcgtggctggcaaaccgtggaagcaccagaagcgagagaagaaagaaaaactacgtcggaagtacgcccatctcgatcagcattgatttgggaaggaagcgagccagggagagtgggaacgagagtatgcaagaacgaacgagtttcaataaactgtctttgtaactttattgtgtttgttgtacaaaagaggaaattacacatcttttatattaaatataaatatgtatcataatatagttcgcttacagagtaatatcg

SEQ ID NO: 742 - DNA, 1946 bp, Aedes aegypti
gacaaacgctgatccaactggacacggaaaccgcacgagcatttgaggcgaaatgacgataagggctatcgtgctcggaattttattgaactacattgttggtagtcatcagatatcttcgccaaacgatgaccactactgggcaggagtggtggagttcagcttcaaagagagatccatgaacaatgagtcaggtttgatcagcacaccgaagaatctggaaaagtataaggagatcatcaactctcctgaagctgatccgttggatatcattgtcttccccgagtatggcttgagtcaagtggaaacggcttcgtttgtaccaaatccagaagacctcattactccttgtaacaatctggactacgagccagtcgtgcgagatctgtcatgtatggcccgggctcgccagaagtatttggtcgtgaaccttgtggagaaggccttttgcccagagaaagacgattggcgtccttgtgcaccgaatggcctttaccattttaacgccaatgtggtattcgaccgacatggacgagtgatcgctcgctaccgcaaattcaatttgttcggagaaccaggtattaacatcacaagatggtccgatataaccacattcgatacagatttcggagtcacgtttggtacgtttatttgctttgatctgatgtttgacgaaccggcattgcagctcgttcgacaaggaattaccgatttcatctttccgactatgtggttttcggagttgccattcttgaccgctgcgcagatacagcagtcttgggcctatgccaacaacgtcaattttttggctgctggatcgagtttcccggagattggcagtactggcactggagtgttcgccgggaagcgaggaagaatcgttacggtaatgaaccacaatgcagactctaagctgtacgttgctcaggttccaaagatcagccgacctcaggctacgatcagtcgtcaaccggttatcaaatattcatccagtgagatgtctaaccttaagttgaaacgagaccaaatcgatggctatctgatgtcaacacttcctctgaacgtgagtttctatgaagcttcactgtgtcagggctcggtatgttgcaacttcacattgaactacaccgttaccctaccaagtggacctaatcagtcctattacagctacgtgctcgccgtgagtgacatcaagcggacattcgacggcttctccgatggaatgatcacaacctgtgccattttcgcctgtaccgacgccgaagatcacaagacctgtgcaacacggttcaccgatccggcgacaacggtggccgaagcagtccgcttcaactccatcgacattgtgggagaatttccaggtggattcaatgttttcctgctaccgaacagtgtcgacaccagtattctgccactggaggttgatgagatcgagtacaacgagagattattccagcaggaagaggaactacgaaagcgaattgagtacaaattggtcaaaccgcgatcagacctgttaacgtttgccatttggggacgacagttcttggatatcgctagcagctgtccagcagcggttggcaacgttctgttagtactgtttgtagctgtttgcagctttatagccatataaaagaaaagtcatcgcatgcaggcttaaccttatagtatgtcaaataggttatacaaacaatattccacctttttagaagacattcacatgaagaactgtagaactgcgtttcagcgtgctcgtcgtattattcatcacatgaacaaaatcctctcaattcatatcaacataagaacggattcaaaagtccatcggattcaagatcaataaagactactattgactaaaatgaaaaggaattgtttagtaatttagatggatttactgtagatgccatttgattaaaaactgcagaaaactatggaagaatata

SEQ ID NO: 743 - DNA, 783 bp, Aedes aegypti
aagaaaaaaaaatcactgcaacagaaatcaaacgcaaatccatgtactgatgatataatatttaatataatatttttaatgaaattcggccgcggtggaacagcagcgctatcatgatttcgtatgtgaagatggtcatcggcttggtggcagctgcaaaaacagccgaactcggcgctgctggttactcttggcaatgaatgaaccagctgcaaggagaacccattgttccggatcacctatacgtggacatcaaaccaaaaagtctcattcaccagcatcaagcgtaggccatcctgaacaacagcctggatccaagaagcaagcgctgaaagaaagccatctctttgaggtttatttagctaagtaattgctgcattcatggactttaatcagaatatgaaatgtaagtgactggatcaccgatgactaatcgcaccacctcaacggagcgcgagcttcgaaagcattgttcaaggcaaaattgtgccacgattcaattttttattttaaatatcgaataaggcaatcttaagctttaaaaaacatttaaaatattttgtcttcaatgaaaattatttcttaaattgaataagtcacaatgaaacaagaaataagtgtagtataaattcaattccaacagaattttgtctacacttattttcttctttcattgtttcgtattaaatttattgatcaattattctttaacggtaaaagcataaagaaacaatacgatattaggttaaaatactatatggcacaataaatcaattattacat

SEQ ID NO: 744 - DNA, 5630 bp, Aedes aegypti
aaaagatctgtcaaacaaagacgttttttatccgcaccgcaaactgtttacggctttgttatctggaaacgtgtgtgaaattcagtgaatttttaaacttattactctatgggaaaattggaaaaatagcattattcttgttagggcaagtgcgaaggatacccacctcaattccctcctaaatcggaaccgttatgaccagctagtagtgttaaaagtgacttgaaagtaattcacttgggagccgatttgaatccgggggctcgggagcaatggaaaacctcaactttcccccggtggaattcagccgaccggattacagtgagccgacgacgaccatcttccaggagtttgcgattgtggtgcgtaattttcaccacttcgagcagattccaacggctcggtggctttcgttgctgcaggaaaaggccctcattcgccggaagcagaaccgaagagaggcggacaggttgcacaacttgacggcacagctggccgcaaatgacgagctggacaaggcaatgaaccacatcacgcaggccttgtaccgatgtccggcggatgacaccctggccaaggccattctctgccagaagggggaactgttgaggcggaaggagcgaatgcaggacgcgatccggcatctggagatctgtctgagaatcgaaggggaacggttctcgtatgggacgtatctgtgtttattgaggtgctacaaggcgacgggaaatggtcggaaggtgcgccagattatggagcggtgttcggagtttgtggaccggtggaaggacgaatttcggcggtatgattcgcagctgaagagtgaacccgataggcacatggaggacatgaaaagggagtttgatcttcacgccaactgcattccacaggagtcatacaacgataaagctgcccaaaacgaacctgtcgtgcaggacgaatacttcgaggagattgacttcgaaccgttcatggggttcactacggataaggaaatttacggtgcctccatggcgtgcagtttggatttcgaggactcctcacccaaactggtcgccaacacgttcataccggaagggtcgatcgtgctaatagaacgacccttggcttcccacctggagttttccaaggtgcaatgctacacctgccatgtcgtccaaccacacctgattccctgcttccactgccaagcagtgttctactgttcctatcagtgccaacggcgagatgtcggctaccatcggttcgaatgccgcggctatcagctgctgttctttcctctagtcaatggcatcctggagatccggatgctcatccgcaccctcaatactttgaaacgaatactggctgtgaagtcgtccgcgagttataaaggcccaaggtcagcggacgaactgttcaaggttctgctggaaggtcgggaggcgttcgcggatctgttcaatgcgttgctcgtcccactggactattgtgattttcgaccagaggacttcgacgcactcatgatcaagacggagaaattgctcagctacgttaagttcgatcggaaagtgagatcgcagtttttcgatcagtaggaagcagttcgacgacttccagtttgatatattcattggaggtctcctgcttcacttttgtacccttaccatgaccaaggtgcatcggttgaccttcaatatccctgccactgaagatttcgtaggtcgaatagaagacttcgttacgatcggagatgataatcgggaagaatcgctgcggaaaacaatcctagagacgctcgagcgatacgggagggaaccttccagtattctacgggcatctatggacaccgatcctctgcgagaaggcattctcaaacacctggaagttctcaggagtgacttggaagatagtcgcgagtccaatgacgaatcggccgccaccgccgatgaagattcctcgacccgattgtggaccagagcgaacgtcgtacgcctgtggcaatcgtgtctggacggggcaggaatggccaacgttcagcgcacctcattcctcaatcatcaacgggagcgggcggaagacgttgtggacaaagctctgctgcgattcttcgacagttacttcgactactttggcgaaattccgatgtgcagcaaagatcgattcttccccaacacgctgcgggcgttctatccgacggccatgaacatcaagcattcctgcgggccgaacctgttctttgccatgatctccaacgggctgtttgtggctcgggcccgtcgcaacatcagcgaaggcgaagaactcacgatcaaccacggtccgtactacaaaaacgctcccggggagaagcgccgtgaatatctgcggaagatctacatcaactgtgattgctacgaatgtggccaaattgaagaccattggactcgttaccaacgcgtcaaatgtgaggactgcatgttcaacggcgacgcaccgcacacctgtccgcagtgtctccaggtgcgggaacaaacgccggaaatggaactcctgatccaccagttgcagagcatcgagtccagcctgtcgcggaaccatttgccgcagttgatcccactgtcgatgctgggccgaacggctgggggcctacagacggccaccgcttccggcaagcgcaaagtggagttgctcatgttcttcgagcggatctggctgatggtgtttgtcgacgcgaccaacatcccgctgtacaacaatctcaaggagcagctgtcgtgttttgcggatgaagtaatccgggactccatcgacggagtgttcatcctggagaaacgctgcaaagccatcatcgacacgctgttcccggaaatgagcgtcttggtggcaaacgagtatgagctgatcgtgcgccgggtcgtcaagtacatgctcccggccaagtttctcggggtggacatgcggcaggtgcaccgaacgatcgatctaacccgatcgatgatcaagcacgcctttgtgatactggagagccacttcctgtacgacgacgacagctatcggaagctgttggcagtggagtactggctaaggacgttcgagaacaacattcgatcgacggaagccaacgacgagagcgaactgttcctgtcgttgatcggagcgttgaacggtacgagtgattcaaacgatcacaagaaaacgacacgcgcgaagcgatcgtcacagaagaagcaattggatgacaccaatcagaagaggactgatgaaagcggaaatgtgagtatagaagatagtggtaacagtaccggcacgaacaccagtagcgatagtatcaaaacggtgctggtgatcaatggtcacgatcgggatgatgcggagaaagtgaccgcggacgaatcgccgaaacgcaaggacaccggaaccgttccgaagcccagccgcacacccaaacaccatcgaaaggtatgagtggtgcctttcagttttgtaggtatgtctaaaagatctaccttagttgaatagggtattttaagtttcgtatgtagatagatcgagaaccgatcgagagttcattttaagggctgttttatgcgctcgaattttagcaaaattgtttaacagcgtatcgaaagcattacgcctgccaagtcaaagacaacgcattctcactctaaccagtagggtaattagtagtttaaatattaacaatacgaagaagagcagaagccgctgaacaaatcgaataagatacgcttgagaaaaaaaaatacgagacggaactgtcgagaaacgttttagggaaacaaaagacttagatgtacgcggtatgttacgaggttcaagttaatcattgaaaagctgtcaatgataagatccaattggacgaatgaccccaaaaaatgctattttgaaaagaggaaaagcgaaacgacagtgattgctacgcattgttgcaattatattgtagcaatttgttcagtcataatattctcatttaggacggtttaattaaatccatggaagaagttttaattttgttacacgcgaagcaatcggaaactcacacgactgtcccaccgaaattgctttcggtgaagagcaattattttacttttcaatagtacctaaataaatgataattaacattaatctctatttgagttatacttcggcgacaagtgctatttactgccttaaattctgaatgctgtttatatgattacagatttcaatatctattctagtcaattatttgctaaagtgtgtacttatgtgttcaacaactatgttaaagcatcttagtatagaaatgtgcatatgggatattcaatgtcttgctttaaatttgagagacggatcctacagttcgatactcgctatagttttctgtggttgaaaaattcagcaaatttttgctaaacatttcagccatgcaaaattatgcgaaattcaacggaaaaaatgggtgtggcaaaagagtatagataggaaccatattcggagatcattctttgatttgaccaccggacaatattgtggcaccactaggtggcaaatattatttcatataaccaaagccatctctgacgaattctctacgaaaattcaaaaagtttgatgtgtcgcatgatatggctctatcaaatgtatgaattaaccactctcacgggactcccggactctacgggattgattcctcttaaggttccaccagggctatcaccaggacttctttcagggtttcctccaaagattagccaaggattttccaggaatcagaaatttctctagggttttctccaaaggtttcaaggattattctaacaggaatacctcgtagaatcctttgaggaatggaatggagaaatggaaagagaaattactgaaggaattattaaataatactattaaattctacgaggaattctttaaagaatctctgaaggtttttctagaaaacttccacgtttatgatggaaaaatttctgtgggaatgtctgaagaagtctttgaagaaatcccggaagatatccttgaaattcatgaagaaatccttttacttcgacgcggaatctctggaagaattactcgtggaatccctagaaaatcaactggaagaaactcctggagcgatctctggaggaatccctggacaaatctgcagatattcctggaggaatcaatagacatttctggataaattactgcaataattgttaaagggattttttcctgaaatttggagaggaatcagtcgcggaatctggtctggtggaatccctagaaaaaaatactgggtattttccctggaagaatgccttatgaactacttctaaacgaatctctggagaaatctggaggaatttgtgaagaaatacctttaggaatttcttgagaaattactgcaccaattcgtaaaaggattttcactgcaatttctagaggaattagtcgcggaatctatggagtattcactcggggaattcctagagaaaactatagagaaattcttggaagaaactcctgaatgaatctctggaggaaccgttggaaaaactgctaaggaaatccttaaaccaatctttaaagaaatctcttgaaaaatttccaagaatattcccataggaatgttcagaggaattcctaaagacaagcgtgtgctagaataaggg

SEQ ID NO: 745 - DNA, 1107 bp, Aedes aegypti
atggctacgacgtgctatcagcatgcaacactagtgctactattactatgcgtagtcacatgtcccacggagagtcgataccgggaaaaggatcccaagaaatcgaaatctgcacagctgagtcaggtccctatcagtgaaacggtgccttctctgttgaacctatgttctggggatcgtgaaatgaagattgtgtgccactgtagtccagacgatcctcacgttaaagctcaaaaagccaactgctggatattcagcaaagacctatcacggaaggatcccaattggttggcattccaaactcaaacgacggtagaacaactgaagataacagttcaaaagattggcaacctaacctacataccttcagatgttctgataacgctcaaatatcttaaacaacttacaatagaatacggaatgatcactaatctgtcagagtacgcgttcggtaatctaacggagctgcgaaaccttacgcttcacaagaatcagatccgactgatacatccgtttgcattcgccaaccatccattcttagaggagatcaacctggagcggaacgaaatcgttgacctagacaaaacagccctggtgaacttgccacagttgaagaaactcaatttggacttcaacaatctgacgatcctacatgcggacgcattcgtattcctaatcaacttggaagaactgaatgtagaatccaaccaagtgtcgctgctcacacgggaaagcttcaaaggactgggaaatctgcggttcctgaagctgtcggcgaacaacatcggctacattggcgatacggtgttcgcagaactgtggagtctgcaggagctgtacctggacagtaatcatattgagaaagtatcggctcgtgccttcgatgggttgaacaatctgcggacgctgaatttggaaaacaatcgactgactcggctggagcgaggcattttcaccggagtgccagcggttctgacgttgaatctcaactcgaaccagctggaaacgatcacctactacaacttcctgcccctgatggataacttcgtcaacagttcggcggtgctgtatgtgagaggtgagttcatgaaacgaatgatatattga

SEQ ID NO: 746 - DNA, 621 bp, Aedes aegypti
atggcaaccccaccggacagtcccatcgaggaggtcgtgtacgagctggaaccaactcgggcccccaagccagtgccggtggcgctcgaggacctctgtaggttaaccaagtttacccgccaggagatacgagtcatgtatcggggcttcaaaacggaatgtccggacggtgtggtgaacgaagatagttttaaggatatttatgcgaaatttttccctcatggaaattccagcctttatgcacactatgtgttcaaagcgttcgatgttaattgtaacggatccatcacctttcgggatctgctagtaactctatcgacactcctgcggggttccgtatacgagcggttacgatggacgtttcgtctgtacgatatcaataatgacggctgcatcagccgggctgagctaggcgaaatagtcatggcagtacacgaattaatgggtcgaaggcccaatcacccggaggacgaggtgaaggctcgcgaacaggttgaacgtgtttttcggaagctggacctgaatcaggatggaatcatcactatcgaagagttcctggaggcttgcctcaaggacgacgtcgttaccaaatcactacaaatgttcgacacctgcctttga

SEQ ID NO: 747 - DNA, 1941 bp, Aedes aegypti
atgttattaatcattactatttttttttatttttgcagagagcccccatcactaggaaggcacgaaaattcagatattatcctgaagttaccaatgggcaaacgcattcgtgacatccgttggttgtcggtttggtgcagacgattcacggtcgattttggcgaagtattcatcccaccaggcctagacgtaccgaagccacgtgttctgcccgagttcaaacgcctcgcacacggactccgctcgagcaacatcagcatcctggatgcgaaaacattctacatcccgaaccttcactacgatggtgctggacctgacgcgtacttttgggtaggcaatggctccgaaccgaacatcatgggtatcaaagttcctaatgaaattggctcgctggaacccctgcgaggctatcagggtgaagatatcgagatccaactgcccggtaatcttaccgtgtacgacatcgattggctggctgtgtggtgcgtcgaatatcggcacaactttggccatgtctacattccaaaggacctggacattccgccagcacttggccagacgaaaatagcgacgacatcatcaaccgtgccaacggtgatatcgttcgggcatccaacgccaacctcgaagccatctgtgaactgtaaagaactgctcctaggcagattgaacgtgatgtggcaggttgtcggagaatacgttgaaattgagttgattggtagaatcgaggaagatcagtatatggcctttggcatatctggccgaaatggacaacctcagatggtcggttctgacgtggtggtggtgttctatgatcgaaagcaacggaagttccgtgcggaagattactacttgtcagcgttgtcccagtgtgacggcaaacatggggcctgtccggatgagcggataggtggaagaaatgatgctgagctaatttctggagaccggcgtcaaggagtaaccaaaataaagtatcgtcgtcttcttcacaccaacgaagcggccagtgatcaaccatatccaacagatcgacaaatttcggtggtagcggccattggtccattgaattctctaagcgaagtgaatgcccataacttcagagatgtgacagtgcaggacatccagatcaacttctcctccacgaatgatcacacgtgtacggatgctttggacagtgtaattgatcctaaaggaccaaagatatgggctaaacgaatcatcagccgggaatctgttatcaacgccaaaatcggtccaactggtggaaaacggggttacactcctatgacgggtcacccttcatggggaattgcgtggtacctgaacgatatgctcattccagaggtgtacgtagaacgaggcaaaacttatacatttatcgttgaaggaggtgatgatcaaactcaaccagccaaatatcatccattctatataactgattcaccagaaggtggattcggtcagaatactgcgacgcagcaagagagagaaacggtattcgcgggtgtagcctatgataaggatcgctttccatatccaactgcagttggtcggtactgtgagtggaaacacaaaaccgtggacaaatcggagcaaattgaaaccttcgaggagtttatgaccactttgaaactagagtgcgataatcctgatgcacaacctggatatctaaattggaccgtgccatatgatgctccggatatggtatactatcaatgctacacccaccggaacctgggttggaagattcatgtcgttaacgaaggtatgtcgctagagatcaacggttcacatggtgtgtccttggtaagttcgttcagtataccgctgttggcgctgaccatgtttatcggaaaaaaaatcgtagttccatcaggaagttcctccggaagttcttttggatggtttctccggcacttccttctggtagtgtatccatga

SEQ ID NO: 748 - DNA, 1999 bp, Aedes aegypti
ggaactgctgtcgtttttggtggctagtggtgaaaaagtgcgatttggcaggctacctaccccgttgaaagagtggccaatcgtcacggttccgtttccgggtcgatttgagtgaatacggtcgcgaaaaagtgcattttccggcagcgggaattggcatccgaaaaatcggtcctcgggtgaaagaaaatttctcctccctcaagcgtgaaaaagtggaatccagcagaagcggccaaaagcagtgttgtgttgtagagagcgaaaaacgaaggaattgggcttctggtggttgtgtatgcgtgtttccccgttgcagtgagaagtgaagaaggaaaagtgcgaattcagcccaccttcgattcaaaggcagcgaaaggccaaaagtgtctctccccgaaagtcccgttggaatctcggatttaggggcctggtttttctggtgttgggatcggccaacagttgtgtggaagtgctcgggaaggtatttcactgaaatccgacttcccagaggcgagagtgtgagtcaagccgaaagagtaaaagcagaaccgatcggaagagtgagaagaatcaatcgcagggacaatgtcgtcatccggcgatttcggcaatccgctccggaagtttaagctggtctttctgggcgaacaaagtgtcggcaaaacctcgctaatcacccgatttatgtacgacagcttcgacaacacataccaggcaacgatcggtatagacttcctgtcgaaaaccatgtacctcgaagaccgaacggtgagattacagctgtgggacactgccggacaggagcgattccgatcgctgataccttcgtacattcgtgattcaaccgtagccgtagtcgtgtacgatattacaaatgcaaactcatttcaccaaacatcgaaatggatcgacgacgtccggacggaacgtggcagtgacgtaatcatcatgctggtgggcaacaaaactgacctctcggacaagcgccaggtctcgacggaggagggcgagcggaaagcgaaagaactgaatgtgatgttcatcgaaaccagtgcgaaggcgggctacaatgtgaaacagcttttccgacgagtagccgctgcactgcccggtatggactcaaccgagaacaagccaccagaagacatgcaagaggttgtgctcaaggattccccgaacgagacaaaagacccggagggtggctgtgcatgctgaacctggcaaccctgtcgttcgcttttggtttactttcattttttctacttcagtagggaagttctctacgcgagcgattgtggtggtccacggaaccaaccagccccccctcaatctgccgcgagggaggtgtggattctggagggggcgaatgcggacggaatgaggagactataactattaaatgatgattgcttcggcgtaaaggggggtgcctacgatatgtccattcttaagcgatagataaagataaaagtgaacattttatccatatttttatttattgataaagtacgcgctgatggttgtaactgggtctagtaatgttttgcgaagtcaactgatttaagatatgacgcgagatagaatttatgttgttgtatgctaatattttttccttcaactatttgtgaaaatacgaaccgtatatatttttttcttgtgtttatagagggtattgattgattcgcaaccacgtgattgtttaggaatcatattctcttctttccgcaattacttacaatcactaccgatatacaaatatgcatatatttaatacgcagtcgactaagttgtttctaagaataataaagctactacgatactttccttaattttacggtttagtttttagtttaacacatacggaaatcaaatcaaaccgagtcgtagaaacagtgtgaaatggttctccaaacaggaaccatgctgattgcttattaaagttattaacatttaggtactgaccattgaataaagtgaccacagagtacggaattat

SEQ ID NO: 749 - DNA, 1352 bp, Aedes aegypti
cgtcaaacgttaaaaccaaaacatccaaacttctgactcagtgcagctgtttgttttttctttctgcttaaaaatctatcgtgtgatactcccaaattctcgccgcttacgcatccaggatggacaattttccggagaaattgcccgacccggaaccgattccaccgattgatccgaacaaaacgccgaagcaaatctatttcgagcttttgcgcacctgggtcaaccatgctcaaatgcagcagcagattcaagcctacttcccgtactatctgatgaacaactatccgcagcttttccagccgacttccggaaccggtacgagtgggcaggtgttgaccagcaatggcggggtggccactggcacttcaacgggaagtcaggtgcaacctcaacaacagcaacagaataccaatcagagacgagctgccgaacttttggaacccgcccgacaggaggaaattatcaatcgaaacggaggctacgagtacgtaatagcaccgctctggaagcgattcgtggcggaggcgatagatatcgtgatcattttcttgctcaaagtcatgctgacaatggccttcgttgacttcttcgatattaatttcttggacattgatatcgatgccatccgcaattcgatcgaagaagactacaccgaactgctgtcgttcacctcggagctcatctttctggaaattataacgaaatgtgcggtttgcatctacgaaacgctttggaccatcaacggaaatggtcagattggtggagcgacgcccggtaaaatgctgatgggaatacgaatcgttcacgtagaagccgtggtcctgctggatgtccctccaccggtcgccaacaatcagatcccgatcaaggctctgctctatccggcgacggatccgggcttcaagcgcgccctgtgccgatcggtggccaagaacgctctgattgcgctcttcttcccgatgtgcttcctgatgttcttcttcaagcacaaccgaaccatgtacgacatcatgaccaagacgatcgtggttgaggacaatccggctccggtgctgcgaaggcgctaaatgtccggggtcgtgacccaaattatagagaggtaagtttttaaagtcattaatattgtttcctatgtgaaccacacagaaagcacgtagtgggtagtcaaattgtgcaagcagggattattgggattccagtgaacgtaagttgtgttagtaagaaagcgttagctgcgtatggctgtgttgccttgattaatgttgaatggtcggtttaccaaatattttctttcgatgtaggattacatctatctttttattcaaataaacatgaaagtacaagtatta

SEQ ID NO: 750 - DNA, 1812 bp, Aedes aegypti
atggtgctttccaaaaatgccgaaaagaagattcacaagaaaatcaagcgctgccagctgctgatatcacgtgaaatcgatctcaagttcagcgatctcccgaccgagtgcgtagtaatctgcaacgccggattgtccaccggtctccagcaggaggtgctcctcgacgagatccttcgccatgggacgaccgtggaggatatcgtatttccagccggtaagtcgtactgctatcttagatttggatcagtccaggaatcgaaaacgacttacgaagctatgaacggaataagcgccctcgggcaggatggatgcgtcctgctgatggcgtactgtttggcacttccggaacggggttgtgaatcagaggagtacgctcttccgccgggactggtgctaataacggatttcgttgacgagagcttagaagggaaacttttgggagcgatcgattgggaccaggaagaggaaacaaacggtagtatgaagcatcgtagcgtaaagcacttcggtttcgagttcctatatgggacgaacaacgtggatcgcagcaaacccttggaacggaggattccttccgtgtgcgacgagctgtgggtgaagctgaaagcgctccatccggaactcgggtggcatgttccggagcagatgacggtcaatcggtacgaaccgggacagggcattcctccgcacgttgatacgcatagtgcgtttaaggatccgataatttctctttctctgggcagcgatatcgtgatggatttccggaacacagaaggtagacacttgaacgtggatcttcccagaaggtctctgctggtaatgaccggtgaaagcaggctgggatggacccatggtatcacgcctcgtaagatggacactgtccgcttgaacagtagtctatccatccggaaacgtgagctcagagtgtcgtttacgtttcgtaagctcaacgatggcccttgtcggtgtcagtttagttccttgtgtgatacctaccagcaggaatccaaggaaagagccgatcggatcaaagagaacgctgcccagctggagttggaaaatgtccacaaagtctacaacgaaatagcgaaacactttagcgaaacaagacactcgccatggccgcgaatcgccaatttccttgaatcgcttaatcccggatctgtgctggtagatgtcggatgtggcaatggcaagtatctgggcctcaatccgcacgtcattggtttgggatgtgaccgaagcgatggccttctcaaggtttgcaccgaaaggggattcaacgtggtgcaatgtgactgccttgcgttacctttcaaatcaaactgcgccgatgcttgtatctgcattgccgtaattcatcatctggcatcgttggaacgtcgaatgcaagccatccaggagatgtgtcggattctgcgtcccggaggcagggctctgatctacgtgtgggccaagaatcaggaggccaacgccaaaaaatccagctatctccgccagaacaaacagaacaataagccaacatcgcagcagaaccgaccggagaagattccggagccgatcgaaggggacactacgttgccggtgcacaccaatcggacgcagttccggcaccaggatgtgttggttccctggaagctgcgtgacgtcgaacggcaggagaaggaaacgaaggtaacttttctgagatattaccacgtgtttgaggagggcgaactggcggaattgtgtgggaaaattgtgggaatcagcgttgaggatagttattacgatcagggcaattggtgcgttatttttaggaaagaatga

SEQ ID NO: 751 - DNA, 426 bp, Aedes aegypti
atggcgcaacagcaacggagcgtaaagttcgcaaagttcgacaatccggcctcggtttcggtgaccccgacccggcagctgtcctacaactatctggcatcggtcaacctgtggctgctgctgtttccttgcgatctgtgctgcgactggaccatgggaaccgttccgcttgtggagagtttcaccgatcctcggaatatggccaccttgggagcgtacagcctgatcggagtgctggtttgggttgcgtttctccagggcgatcgacatcggtctggtgtgatagtgatgttcgcaaaaagcaaaatcaacgtagcaggcaaatatcttgagactcggggctctttatctcctccgatcgaagacatccatccatttggcggcgtgaatgttgtgtggtgtgttcgccacgtgtgcaatgcataa

SEQ ID NO: 752 - DNA, 2810 bp, Aedes aegypti
atgggctcccaccatataggtataccgagagaagccacactgtccagggttctgccaaagttctggtctcagggccttgccttcatgatcctaccgttcctgccagcgtcaaatctgttctttccggtggggttcgtcatagccgaacgagttctctacatgccttcgatgggattctgcattctggtagcctacggatttcaacttctctcagaacgatggaaccgcaaaatgacctggtgctgtttgggcttccttctgctgagccattccgtcaaaacctacaatcggaacgcggactgggagtcagagtacacgatctttatgtccggtctaaaagtgaatcagcgaaacgcgaagctgttcaacaacgttggacacgccctcgaaagcgaaggcaaattcgaagaagcgctccaattcttccacaaagcagtgagcgttcagcaggatgacgttggagcccacataaacgtgggtcgaacgtacaaccacctcaaaatgttcaaagaagctgaacaggcctatctgaaggcgaaatctctcctaccgaaagccaaacccggggaatcctaccaggcccggatagcgcccaatcatctgaatgtgttcctgaacctggcgaatctgatctcgaagaatgccacacggttggaggaggccgatttgctgtaccggcaggcgatcagtatgcgatcggattacacccaggcctacatcaaccggggtgatattctaatcaagctgaatcgcaccaaggaggcgcaggaggtgtacgagcgggcactgctgtacgatagcaccaatccggatatttactacaatctcggggttgtcttcctggaacaaggaaaagcctcccaagcgctggcctacctcgacaaagctctggagttcgatccggagcacgagcaagcgctgctaaactcggccattctgctgcaggagcttggtcgacccgaactgaggaaaattgcccgcgagcggttgctgaaactgttggctaaagatgaatctaatgaacgggtgcacttcaacctgggcatgctggcgatggatgatcgcaacacggatgaggcggaaaactggttccgaagggcggtgcatcttaagcaggatttcaggagtgcgctgttcaacctggcgttgctgctggccgatgaccaccgaccactcgaggcggcaccgttcctcaatcagttggtcaagtatcacccggatcacattaagggactgattctgctcggtgatatctacatcaacaacatcaaggacctggatgcggcggagaattgctacaagcgcatcctccagctggaccccgtcaacatccaaggtctgcacaacctctgcgtggtgtacgtcgaacggggcaaactggcccaagctcaggcctgcctatcgcacgcccaccaattggcaccgggtgaagattacatcctgcgtcatctgcagattgtccaaacccgcatccagcgactccgggggacaccggatccgagccgggagaaggacatcgcctttgccgagtacgacccccgggagttcggtggcagcccgttgaccgacgtcgacttgcaacagctaatcaatagcaagagtgtaaatagtaacgataataatgaggaggatgttcaacagggagaagagagcagtagtagtagcagtagcagtagtggggaagctagcagtaataatgataaccttaataatctgaaaacatcattacctcatgcggatggtgcagatggcgccaccaaagtcagtgacggcagcagcccagacagcagtgatcctatttttatcgattcagaagacccaatctcggcgacggcatcggctggggatcctctagtggccaacgaaagccaccaacagcaggagcataggcagcctaggataagcgaaactagcagtagtagtggtagtggtagcagcagtagcagtagcagtccccaaacccatcaaaatcaccaccaacaacaccaacatcagcatcagcgtcgaaggagaagtaattcccaccagcggcaccaccatcaccagcatcgagagcatgccgatggggccagcgaccggttaggagggaaggacttggatgatccatcgtccgggatgtcatagcaccagattcttaattacaagttagactgtttcaaaattaattaggaactgaaaactgtggactgacaaaaaataacatcaacgccagcgcggtgacgacgatggtgtgtggtggtgttgctgctggctgctgataaactaatgattatgatggtgttgttgctgtgtgtgggtggatggatgggatgttgtgcagatgaaagtcgcggcggtccccggaccgttattatcagagataatctgccatgaaatttttgttcaccagtcgttttctatggctaagctgaatgtacagtaaaatatatcatcaaaacttggttcaaaattggtttgtatagttatatataatctctaggagatgttttcaataagaagatcaatgagattttgtgttaagctcgtgatgtaactatcaaaagcattgagatataataatttgttgaaatgttgtcaacgaaatactaaaaataattgccgtgaaagtttttcacaattgacttatttgtcattggagtaagcgatataagtatagggcaagacttagtttagttacatgttgaaatcggctccgtaatgctttataacgcttgagcctacgaagttaatggtgtaaaacttttatagcatggagctgcattttgtcattgacaacagttgaatatacatattggattataatgcctgat

SEQ ID NO: 753 - DNA, 1426 bp, Aedes aegypti
atgcaatccagttcgatcaacctgttcagagcccttctgatcgttgcgatgcagttggctctgctttcgcttttcgtcggtcgagcccacagttcgccgctggcctctccgggttccggtagcaatgcagatggactattacatcacacccgttcccggtactgcggccgaaagctgaccgaaacgctggcccttctgtgccaaggccgatacccgatgatgagccatcaccgctcagaatacctctcggaccagccgcaggcgcaagtcgaggtcgaagtggctaccctgccggacagcggtagtcacggttttccgttctcccggtcgaccggtcaccgacgggtgcgccggggcggaatctacgacgaatgctgcaagaaaagctgttcgtacgccgaactcaagagctactgcgaatgatgtcgagttcagcagttgttcgcgttcggtaccgtggtgccgcagcaagatgggactccgccaccgcctgacgggggttccatccgctctgggtacgggagtgcccgagagcgagaacgtggcagacggcgacagacagtggcaacagaagcggtagcagcagtttgatgagtgcccctggccagagaaggagatagaggcgccatctggctccgggtggcggactgtttgggtatctcaggcactccgccacccgctcggaaaagcaaccacaaaaatacatgtgtattcgatatttttttatttaatctttttttttcttacaaaacgtcaacatcggtgttaaaggccataactagctcgtaggtagaccattatacaaatttaaaaatgaacaatgtattgacgcagtgcctcccttggaaatcgtccgggaacagttgaggtagagttgtcaagaacaactaaagcataatgtgactgaagtatttaaaacctcggtaactttaaatattgctcttacaaagccgagcggttctgaggatgcttaatctctattatacgtacaattttaccacgactacttgtagagggttttttattatgtaccaatcgctatatttgccactttttaagccctgatttatatttttaatgatatgtacaaaataaaagataaacaatctccaatagttcagcacctatattagctcctcactcatattgcgatcagacatactatttattatattgcttgaatcaatcagcagccatttttagacataggtctcgaacgggctcacttaaggctgagacaacgtttatatcattttgaaatccacatttgtttgtagctcgctcggaaagcagcgtcgtcttttttatataaaacgtgatcgtattgctttggttctggtgaccaaagtgattcaaaacaaatgaacaaaaaatgataaatgacaaaaaaaaaatgaaaagtaaaataaaagatttttctcaatat

SEQ ID NO: 754 - DNA, 1039 bp, Aedes aegypti
atggctcttcattcatccaaccattcaatcttcacttttatcctaatagctggtgttctttgtgtaacaactatccacagcgttggcgcttctcagaagcaaaagttctgtggccccaaattggctcgcgcactggcagagctctgtgacgcctatcccacactttccccaccgccaatgaaacgacccagtgatgctaaaggaatgaccatgaatgactacaacgcaccggatttgaccaatttcgaggaccaatccgctatcaaccgggtgtacaacgtggtaaatttaaaggacaagcccatctggatgaagttgttttactcgaagcacgaccctatggcgttgaacgaccttgactatgtgaacgaaatcattccggaccgtttcatgctgggaaagcgtagaccagggaaaggcatcgtagaggaatgttgccgtaaagggtgcacatatgagtacttgatgctaaattactgcgcctaagattagttctatattttacaatccccctacgcttatcaaatttagaagtcgaactccaatcttgataatctacaaatcattatggggtagaacggggaaagatggcgtctccttagttttgcgattgatttaataaattccatcaaaataacattatatactgctgaattgaagttcattcaactgttatccttgataaaagttattagaagtaataagatctagaaaaatatacaaatacgtcacaaaaaaaatatacaaattacgtcacgcttgaaaggggggaagaggtagccatagcgtggcaagccatgtgaagtgcgaagtttaagggattgagaagttgtgtaagctttactgtgaatttcgttatttacgctcacaatgcttgaaacaattgcttaaagctatcagtgcaaatatatggcttggcattaatcaatggacaaaccttggtttcaactcatacaacatctttgcattgacaaatatttgtttggctctgtatcgatccaagccaaatatatattcaataagaaaaactgcaacatcg

SEQ ID NO: 755 - DNA, 2237 bp, Aedes aegypti
aaattatcgtagtcagtaaaattttactgggttttatgacaaccaaaaaagttagaaaaattaataaataaaagtaaataaccgtcacgcgtaagtgcaaagcaagtatcatgtttcatttttcctttttaacaatttatattagtttgctgactgttttatcgttcaaaaacgctttatttttttttacaggacaagttgagtgtgtacatgcaattctaaagttgtggtcgaaattacaattgagtcgttgagtatccgccattttaacagcatttcaagtttatggggaagaacttttcgaaaaatctatatcgaagttaacttgcaaactttctaaatgaaatatgagtaccttgtttctgattattgttattgataccacatagctttggagttgaaaagtgttgcaagttaccccgtttaacggtattcaaaaagtgaattaatgaaagtaaatactttattaaatccaaagcatattttaaaatttcgaagacattaaacgattttcatttttttaaacacagtgttatcgtttcgcttttaatagacctgcggcaaaccgtcagatattccacaaaaataaaacgcgcgattggttacagctagaaatactacgctgcatatgatatgggagttcttcttgtttgtggtgtacgaaatataacagcagggctactgaacagctaaatgaaaaaaatctcttttggaattatacagaacaagtctcacttgctacgagccaactaaactgaatgtagagccgaaaaacaaatagagaccgtattcattggaaggtgcgtagttcgtgatttttcgttttttccatgatgctctcagaatccttttaatcccttcgatttggtagatagtacgctttttgtggaaaaaataccaaaattcttctggctgctgtttagctttgactacatcgaaaacttaaatcaatacgaccacttctgtttattttagccgtgatgactatggttagcatagcttcaacgcgtgcagtttgtctttatttttagttgagtgaagaagctttattttgttgctagaatagttgaaagaagaagctttattttgttacgagaggcgaactttagcactagcgtcaaacacatagaaatggaagcccaattaaaggtgttgcagagaaagaaaaggagaagatagtgttttaccttcaatgatctttgtattaaccttaaagtctcttctttgcattacgtccctcatatgtttctcagcagtgttctataagcacttcaggtagctttctttgccaaagttaccatattaacttttgtgtatcgtgtagcagccacgatggggctctatgcccagagatcttcacgacaacttggacgttggcatggcgacggctacgggggccatgagtttggcttcgatggcggccagcaaaaccggtgaggcaagcaccagcagaactagtcccagcgaactcaacgtcgatggagccggagtatgcagcgcagacggggcgcactctgtggagttagttgtcctgaacgacctcaatggtgatattagtaagaaagacattccaagcagtaatcaattcgacgcactggagttgatagacgagtgcgaggaaaaagatcgcaactattccaacgcggagtcgtcatcatcgctattgtccaacaacgacagtcggtcggcagattacgtgcacaattccgccacacttgccatcggtgaagcccggcgaaggcgccgacgggacagctacaacaattccaagaaggacagctgcgaaaacttggacacgatcgaccacatcaacgacaacgatgcggtcgatgcagtcaaagtcacttcttccgtggacgagccccgcatggatgcatttcgacagcagaagaaaaagaacaaaaagaaaacacgcccgggtgatgaagacgacacgaaggacaaagatgacaagttggtcacgtgtctgtactactctttagtatgttgggattgcagcatctcgtagagcaattgaagctaattgaagaacactgttctagctactaaaagactacttaactgttgcccatttttatatgcatctattatacaagaaggcaaagctcacagtatttttatactgatacattttgataacattattagattggtagacatccattaaatatttttagtggtaagaaaaaatccacttttaggcagtaagcaaatttattaaataaaaccttttttag

SEQ ID NO: 756 - DNA, 1351 bp, Aedes aegypti
ctgggattactgaaatcacattcgctctgttctcaaagaaaaaattatcaacaaacattttgtttacattcattcattcgtcgatttcttgtcgaacatagtaaaataattgacaaatttataataattattaaagtagtaattattactacttaaaacaacaacttttccgccgaaatgagttcatccccgtactccgatgaagacagaaaagtagatttcaacccactgctgctggcgagcggaaaccgaaagagtgcattcctcccgtacaaacctacgaatacggttctcaccaatttgcagcgcgggaacaccgaggccagcattcccagcgaaatatgtctgaactttcatgagaaaaccggccaaggggagattaccgaggagcaggtccgagcagagaaatccgttgacctgccggattccaaccagtacacgcccttgcattgggcctgctactatggccagctttcgtcggcccaaatactgatcaactgcggagcggatgtaaatcgacaggccatcgatatggtcacaccactggtgttggccgcggcaggaggacatcacgagatcgttagactgttgcttcagaagggtgccacggtgaaccacatggacgtgatagggaatacggcgctgatgtacgctgccgcagggaatcatcctcacacgtgcaatgagttgctgaacaaaggggccaattttaccgacaccaatgaggatggggaaacggcctacagcttggccgtaaagcaacaggctaatctttcgcaagccgtattggagaattatatatcgactttattgatgtcttagaccgaaacttgtggcgggcaaaatttgccggattatttttaccgaatgggattgtgtgataatttgtacctgggtgtttgtaaaaaatcgtttataaaaatcgtttcatgttatgcttgttgttatgaagtgggatgtaatattgtgaaatcctctggttgatatcgtttttcctcgctattccagatttgttttaagagactttttcaacattttaatacaagtctgtttttaatggatgaatggaagtctctttttaactaaaatggtccctaaatacagtcaaaccttcaaagactgcttatttctacaggtttttgtttcgatatttattctcagatttttcgaaaaaagcgtcaaaaattgatcgagagatttcttcatagatttcaatactggttgaaatctagataaactctgaactacaatttaggaggaaatccaaagaaattcctgcctaggtaatgatattttactgaattttaacacagcatctgaagtatctgttttaaattaatctaaaagcaag

SEQ ID NO: 757 - DNA, 1611 bp, Aedes aegypti
acttgcgattcacggtagtgacgcacctcgtcgtacagaatccgtctcctgctgctgcgatgttacttatcgccagacgctgtcaaaatcattccgtcatcgatcgcgcagtcagtcagtccgaagcaaaattttctccactcgcgaagttactcccccgaaaagttttcgcagaccgttcgttttgtgtgcaatttagcttgaaaatcaatcgaaaaatggacgcattcggcgatggaaagttcgaccaaccggaagtcgacccggcagccgagtttttggcccgggaacagaacgccctggccggtctggaggacgaaattgttccagcgtcgacaggaaacgggttcgccgatggcgatgacgtgactcaaccaaaatccgatttggctgcagatccttccatggggcatgagttcgaattggggagtttcgaaatgattaatcacgatgccgatccgacgatgtccggagccggaggactgtcggagtttgccgtcaaggccgaaccaggcgaaaacgaggctggcttgttcgctaacagtcccattccctccaacgaagaagatggtaatgatgatttttcagggtacacagtgcccaagcaagtaacggaggaacctgaaaggatccgcaagtggcgtgaggagcaaaaggcccgcctcgaggagaaggaccgcgaggaggaacgtaagaaggaggaactccgcgagcaggctcgcaaggaactcgaagactggtacaaacaccacgaggaagctatctccaaaaccaaggccgctaacaggaacgccgagaagcagttcgtcgcggaaacggacgaaatcgaacccggcaccgagtgggaacgcatcgccaagctgtgcgacttcaacccgaagacgaacaagtccagcaaggacatttcccggatgcggtccatcattctgcagctgaagcagaacccgatctcgaccagcaaaaaggtctaagccgtaaactgcaaatggggagggacagtataagccggaatctattgtggatgattcgtttatctcacaagaagacaaccaacagcgtatatatagacataaatgctaattatgtgtttgaataaattagaagatagtgaaaattacagcagaacatatataaaacgagttggagaaaagagagatgttttattgaggtttccttcactgaaaacctctaataattacattaaaaaacgtttttgaagttctccttatttaatctcgctaatgtggatgttcaacattttgtatcgattccttcacagttgaaaatgaaatccaatcgtagagaactaaaccatgatttgtatcgtttcatactttgtatcattcctcggaaagtatttgcctcgttttttcattactctgcaaattttgagtttttgtttctgttagaataaatacttttgctgtaaaatgtatcatttccgagtgcatttactgactcaaaatcgtaaaatggagaaaagttagaaaatgatcggaaatagaaggaagtgcaaacagaatattgctaagtagacatttatttgaaaccaagcagaaatgtggtcgaaagatgctaaacatcaaaataaatatgttgaaaacgtataaa

SEQ ID NO: 758 - DNA, 955 bp, Aedes aegypti
ctcaaccggagtgcagtgcgtgcgtgattaattagtattaccgtatagtgaggttaaacaataacacctcgtggtgaagtccactatcattttagtgttgtttcttttgtgaatcgtagaggttaaaagttcaattacctacggttaccgtcccagataggacctttttcttttggtgtttttcccagtgttgagcagctcatcagaggttctccaagtgaaggaagcacatgtagaattggatccatcttatggtgcgaagccatcccgctgccgattggaaggcccgcggccgccgttgctccatctacaccggcgaaaccgttcatagagtctgccacgcggtggaagaatctccattgtggatttggaatcttttgtttggcatacgtcggcattcaacgattgtgcttttgttcgtcagccgccgacatccaatcctcaccttagttcggcacctcaatcacgcttctctccggcctctggctggcaccgctccattacctctggacgtctctcgactggcatcatcatcatcacctctgttcggcttcccgccgacatcccaccatctcttctgtctggcaatccgctgatactacaaccggctagtggctggcaattgaccatcgcctccgttcggcctccgccgactctacaacacgacttcagttcagccaagccggcaatacaccaacactactgtccagcatccgctggcatccaagcatcgcttcagttcggctccaagccgacatccgaccaagccttcgacccgtttccctactggcatttaaccatcaagtgccaatgggaggcactataacagcacgataggtgccaaagccaccccaggaccggtccgcctgccaacgctaccacccatccagcatgcatgcaagtatgaaccctaaactgtgacgtcattagaataaatacctgtaaaatgaatatt

SEQ ID NO: 759 - DNA, 2412 bp, Aedes aegypti
atgaaatctcccctgccggtaccggagttcctagaggagaacaatttgtcgctgtcgtttaaacagccccaccggaagaacagatctctccggccgccgaaacctccgaagctctatccgaagtttgacgccagcttcaaccggagtctgaatggttcctcggtggctcatgcagtttcgttccggagcacccggtcggagctcagcaaactgtatgagccaagcaaacgcgaatcttactacgagcagtgtttcgaacagatcgaaaaagtgggcgaaggatcgttcggggaagtgttcaaggtgaagagcaggctggacgggtgcttgtacgcggtcaagaagagcaaggagttcttccgaggtgagcactaccggcaggaacggttggaggaggtgcgccggtacgagcagttcagtgagcatgagaattgcgtcaaactgtaccaggcctgggagcaggaggatcgactgttcatgcagatggaactgtgcaagggaagcctggaggattacgcccgggagcagcggttcatcccggaggacaagatttggtctatcatgttggatctgctgttgggtttgaaaagtttgcacgaccgcaatttgatacatttggacataaagttggacaacatccttatcacggacgacggagtttgtaagctggctgactttggtttggtgttcgacttgagcagtcgaaactggagtcacgcaacggagggtgattctcgctatattgcgccggagctaatggaaggccggtataccaagtccgtggatatcttcagtttgggtatcgcaattctcgagctgtccagtaatctggaacttccctcgaatgggcctttatggcaaagtctgcgcagtggatcccttccatcggaacttctgtgtagattgtcgcaagagctgcaggatgtgataagatggatgatgaatccgttaccggattgccggccttccgttgataccttgttacgattgccccggttagctgcgttataccaggagcgaaagcgatggcgtgtgatccgtggtctgcgatcctacatgcataggaaattgtgcaatctgaagtgcttcttagcaagcttggtgctttcaatagccagttgcttgcgattgaaacacggtaaaccggcagtaccagaggcggatcgaagaagacggtctggtcacagagatactctcaatcgcacctattgtaacgggatcagcagtaatgtacggacgtgtctgatgaaagactttgacgacgagcttgaagacgatgaactgctgtctactggcgagctggatttgacaggaggcagcacgagtacagatgtgcaaataacgcccacactaaacaacgacattccaaggcatacgcctccggtgcgaatgatgaactcaactccgctgaaccacaatcacatcgggctccggctcagcttccgccataatcacgttgataatccggccaggaatgcaagttacgattcggccgacgaagatttgatgctcccgttggaccacagcaactgcagcaaccgaaccgaggaatcgctgcaccattcacgtcattccttgctgcataacacgaccagccccatcaacgattcctccttcctgacgaagaagaaactttgcttcaaatcggatgactcggattgacggcctggtcaatcgttggggccgattgcgcatcaggcaagcgatcggttccccaataaacggcattgtctggtcacacattcttgttcttccaattcggacgcgaaagcgaaatagtgaaaaccgaaaagtgatctcaatctaacgtcggctttgatattttgtgcatctaatactgaaacaattaatcggtctactaataattaagtacgtacttttgaatgttgaaacgaaggggtgaaatttacgtttcactgcgtgcaggaatgaatacgggatgatatttagattgcacaaaattgtagtgatctaattagcttttatacatacgctaggatatatatttatacatacgctagcatatagctaggattgtatactaatagagtagtaacaaactaacgagagaaaagttgcagattttgtgatatacagggaatcctataaaatagttaaatggagacgattacggtttttgaaaacatgtttaggcagtttcattgtttgttgtgagtttatgaaatttggctgaggaatgtgattttataccatcaacaccacgagcgttcgttggggatgttggaccaatgtaaactattttacattacctaagcttctttaattctattaagtgttgataatacgagatatatgatatcgtgcagtagtggataatatttttcgggggatatattttacaaacgatttataactgataatcgcaataaatcggatgcttataaccaattg

SEQ ID NO: 760 - DNA, 7020 bp, Aedes aegypti
tttcggtttcaacggtgaagacatactgggaatagctactggatcttggtgacaggatgctaacgaagattctacttctcgccttggttgggctcacggtggcctaccaatacgagagtgcgtccttcaagggatacaagaatggtttcgaaggaaactatcctggctacaagggctacggttacgaagctggctacaagtacaacaaccagggctacagctacaagaacggattcgagtacggttaccagaacgcctaccaggctgcgttctacaagcaccgtcagaatgtgaccgagtttgagttcagctcgtggatgccaaaccgcgagtatgtctacaacgtcacatccaagacgatgactgctctagcggagctggacgaccagtggactggtgtctacacccgtgcctacctggtcatccgccccaagagccgcgactacgttgtggcctacgtcaagcaaccggaattcgcagtgttcaacgaacgcctgccatacggatatgccaccccgttctaccacgatatgttcaagttccagccaatgccaatgagcagcaagccattcggaatccgttaccacaagggagccatcaagggtctgtacgtcgagaaaaccatccccaacaatgaggtcaacatcctgaaggcttggatcagtcagctgcaagtcgatactcgtggagccaacctgatgcactccagcaagcctgtccatccctccaagaacgagtggaacggtcactacaaggttatggagcccctggtcactggtgaatgcgaaacccactacgatgttaacctagttccagcctacatgatccaagctcacaagcagtgggttccacagggtcaactgcgcagtcaagatgaccagttcatccaggtcaccaagtctctgaactttgatcgttgcgagcagcgtatgggctaccactttggattcactggatacagcgacttcaaacccaacaccaaccaaatgggaaatgttgcctccaagtccttggtctcgtacatgtatctgactggaaactggtacaacttcaccattcaatcctccagcatgatcaacaaggttgccatcgctccgtcctttgtgaacaaagaaccagctctggtgtacgctcaggttaacttgaccctcaatgatgttcacctctacgataaggttccaatgggcccggctgaagaccaaaaggtattcgtcgacttggtttacagttacaacatgccaagcgataaaaagaacaccgttcgtccaggaaatgaaaccgaatcttcatcatcttcctcttcatcgtcctcgtcatcttcgtcttcggagtccagctcgtctagctccgaatctcaggaaaaccccaaggtcagcccggttgaacagtacaaggcccagctcgatcaagtcgaaaagcgtggaaaccgcttccgccgtgatctgaatgcttacaaggaaaagaaatactacgaagcctataaaatggatcaataccgcctgagccgcaagaacgacacctcctccgactccagcagctctgatgactcttcgtcatccagctcgtccagctcctcggaatcacatgagcgcaataacggtacttcttctgactcgagctcatcttcctcatcatcttcttcctcgtactcttcatcgtcgtcgtcatcttcgtcgtcgtcctcggagtcttactccatgagcagcgaagagtactactaccagccagctccagaaaacttcaagtacgctcctgaggctcctttcttgccatacttcaccggctataagggatacaatatcttctatgcccgcaatgtcgatgctcaacgttccgttggaaaacttatcgaggaaatcgccgaagacctgcaaaacccatctaccctgccaaaggccaacaccatgagcaagttcaacattcttacccgtgctatccgcgccatgggacacgaggaaatgtacgaactggcccaaaagtactttgtttcgcagaaggaacgtcaggatgccaagttcaatgacaagaagttcagcaagcgtcttgatgcttgggtcactttgcgtgatgctctggctgaagccggtactccttcggcattcaagctgattagcgaatacatcaaggaaaagaaactgcgtggcgttgaggctgctaccgttgtcgcctcattggctaagtccatccgttacccaaccgagcagcttttgcacgagtttttcctgctggttaccagcgatgccgttcagcaccaggaatacttgaatgctaccgctttgtttgcctacagcgatttcgtaaaccaggctcatgttagcaaccgctctgcttacaactactatccagtattcagcttcggtcgtttggctgatgccgactataagatcatcgaacacaagatcgtcccattctttgctcatcaactccgtgaagccgtcaaccaggaagatagtgtaaagactcaagtttacattcgtgccctcggaaaccttggccaccctcaaatcctgtcggtcttcgagccatacctggagggtactatcaagatcactgacttccagcgcctcgccattatggtcgccttggacaacctggttatctactatccaagcttggcccgttcggtgctgtaccgtgcctaccagaacactgccgatgtccatgaaatccgttgtgctgccgtgcacttgttgatgcgcaccgatccaccagccgatatgctccaacgtatggctgaatatactcatcaggaaccaagccgctatgtcagatatgctgtgaaatccgccatcgaaactgctgctttggccgacgagtacgacaactatagcgacctcgctgtcaatgccaaggctgccgtcaacttcctctacccagaagattccagtgttaagtattctatcaaccacatccgtgactacgccatggaaaacctggaactgacctaccgtctgcattacggagaaatcgcatccaacgatcatcgctacccaagtggaatgttctaccatatgcgtcaaaacttcggtggattcaagaaatacacttccttctactacctggtttctagcatggaagcattctttgacgttttctcgaaacagtacaacaccaaatacttcgctgattattacaaatcggctgactacagcactaacttctacaactatgacaaatactcaaagtactacaagcagtacttctacaacaaggacaatgaatactaccaaaagtacaacggacagaagaagaacttctacagcgataaggaaccatcgaagttcaccgcttcccgcattggtaagctgctgaatattgatgcccaagaggccgagcaactggaaggacagcttttgttcaaactgttcaacggatacttcttcaccgctttcgataaccaaaccattgaaaacatcccacgtaaagtgaaacatctgttcgaagatttggaagatggctacgcttttgacttcaccaagttctaccagcaacaggatgtcgtgcttgcctggccattggctactggtttcccattcatctacactctgaaggttccaactgttgtcaagtttgagctcgatgcttccgccaagactcacccacaagtttacaagcaaccagctggtcacccagaaaacgaaaacgatgatttcttctacatgccacaaactttgaacggatcgatggatgtgaacctgttgtatcaccgcatggttgacgccaaggttggattcgtcactcctttcgatcaccaacgctacatcgctggttaccagaagaagctgcatggatatttgccattcaccgttgatttgggattggaccttgtcaatgatgagtacgaattcgaattcaaattccaggaacctaaggaagatcatttgatgttccacatgagttcgtggccatacactggatacaaggatattaccgatatgcgcccaattgccgagaatccaaatgccaagattgtgcacgatgaagatcaaaccaccaagtctttggaacacaccttcggccaagatatgactggtgttgctctgcgattccacgccaaatacgatttcgacatgatgaacttccagaaggtcttcggcatgcttaagaagcacgatttggtttcggctgtcacctatccatttgcttaccaaccatatgaataccatcagttcaacttgtactacgatgcccaacgcactcacgccaaatcgttcaagttcttcgcttatcagaagttcggtgctccttccttcgaagaaactggacccaagcacccagccaaccgtcactcgtactctggaaactactacgaatcgaactacgctcaacccttcgtctacagcgcaggaagccatcgtcgttacgagcagttcttccgcaatgctgcttctggtatcagaaatagcttcgtccgttactacgacttcggttttgaattctacgctccacagtacaagagtgagttcactttcacaaccgctttcgctgatagtccagttgacaagacttcccgccagctgtactacttctatgccagcccaatgttcccaagccaatcgtacttcaaggacattccattcagcggaaagcagttccaattctgcgccaccgctaccagcgaattcccacgcgttccatacctgaagttctcggactttgacaagtactacggagatgctagccagtacttcgatttcctgtatggtgaatcatgccagggtggagctcacattgctgtcaagggtaagcagaagcagactggaaagtaccgcgagtacctgggcttctctgatgttgccaaggcttgcaaggaacagatggccaacggatactaccaaatggaagaatgccaacgtgcaatcgatcaggcttactactacgatttctacgattactccttcgagtacaaggatgtcggtgccgttgccaagaacatcagcgccaaattctacgactacttccagtacgctttctacccgtacttcgaatcgaacttcttctaccgaggaaagcataaccagatcaaggctgaattcgaattcgctccctatggcgattactacaacgcttccttcttcggaccaagctacgccttccaggtcaagaactacccaattgaaaacgattactcggtctatttcccgtacttcttcaagtacactttcttccctcgctaccagccatacttcttgcaccgtctgccagcgcacaagccccgcaatcgtccgtactacgaactctccaacttcgaacagtttgccgctttcagtcgtaaaccacagtatccttcctgttcattctctaaggattacttctacaccttcgacgacaagaaatacttctacgatatgggtgaatgctggcatgcagtgctgtacactgtgaagccagactacgacttctacgctcaacaatcccacttctacaactctgacttcgagtacaagtacaagaacggatttgaagagtacgaacagtttgccgctttggctcgccgtggatcagacaaccagctgtacttcaagttcttgttcggagacaactacattgaaatcttccccaataacgctgacactccatttgtgaagttcaacggacgcccatacgacatcagcaagtacaacattgctcacttcgagtataaggaaggctacccaagcttcccattcttctacgccttcgcctaccccaacaaggatttggaagtcagcttcttcggtggaaagctgaagttcgctaccgatggataccgcgctcgtttcttctcggactactcgttctacaacaacttcgtcggtctgtgtggaaccaatgacggtgaatacttctccgacttcgttactcccgatcaatgctacatgcgcaagcctgaattcttcgctgcttcttatgccctcactggccagaactgcaccggaccagccaaggccttcaactatgcctaccaacagaaggccaagcaggaatgcgtcaagcgcgaggtttacttcggtgacgtcatctacaaccaggaatattaccacccacgttatcgttactacaaccacaacgttgaagagtcctccagctcttcgtccagctcttcatcggactcttcgtcatcgtcttcttcctcttcttcgtcctcggaatcgaagtctaagagctcgtccagctccagctctgaggagcaaaaggaataccatccacacaagcagagccactccctgaaggattgcccagtccagcaccagcaccagttcttccagcagggcgataaggtttgcttcactctgcgccctctgcccgcttgccactccaagtgtgtcgctaccgacaaggtcagcaagtacttcgatgtgcactgcttcgagaagagctctccccaggccgagaaatacaagtccgagattgcccgtggctacaacccggatttcaagagctacgcatcgcacaagaccttcaagttcaactacccgaagagctgcgtctacaaggcttactaaattcgaacggatctattaacctaatgacatcacctgcgaatcgaccggaaccaaaatgaatattttgtaatattttatttataccataataaacgatgaattttgaataattttatgtgttcgacagttgtggaagaaattatccttgagaaagttgtgcgagaatggatggttaatgaattcgcgagcaaattttttcaagtgggcaaataaaattcgatttaatttcgaatgcataaatttcactcaactgacgatcaaggtcaagttcgatgagcagtgtatcaaattataagcggcaaaccggcaagcgatgaaagcaatcaaattgtgctcgttgtctgaataggttctacaagtggctgattcactactcagcagttgctattggaatgcttgcaatgaaatgctatttataaaaagtatttctagaaagtagcggtaaagttttggcagtatcatgcggtcagcatgattattgaatgatcttgttcaccgtgtcagcaaaacgattggagacaatgggatttttatt

SEQ ID NO: 761 - DNA, 1134 bp, Aedes aegypti
acactcaaaataatccacatgtcaaggctacgtgaaaattcacgtagatccctataaaatgaactttttcttaatttacctgacaacggtaataatcatctaatcgttggtaaggatgaaatgagacttcagtaatgtttactgttaattatcatcactcctacgtaaaaatcacgtaccccacttagattcatttcgataggtagttcattctgtgttgtggtttgatatttgacatttcatatcacgttcatcatttgttgtgctcaagatggcgatgaggtcagttgttcctaaaagaatttctcattttgaagtatggaggcgaattgcaaaccaaatcagcatcagatttttgagcccgaagagtttttgcggcacttgattgatttgtttcattctacccaaagcgagctgagtaaatctggaactgcggacaacctgggaaccaagttgtatacccgttaaacatctactgaacaaagcaccgctacccaacgaagttcctagtaactcgttcgaaactatctaggtactaaatacgtgtggctgtaacgaattggagaacaatgtcatcgatttgatataataaaacacttttcttcagatagttgaacctttggttgaaccctttttgatttaaataaaccttatgaaattcaaaatgaagcagagtaattactatggaaattgttgatggattttacgggaacatcatctagcatgtactggaacggcttgtgaaagatacgggagaattcacgtagctgttacgtgaaacttcggtggaagtgacgatgctgaagtattcatgcgttcattctgtatcacctatgatccacgtaagtgctacgtgaaaagagggatggaaaaaaaccacgtatgttttcacgtaacaatgacgtttggattattttgagtgatagataaccttataaaaaatggaaatttaggggattaaagggccaaatgaacaatgaaatatttttttaagaggatttattgtttttcattttttcaacgtgttttttttattgaaataaatactaaaatagtaaaataaccataaatgtagcttgcagaaataagttgtagtgaaatttataagaaatgtatgataattaattatgctct

SEQ ID NO: 762 - DNA, 4319 bp, Aedes aegypti
gttcagtggcttttgagttttgaccgttttgacagtcgcgttctttttgttctcacatttttgttcttctccctctgttttgttttgtgcattgggtgtatccattaattatgccacaaaaaatatcatcgctttttctgaatcagaacagcttttgaaatgataaatttctatcaaattattttgcatgaacagatttcgatttcactatggaattcaccattaaaatccgcaattcaaaaccaatcatccgagaaaactttccgaccttgttacgttactcccggtcgccacccactattgacagtcgccttcgtggtgcttttcgatgcgcttcttcttgcatcttcagttcagtgcgtcagtcaaatcaaatctggatgtgcgtctctctccatttattccctgcggaaaaagaaggaataaaaaaatcggacatttttctaactttagtctagtgttttatccgggaaaaatcaccagattttcgtccgttttatcgtagtttgtaggtggcaagtgttcggagaaagagattcgaattcgggggtgaaacgtctggacgcaatggacggccaaagaaagtgattgattgattgcctttgggggaaaggatttttcttctgggaaaggtctcatcgcacagaagcgcaggatgccattgagcccggattgggaagaccccgagcagcctggcaatagtcgggagttcggaggaataacacgcccaagacccagtagccggttcatccgttcgaacgactcggcccgatgtgaaaacattctgctcaaggtgcttaaccgggaacacagcggatattttagcacgggattgaacaagcgatcgcaccgggaagcgttccgggaagtcccgtcgcatctgagcttctgcctgaaggaaatcgtaccgtactgctatctgcaggggcatgtattcatgggtttgtcggcatgcggacagttcttgctcagctataaagcttcctgcgactacgacgaggtcatcacgaatgagtacaacttttcctcgaactataaatatgagttgtacttttggatctaccggccgcacttcctgttaagcaagtacttccacgtgtgtctcttcgacgatcacggagtcgacgatatcaaaactgtgtcgatcacacagtggaaaacggatcagcggctgttgatcgtccatggggccagcgagaaggaggatcaggactcgtacgtgacggtagttcgggtgccgaagttgggctgcatggattgtaaacagatgagggatgcggacgaagaagacgccagccagggctcgctttgcatcagctgcaacatgacgatccataccaagtaccgtaactcagattccggaccgaagttcaatccgcggtacaatttgaactgccctgggtacattattatgagcgaaaatagcttcattcatacgatatgtattcagttggacttgagtaggtgtcctcagaaggtgccatccggtgtcatcagtagcaagtatatttccaaatatcaacgcatgagtccggaagtggaaatcaagttagaaaatctcgttgatagcaaacccttggccccaaagccagatcctcctaaaccttccatgtgcgaaactttccctgtcccaattctcccagccccttcacaatccctgagcatagccgaccaaattattgccgactttgctgagtatgagactgaaaccttcgaatccaagtgttcccaaaccatgcatcttcgcaccaccagtcggttgtcttccagttcttcctcgtcctcgcgatctcactcgacggcagttgctcagtgtccggagaactttgacgagctggtcatcacctgtgatcatcgcggccaatccgttgccattgctcccccgcgaagctccgtattgacccgaggagcggcggctcgcctttcggaggccctctcgccctcatctaacattcgactgatgaaccatcgcaacaataccaacatagagctaagactaacggccgcccatcggacgtctccaccggatgcccacaaatcctacgtaacccgagtggagctttcgacgggtccatcctcttctggtgcttcccctcacccgagcgctgccaactcatgccacactcaatctccgctggaatctagcggagcaactccatcaagttcctcatcgtcctccaccggaaatggacggacaccactacgaagacgatcgtatctctctaccggtagtagatcgactgatcctaacgttcctaatcaagcagatggcggcaccgtgaccaacgacgtcgccgccaaggcttacgaattctccgaagacaacgaacggtgcgagaagatcagcatcttccgcaagcgccgcctagccgacaaaaagtacgaattctccgaggacagcagccacggggacaacgtgatcgtcccattcaatcggctccggaatcaaatccgcacccgatccgctagtcaagccctcatctgcagcccatcgcactcaggctacgaaatgaccacccatcttcatcgagcctccccgaaccatggcttccgatcgccctgcggttccccggtcggcaatcgataccttcgatctccgcccggaatccgttcacccaactactatcgtcatcattccccggtgggaactccgcgcccacagcaaacccctcagcagtccgcagctcaactcatcaagatggccaactttgacccgaaggattacatctaccctggcggtggtgccgccggtgcaactgaggacatccccaagttcttcattgatgccatccagaagttcaacgagaagaaactccaagcggacgagggcaacaacgagaacttcaacacggacaatctacttccactgaaggcggacctgactggattcgggtgcaacggtacgacggtgcaggaaaccaaaccggggaagaaacccacctgcaccaagaagattgtgaagattttcgtcgaggaagatgacgccaactcggtgctgaccactgaagaagacgactgcatctcgcccgggtaccacgcttcccttccaatggaggtgcacggttcgtgctatgccaacatgcaaatcgtatcgccggcttcctatcagaagctgaactgtccggcggtggtggtgacgcagaactcttttgatatggaagcgttttcgttccacgtggccaactacatctgcgccaagcacgacaaaaagtacggtatcctgttcgattcggcgtacgagctgacgcatgtctgtccgctgacggaaacgatcacctgtacgatggtgctgcagttcacggccagcgacgccagtaaggtcaagcaatgccacaactgttccacgacgatcgactgtcgcacccatcggaagatctaccagtgccggtcactgttcacctggaacatagccagtggcgagtggaccgtgctggattacggttccctcggctctgggccctatctagaggtgaaaaaacttgccagtaactacaaccgtttgctgggcaagctgcgcaaattcacccggaagctgtttgattcgtccgcgtcggcaacggacgaactggacagcaaccgaacgtacgagtatctgaaccatttgcgggtgctggattccaacaacgagaaaaccaagcagcgactggttgacccgatgcacatgatcgagttcttccggaggcaaccccatgacaccggaggggattcggacgattcggacgacgacgatgacgaatcgatcagctcggtggcctcgtccggtcacgacgaggaggaagaggacgatactgggacggtgctggagggggacaccctcacatcggatacggttagtgatgaagatgatatttaattcagtgggggttcttcattttagctaggaatgaaacgtgatttgtgggattcattcattttaaattggtcgaactgatatggtaacatcgtgatattcatgtgttgtaaaagagtgtattttcttatacttctaaatactttcatctaattcgcaattgaaagtaatttcaaatatgtgtctctctctctgtctttcttgattcttcatctgtacgatcgttgatcggagcaatctttttgaaatcgtagcgttttagaagtggtttaactaaacaaagggtagaatttaaggggcgtcatcaaattttcctcaacttttaatccccagtcgtacagtcaccgccaaaattaagtgcccacttgcttgtaatcacgcaaattggtaaaaattgggtgttaaacgagaagttatctcatatgtcccacaaccgtggtgacacaatatgaataagggaacaagaact

SEQ ID NO: 763 - DNA, 4719 bp, Aedes aegypti
tcccttaataccgttcaacaaaaggcgggcacttcgagtgtcttgtctggatgccgcggttttttggctgtgcaaacgtgctggaaaacatatttttaccttaaatttgataatattttaagaatatttgcgtgtttgtagtcaaatttagttagtaaagtgagacagtacgagtgaatagttaaatttcagtaaactatgtagatacaacacaaaatgagcgacgactacgaactggaggagcagcgactcctccgacggaagaagaaatcctcggaagcgggcaacttgcaacagctggcggaaacatgtcgcaagctgggcgagctgtacggcaaccgtggcgagcatctgaaggccctgaacgagtacaagctggtggccaaggccttcaaccggctgaacatgcaaatggaagtgggccgggccaatcggatgattggcgaaatgtttatgctgctgggggagtccgagaaagccctgcagtacgagaagctgtacctggacacggcgcgcaatgagaaggacaaggtggaactgcagagagcctacatcacaatcgggaggacctatctgttgaagggtcagagctgcgaaagggcggaagcggctaaggaatcgctgtgcgaagccgagaaagccttcgtcaaagggctaaaactgtgccgtgatctgaaggaagtgggccggttagagcagtcggatatggaagctcgagccatactgaatctgggagtaacgaaagagcatcagggagacctggaggaagcagttcagtacatgcagaaagctacgaagatcgctcagaataacgacatccaggatctggaacatttgtgcttgatgtctacggctcagttgttcaacggaaaattgaacaatcccgctaaggccttgaagttgctcaatgaagcactggaagtggcatcaaggcttagcgataagacatcgaaaatgtgcgagacactttcggtaaaggccgatgccatgatcaaaatgggagacttccagagtgccaagcaggctctcaagaaggcttatcaaatgaaaacgccggtagtttcggatgcagagagcattgaacgcaacttgaaggttctggtggcgatctgtcgcgtggaggatgaattgattacgaccgataccaccaattatgctaagaaaaaaattctgtatgagaagatgggcgatggttcttgcaaactgtacaatttcggcaaagcgatcgattactatttgaaaatgttggaatgcgccgaactcaatggagaagcagaccgtcagctgataccaatttacgtgagtctctatcaaacgtacaaggataacaagcagtataaaccggcattggaatacatgttgaaggagtacgaactgattaaagacgaaccgaaggaagcgtacaacacccttctgagcatcagcgagatttacgaaatcgaaaaacgcaactatttcgaaatcgagaatatgtatcgccgggttcgccacgaagcccaaaagcttcagtcgttgtcattgcaaagggctcccctcaaacgatgcattgcgatgttgaggaaaaactgcatggacttggtggcggaaaacctggagaaggaagcagccgatctcggaatcgatctcaatcttccagacgacgctaatgctactgacgagtcggacgatgaaccagatgaggcggaaacggcggccgccctagagggaagcactccagacatcggcgaagatgtggatttagaagatctgaccgaatctgaggacgatagttcccaaaagcaagcagagaagcagcccgagtcccgagcatcgcgcaaacgtggaatgtcctttcagatcaagaggaacaataagggcgaaacccagctccatcaggcctgtatcaatgggaataaggttttggttcagaaactcctggaacaaggccatcccatcaatccgcgagatcatgctggatggctgccattgcacgaggcttgcaataagggcatcaaagagattgtcgaaatgcttctggacaggggagcgcacatcaacgacaaaggcggaaccagctgtgacggaatcactcctttgtacgatgcgtgttccaacggaaacctggaagtcgtagaactgttgctcgaaagaggagccaattgcacacttcgtaccgattccggagacactaccctaaacgttctggaaaactggtacaatggcgtcaaagatttccttccttccgagcgaaaatcgttctaccagtccgttcgtgatcgaattattagttgcttcgataaagctggcatcaaaccgggggaaggtggaaccatacccgaatcgatcgaattggaaccatctcccagtggggcagttcgttccacgcgtcgtcgtccgaatcgtctagggcggtcggattccgactcggaaaaccatgaaacccgttcggtggcccataccactcgcagttccggatacggaagtagtaaagggactgcttccaagaaccgaccaccagctgtccaatcggacgattccagcctttcgtccgatgaagaaagtggtgttcgcgaaaaaagcgcgcgccgatcgaccggagtagacgactaccgcagcgccatgcaagttctgcggaagggaaacggggcgcgggctcagatcgtatcccctctcaaagatcctaatccaggaccgagcaaacgcagcgccttcctgcgcagcaacgagatcggtgacgactggctgatcgatgatctgggcccgaacaaaaaacgacagaaattccattcggaagcggaatacctcgaaccaaaaaagcgaactcccaagcgaaacaacaatcggaacaacagtccacagagaccgcttccaatttccgaccagaccataacaaccactgctttggagtacgactcggatgaaccggaactagtaagcgtgtcatcatcacggcgaattcggcgagcctcttcagaggacagtggttcggatgcgcatcagattctgatgaatgcatccgggagaagcttttctcgaagaccgtccactcaatccaggggttcaaggcggctatccaacggaagcctcaacagaaatcaaacatcactcttggaggcaggattcaacgtatcgtcgtctcgatcgattagtccgcccttttcgttgatgtccccgactaagaacatctacgggcagaaatccccatcgatggcatcgatgtcggcgtttgcggaaaaacgaaccccagtgaagacccttccgcccaacgtggtgagagttatggtcgaaggtgaatcaatcgatattacctacgatccggagcagatcatgcaaatcagcgtgggatggctagtcaacgaagtagtcaaacgctacggaataaaacatggcaaacgacccctgttgaagttgcttcgatcggatggagggttttgcttggaaaccgatccactcacgactttgctgggcggtcccaattctatcgtatactcgtacctgactgagcttaaagcgatggaaccgtgtgcgttctacaaggattgctgcaaggaacgaggtgttgaactcatctccaagctggtggaagcggtagagggcgtacacatcaaccacaatttcacccttcccagagatgtttcccatgacatcgaccgccagtgggatatcctcttcaaagcgctcgcaactcatgagcatctgaagacgctcaacctttcctggaacaaagttacggattccgtcgtagccaacctcgcccagcagctacccaacctcaaggaacttgaggtgctcaacctctcgatgaatcgcatcacgtataaaggcgtttccctcttatcaactccaatcgcggactccaatcaattcttgactgagctggatctcagtcgaaatccgcttcaagatcaaagtttaccagcactgaccgttgcatgccagcaacttaaacgactgaaaatcctgcggctagcatctacggctataacgaaccttacctacgcagaaccacatctcgacatatctaaccttgaggtgttcgacgtgtcggagaaccaactcaacaaaaagtcaatcgaatacctcttatccaaaccgcacaccccgatgataaccgaactgaatctgacatcgctaggcaaactgccagatttcaaatttgccctgaccacggcagttcaaacccaagccttcgacatgctaataagactgaacctaagcaactgtgccttaaccgatcatgatctaagcctaataatcaacccattgagcaccactgccgaaaaactcagaatcgtcgatctgtcgttcaacgccgaactaacgtggaaaagtctagaagaaattatgaaaaccttcacacgtcgatcattgcagattaatctgtcgcaaaaccctttgattttgaaggatttcaatggagaggacgcgtttcaagcgatcgactacaaccgaaagaaatcctatccatgcgaattacaaatgatgctgccgaggtcagtgacggatcaacggttggacaatcttcgccagcagctgaaattgttttgggagaagctgtggcacaatcatgctgatatcaaaatgaacgaacagaaagtcatgttgtcggtcggttacagcctagatgtatcggataatcggttaaactaagagttttaggatttcaattaccatcagtgcaccagttgccgctcatgccctattaccgctccatagtgtaagggcccattcacaaatttc

SEQ ID NO: 764 - DNA, 1140 bp, Aedes aegypti
atgaaatccatcggtgcaccagctcctccatccatcaaatcggattgccaacggatgcccccaaaacaggagggtcagactttaggtcaaccgatagatcattgcggcggtggcggcgtctgcgttgcgttgaaagttgcatcggccggatctgcagccaaccagggccacggtcagcagaaccagcatcgcggcctagtgccggcggacagtaatctccatcaaacgtacaactatctcaaaagcactggacagatgcaaacgctcagtgcgcgtgacttgaacaacacccgtcgtgctgaagtcccgatcatattcttcaaccgagtccccaaagttggcagccaaacgttcatggaacttctgcgtcgtctggccatccgcaacgagtacaccttccaccgggatgtagttcagcgcctggaggtgatccgtctttcacctgatcgccaacaggaactcgccgaaatggtatccgatcttccgatgccctccgtctacgtcaagcacgtttgctacaccaacttcacccggtttggccttccgatgcccatctacgtcaacatggtacgtgatccagtcgagcgaatcatcagctggtactactacgtccgagctccatggtacttcgttgaacgtaagcaggctttccccgatctaccgctcccggatcctcgttggctgaagaaagactttgaaacttgcgtcctccagggagatccagaatgcacctacgcccagggagctatccacgaaggcatcggagaccaccgtcggcaaactctcttcttctgcggacacgatgaacagtgccttcccttcaacagccaaggagccctggagcgtgccaagtatgccgtcgaaagccaatacgccgtcgtcggagtgctcgaagacctcaacacgaccctcgccgtgctggaacggtacgtgcccaagttcttctccggtgccgcgaatgtctacttcaacgaagtgaaccttctgcagaagatcaacaagaacaacttcaagcccccggtcagccacgaaatcaaggaactggtccgacgaaacttcacccgggaaatcgaattctaccagttctgcaagcagcggctgtacaagcagtacctcgccacgcagctgccccacaagtga

SEQ ID NO: 765 - DNA, 3113 bp, Aedes aegypti
atataggatacctcgcagcttctgttcagtgcgacattatgcaacctgcgcgactcgaatgaaggacgactgagactgactgactggttgcgggtgaagaacgtggcggcgcttgaggcaataaaaatagcacgctttcttcgtcatcgtttgtttgtctgtcgacgacgactccgaaaacgtcaccggtgactggttcactgatctcctcgccgtcggctcaaaaagcgtttatcagggtggaattccagcaactgaagtggtatcacgcatcgcgagatatcatcatcttggcgcgcattttgtgagcaaacaagagaaggaagcgcccgcagtctttgatccagtttgctgcggaaagctgtgatattgctgtgtgctttatgtcaaaagaaaaatattacaaaatgggttcgacgcaacgaagcaagctgattgcagtcatcgatgaaggaacgaacagcgcgcgctttgcgatcttcaagctgccccagttcgaggagctatgctcgcaccaggtcagcatcacccagatcatcccgcacgagggctggtccgagcagaaccccgtcgaactgctggaagccgtgcggttgtgtgccgtcgaagcatgccacaaactggaaaccctcggttatctggtgagcgatatcgcctccatcggtatcactaatcagcgcgagacgaccgttgcgtgggacaaatatactggcgatccgctctacaatgcaatcgtttggaacgacatccgcacaaactccacggtggacaaagtgttggcccgaatcccggaccagaatcacaaccacttccggcagatttccggtctgcccatctcgccatacttctccgccctgaagctctgttggttgaaggagaatgtcccggccgtgcggagggcctgtcgggagaagcgttgctacgccggaaccatcgacacctggttgatttggaacctaaccggcgccgccaacgggggtgtattcgtaacggatgtcaccaacgcctcgcgaacgctcctcatgaacatcgagacgctcttctgggatccgatactgatcaagacgttcaacctgcacgtggacatgctgccggaaattcgcagctcgtcggagatctacggccacatcaagtatgggagcatcctggacgggatcccggtgagtgccatcctcggcaaccagcaggccagtttgatagggcagcggtgcattcgggagggtcaggcgaagaacacctaccggaaggggtgcttcctgctgtataacaccggaaccaggtgcgtacattccacacacggactggtgacgacgctagcgtacaagatgggacaggacaagccggcggtttacgcgctggaagggtcgattgctgtcgccggcgtggccatgaagtggcttcgtgataacctcgggctgctgaaggacattccagtcgattcggagcagattgccggcagcgtgttctcaaccggcgatgtctactttgtacctgccttcacgggcctgttcgcgccctactggaggaaagatgctcgaggaataatttgcggtctgaccagtttcaccaccaagcatcacatcattcgggccgcgctggaagccgtctgcttccagacacgtgatattatcgaagcaatgaagaaagactgcgggatcaacctgaccaaactgcacgcggacggtgtcatgaccaacaacacactactgatgcaacttcaggccgatctcgttgggataccagtcttgaaaacggaagtgagcgatcctgcgacactcggaacggcgatggcggcagcgcaggccaagggaatcgaactctacaacatggataacgataatcgtgactacactctccacatcacccacgaaacattcctgcccacaacgacggaggaggaacgcaacgcccggtacaccaagtggaaaatggccgtccagcgcagcttgggctgggccgtcaccaagaagagtgatgccatgacagacgaacgctactccatgctggcgtcgattccggccggactgttcctgttgagttcgttcgtgatgctggtggtctcgcaagccaaacgaagctgagctacctaacctaaaaaaccgaacgcttctggggccgtctgttcagttgcaagtcttattctaaaattgcatatacttacaacttattattagctagattagacggttgtagtcggaacccaagcttacaactaaaaagacaactcaaactctggggggtgctcaagtatccaataaggtagatagttagcgccggaaaggcgctataatgcaactttaaggttaggagacccagattaggacaaacgaatagcaaaccaaaaaaaacaaatcagtgatgcttccatgcagcaaacagtatagatagttaggcaaactaatccgagtgcactacgcaattgggcctcagtcgattgcaacccaagtgtcaaagagtacctttcaatagttaacggaactaggaaaaaaaaagtaagcactccattcctcgtagtacacgaaagcttagaaaacaaattgaaaataggtctgtagtagaagaacaaaggggaagattgtaacaatctaaaaattatataataatcaattagacatatgtgaggaacaaaagtaaagcaaaagatgtaagttattttacacgaattgttaggatccctccgttacaaagagacacatttgatttagtcgtttgaatgatgatattttaacgtgtttaggcataacttttagcgatcgatttattgatttgtcagactattattaaaaagattctatcctctagatgttaagcatattgagggcttgattttactgttgtcaaccgcaggtagtttatttatagcgcctaatttgattgtattgtgaacacagagtagctttacttttactaagtagccatctaacgaggaaacgacgattgtaagacttttttatatacagtacttaatgctacagaacgaaagattttattatacacacattattttgccgatggatcaaaacgtagtagatatttatccgaaaacaagtccctgatagtataggtaataaaatatgtatttcaattgcacttaataaaaattactagatagg

SEQ ID NO: 766 - DNA, 237 bp, Aedes aegypti
cacgctttcttcgtcatcgtttgtttgtctgtcgacgacgactccgaaaacgtcaccggtgactggttcactgatctcctcgccgtcggctcaaaaagcgtttatcagggtggaattccagcaactgaagtggtatcacgcatcgcgagatatcatcatcttggcgcgcattttgtgagcaaacaagagaaggaagcgcccgcagtctttgatccagtttgctgcggaaagctgtga

SEQ ID NO: 767 - DNA, 3494 bp, Aedes aegypti
tttatttggattcagtgtctgcagttcgcgatcgctctacttctataaatatgccttcgtcgcttcaaacgaatgtatcggcactttacgggtttaatctttctccatctgtttgagctttccctcggttgcgagaagggagctttatttaaaatgtgtgacaagttcaatgttacatcagttccaaaaattgccgaaaatatgcttggatgtttttgggcgtgcgattttggttttgtttcgaatccatcacctctgctgcgatgcttttcacaatatcatctatcgttctcgaccaacggcaactcacatgcgggacagatatttaattgtattgcatgtctcacaatagtttagtaattgccgcgtcttttgccgagtccgtgtgctgaaaaatgaagagctgagctagtaggacatctttgagtttgcgtaatagtttttggtgttgtattttgtgaagtttatttgcatgcaaaatagtttttgcttattggttctcctattttgtgctacaaactgaattcatttgttatgaaaaatctataaggagcaagccatagtgcaatttgtgtcataactaagcaataccatcttcaatgtacgaaaactaaatttaaaacaatcgaaaaaaaacgcgcataagaacggttgcacacttaagaaaagtattgaatcataatggcagatttcttgtcaccgattatcaaagatttcggatcatggcaattcagggcggtgatgctgatacatctatgcaaaataccgtcttcgtggttcatggcttgtataattttcacggctccagctcctaagccaggtgaattctattgcaagccacctacatcgattagtagtgacttcgacaggaccaaatggattatggcatcgcatcccgtgaaagaaaccttgagtaacggagagtattccattgactattgcaacgcgttcaacaatagccttcagcactacaacgacccaacattcggaacatggattgagcccaacaatagcagtcagattctaccttgtgaatctttcgaacatcatgcagaatacacctcaattgtcacccagtttgacttggtgtgttccagatatctactgattgctactacgcaatcgttccatctgtttggagttcttttagggggtataattacaacccagctgatgaaaaccgtgagcccaagaaacgccatgctgttgggaatgtacgcgcaaatcatgtgcggatgcatcaccggttatatctacgcttacgaaatgcatgcgctcttccggtgcttgagtgccatctgctgtggtttgatgtacactgccggaagcgttatcatgaatgacatcacgggtgggaagttcaaaactatcacaatttgcatgtttgaacagttttggtcgatcggcgtgatgcttcttccaggcgtggctagtttttggagcagttggtcccagctgtacttggccatatcgctaccgacgttcttgctcgtcattttacacagatggatcccggattctccgagatggcttctcaaacatggaagagttcgagaagccaaaacgtacctcttggacgctgccaggtgcaatggcacggaggactgtatttcgagtgatttcgaccatcagctgaagacgttctccgaggtagctgtagaacaaccagaccccgatccttggtggtctatttgggataagggtttctcgaagaatcttttttgtgttcatactgcttgggcggttttctacacggtgtactacgcagctctggtgaatattactgcttttggaagagagcatatacagatcaacaccgtaattgcaggagcttcagaaatgtttggatgtttcgtcgggctttttctgattatgtacacgaaacataaatggctttggacaggcttgttcaacgttttcggtggcctagtggccttcaccgcttggtggatccctccagatgtcacaggcacccatcgagttgttcttctcatgttgacggcaatggtctccaaagccagcatttcttgctgcttggctgtattgtttacgtgtactgctgaactgataggcccgagtaaaaagaatggattggtctactcatgtacgatatggggacggttttggttcctactggcaccgtttgtagccgctatggtgaagctcggacaggtgattccgctaatcgtaattggtgtgttggtcatcatcggcgggttgtctatgggatgcatcagaagtcctagaacacattccagtctgcgccgtgactggactgccagcgcctcatcaggaaaatcaactggggcaaacgatctacggcattgacgacttagaaaagcttgattttacctctttaagttgaagataggaatcgaagtcaattcaaaacagcattctagagcacacatttgatgaattttagacgattggtcattcgctggctctttagttctccagatttgtgctcttgaaaatttaaggtttgacttcgatgcatcttcaccgttcactgatcatcttttacaatttggtaatgaccagaatctattttattttcttgaccaatgttaaaccaaagatttcagatcatcttaaactctttagaatttagaaggtagatgcattgattgtattttttatttagaaacgttattagttcaattgtacttaagtgtttggagttagatgctgtgattttagttgaagttccagtaaatatatagaatctagttttttacgtctgggcaagcaccataaagttcatttgatattaaccgtatatataaatttgtagtatgtttttaacaactgtggaggggacaaaaccatgtagcgtcggtatatcacaataaccttttatcacagactttatgattacaaattccttttggaagaaaaaatacacaaaagaaattgtttcatgcgtatacggtatacccaaatgataaactttttccaaataattataggaggtcaatttacaatcagacttctgctaaagatctttccagaaaatattcagacaatttaatgttgcttcacttctccccctgaccgttggaaaaagtttagccgcgatttttttgatgagagatagcttgacatattccccaggaattattttaaatgatattctttcgattcttaaaggaattgctttaatagtcacatcaggttttattttcagaaatcgttgctcgcagtacctcgttcttctttaacgtgtcgtcttcaattcctcatagtatttttttggaatgcatcttgaatctcctgtgaaattttcttcgaattgtaaagaatagcattacgaattgtttcaagagtaatagtaaaacacttactgggaagtttggtcgaaaaaatggcaaccttaagatttctgcataactccaaagactttttttttcataaattctctctcaaacttcgtcaacagttacacgtggaatcccgctttaagaattgtgtatttgcaggaaacccctcaa

SEQ ID NO: 768 - DNA, 225 bp, Aedes aegypti
tcttgttatcttccagacgctgagctccgtttccgctgcagtatctgctggaagggcttcaagcatccgatgtcattgaccctgcacaaggatttgcactcgggcaagaccaagtgtccagtatgtttgcgctcgttctctcgtagctacgatatgcgcatccacttgagcaagattcataagattactcttaaactggacgctaagcttaatattaagaatgtg

SEQ ID NO: 769 - DNA, 1446 bp, Aedes aegypti
atgaaaaagttcaaacacgttttctcagtgtggtacaaaatcctgaaggactactgcaggaactgctccctagtaggacttgcgtatatcaccagcaggaagtaccactacacggagcgactcttctggcttgggtgtgtcttactttcctggaccggctcctactatctgatcgtgtcctacatggaaacatttcgcaaaaatgcggtcagcatggtcatcgagaatgtccacccgcgggaaaagatcgatatcccttcgctcggcatctgcgagatgggctacgctaaggaaacgtatggcaaactggaaactgtgattgaagggtttagaactagcgaggacatggagtacaattacgatgtggaggatttcatgttgaggattatctttcacaatctgtataattatggatccattatgtcctactgtgctccttacacggattgtaccgactgcatcaagtgtccgaagtcgaattacaatttgtttgcggcgagagtgcgtgcgacttgtagtgaactgttggaagagtgtcgatggaatggagaaaagttcgattgttgcgaattcttcaaaccaattcagacttcgatggggtcatgctatctgttgaattcaatccaactggttgaaaagggcggtcaaaactggctcggtatgaaagttggtcgtgatacagcgcagggtgagctactgctaaacgtttcaaaagctttctcgtcctacattctaaacgaggaagacattccacacatgctacttaccagtctccaattcacgcaaatcccaattggttacacgggaacaatatatttcaccatgcagaacatcgtgaacgatccgcttgtccgaactgtagatccggaaatccgacgatgtatttttcctaacgaaaacagtaactcaaactaccgctattacagttacagtgtgtgcgtaacagaatgtctcaagatggcacaaatcaagatgtgcaactgctgtcatcacaacatgatcattgatgaaaacgacaaaagcccaatctgtggctacgatggccttttctgcttggatcaaaaagatgtcatgtttccccagacaacgatcatgcaaccgtggcgtaccaatggcttggtttgtcagtgtttgccatcgtgcaccgagcacgaaatacgaatcatcggcaagcagtccggtatcgaggaacgtgacggtcgctcggtactgttcaaactgattgcactgccaacgcaacgctatcggagacagatcgtgcgggaaaatctggacgtggtcgtttcgattggcggcattttgggactttttatgggagctagcattcttagtctggtggaattggtttattttttcacggttcgcttttttgcatccagctaccaaaacaagcctgaagatgaggacgaggaagacgaaagcgatgatgaaaatgacgaagactga

SEQ ID NO: 770 - DNA, 999 bp, Aedes aegypti
atggacgccgtggcggtcaagataaccgccgaggacaaggtccggacggtttgcatcaactgtctgctgctggtggacatgatctacgagttccggatggcgtgcaagaaagcgaatacgctgcacgccctcaagctgctgatgatgcatccgggaagttggatgagtgaggagaataagaccgcgatagaggcttgtcaccgggtggtcaaacggaaccgggccgagatggatgggttgttcaagtgttcctggatgggcgggggcaatgtgaaggaattcggtgggatgcagaaggaggtgctgctggacgggggagatgctccgaaggtcgtcgacaaggatgagattagcgacagtgacccggaaatgagcgagaaatttgggaaacagatggatcaagacacgcagcaggatgagatcgaggcaagttccgatgaaagtccagagaaaaaggaaccttcaaatcgcaccatgtgcgaattttgcggttcactggtaatgaggcacaacgtagagcaccacaaaaacgagcatttgggtctgaagccgtacagctgccggattgagggttgcgaagctacgttccattcctatatggctatgcatctacattgcaaaaatgaacagaagcacacgtccacagcggaacggcacaaacagatccaatgcgacgtgtgccaccggatgatcaagaacaaaaacatgaaaaagcacatatgggcacaacattccgataagccggtccatccactgaaggcgctgtgcaccgtttgcgggaagtattactacaagctctacatcaaggaccacatggcgacgcattcaggcgaactgccacacgggtgcgagttttgcggccggagattcgccgccaacaacagcctgacgatccacaggcgaaggtaccatagcgatcaattggatttacagtagcggacttctttctcttcgaagcaaatggtctcactccgactttcaacaaaaaacatgtattcc

SEQ ID NO: 771 - DNA, 669 bp, Aedes aegypti
atggatgctggagattggtatctgacggtggcgctgttgctattccgattagtcggattgatcaatgggtcaacggtagcatcggaggagccacatttgctaggaactgttctcacagaggagctcaatgtcgaagaggagaaagctgcaaatgttacatccctggattttcgcaaccaggaagcatcaacagttggtcatcaaataaagggagacgtagaatcttcaacaatcagcgtgctccaaacgacaagtctgcgggatattcatacagtaactccaacaatggatctgatcactattatttggtacgtggctacattgatagctctgatatcgttcttcgtggtaatggcatgcgcagacacgaataggtgcttcaccccaaagccaccggaagtagaaattcctgtacctccaacgccagctccatcataccggctgtttgctccgccaagctatgaatccgtcatcgaaaagaggcctgatagtatcttcatcataccgattgatgactacaatggacgagaacagttcactgatcttctagtggcaaatctttccgacgttatggaacctgtggagccgtctgccaatgttcgaagtgaaagtgtggaaactagtggtgatcctcgccgatctaggaattcattgtcaattactgtatga

SEQ ID NO: 772 - DNA, 2970 bp, Aedes aegypti
gttctgatgttttattttttcaatggagtttttcgtgttttgtttattttcccattggttttatttttattatttaatgtcatctttcttttctatattttaatttgtttagcccccttattaactttttcttagttctttttttttatttttattgttttttttcttattaaccattataaagaaatatagattcacattttaatgttcgtttccaatgctaagttgctgtttatcgatttaccaatatggaatacatattttttgtgctatttcaattttcaaacttgtgcttataaacataatgtaatgtaaacacattcttgttactttggctgtcttttgaaaaggtaggaggaaaacacctgttttcattttgttttcataaaaaaaaaatcttccaatcaccgcaccgcaataaccactggtagtgttggtgtgcttccttcgcaccccctttagatcacattcgacgaagcactttcttccaaacgtgcgagttgcgctccgatatgagccgatggcgtatggatgggttggtatagttcagatcgtttcagcagatgttagttttatccacgcgtttgtccagagttgtgtagttgtttggcttctgctcattcgtcgtcgtgtgttatgatttgtaatcgagcgaagtgttgggttgtcgtcgctgaatcactcctccgtccatgattgtatatcttatacgactggaagagggtacagtctcaaagaggatctatctccggcgtggtcgttagtgaagtctcccttctcgcgttcgtctgaagtgaagttcaactgggaatatcgtcctggaataaaagcagtattgcagtggtatattcaagaaagtacattcgatggtggttcgaaagtgagaataattgtgtaactacgcaatgtgattgaaagtggtgaataaaataacggctgactatccgtttagtgtactgttaatactcaatattcaagagattattgattaggggaaataataaagcaaaatggtgctgtacaagctgatggttgtgcattggtctatttttacgctttttattcagctggctttttgtgcatctgcatttacaaatagcaacctcaattcaatttgtgacgatgatagtccacagttcatccacgaaacgggattgcaatcgagtttggtgttgaatctcttgccagataaaagcaaaccgttttgcaagcttcaatttcacgctccggaatcccacggtttctacgtgcgtctgcagcgaataccgatgcccgtaagcaccaaccgtaaagtctcccagcaaagcagcggcatgtcgaaaaagtatggcagcaagaaacccagcaatatcactgattcctgtgcactgagcatatctcaatcattgcacggtgaagtgcttcctccatggcggttggatccctgtgagctggaaactcttggtgccaaagacgaaccggtaaggttgctgcaagggagattaaacattgtctggaatcatctgggcaatcaacccgcatacagattactggtaactgtaatcggtaacggtgccccttgtctggagaaaaatcggcatccgtgtttggaagtggatgacgttcctcttctgtgcatttcaaaggatctcatttgcgacggggtgcggcactgtccttcgtcaatgaatgcgttaagtgacgaggacagtgaaatgtgtgcgaaaaaaagtcagcaggatttaacggataatccggttgaaatggtatttaagaaatacatacaaactacattcaaagcattcttctttaccgattccaccgaaatgcctaacaaagaggcatcaacagtatcgagcgacgagaaactggtagaaacaactgaaacccaaactcaaagcactattaagcaacacaagagtacccttacggggttatcgaagtatggcccttgggggtatttgttcctcggtatgctgctctgcggtggcgcacttttgttatgcggcttgtgggaatgctgctgccggtcacaaaagccagattcatcagaaataccaggccaggagaatccatccgtatttctcgagtctggagtgagcaactccaacatgaacacatcgattggagctgctcaatcacttcctccatacgaggatcttgatccaccgccagcatattcggttctctttccaaaccaaaaatcatcggacaatctcccttcgttggctcaagcgtcaagtgtgagtcagcagagtgccgatggcattaatgaaccagtgcaatctagtagcggtgcagcgagcatcagcacagtccacatccagacccaaaccggtccatgagtaatcttattcataagcataggtttagaatctaaataaggctgattttattatttatttaacagaaatccgtattgtcgagtaggtagcttaagaatactccatttttacgggtttccgccagaaaagcccaaatctgtaaagctagaaccaaaccgtagagaatattatgaaattacgatttcatcgaaattcggttggaacctgataaattgaaatactctcaggcaggacaatggaacaatcaaacattccgttacgtttgaaagattttcattcaatttgcctcaggtattctgtgtcacaagtactatagaataagacagaacgtgttaacaacgaaatgtgtgaggtctcacaggtaagcatttgtattcgtattcagctaaatcgtcatgtgatattaaattatttgtaatcatggacaattgagaaaaacagtcaaattagtcactaaaattgtgtttccttcaatctagcattgtattcgaaagtccgttctctgaataagtcatctttatccccacttgaaaaatctttccaaatgttgttaaagagatttaagttttgaagaaatcgtttaattgtccttatttgcataattataggtttcccatacacatgaatcagttttgcgaatagcggc

SEQ ID NO: 773 - DNA, 1499 bp, Aedes aegypti
caaaggctgtcagtcttaccaacttcaaattgttctgattaaaatgctgaatttttttcgacgctggaacatttggatcttttcttcttcccgataactgtagtcaaaacacgcatgcaactacaaggagagttagctgccaagggtacctacgctaagccttataaaagcatcctggatgcgtttgtgacgatcaccaaaaacgatggatattgggcattacagaaaggattgacaccatcgctgtgtattcaatttggcatcaattctgcaaggttgggaatttacaataccgcctttgagaatggatacactaggaccaaagatggaaagcaatccatttggaaaaacgctttttggggcggcatcggtggattcataggatctgcgctagcaagcccattcttcatgcttcgtactcacctgcaatcacaagccgtaacgcaaatagccgttggatatcagcatcaacacaccggtatgatgagtgcgttgaaagaaatattccagaaacatggaatccgaggtttatacagaggagtggctgtgactatgccccgagcaatgttgggaagtggtggtcaactggccggatatggttacaccaaagacatacttctgaggcatcctcttcatgcccagcaatcggatcggttggtttcatttctctcaggaatagccggtggaacggttatggctattactatgactcctccagacgtagttgctactcgtttgtacaatcaaggggtagatgctaaaggaaaaggaatttactacaacggggttgttgattgctttttaaaaattctcaaaacggaaggagttgccggcttgtacaaaggcttttggcctcattacatgaggatcggaccacattcaatgttggtcttagtatttttcgacgaactcaaagcaatcagaaagaaatacttcagaaaccgagaaaaactgtgataactgttatttgtttattgtttacaagtttataaacgcatcattagggcctaataaatgttttccactaacgaatatgagatttgaagcccttcgatattagtagtgctgtatcactcacaatcctgccacgagtttccggaagatagaaataaacaaaaatggccaatgcgaaacaaacgatggaagatggtagaaatgcaaatgctccccatagatgttgtacaataggaaacagcattactataataagattagcaagccaattaccaaaagtccccaaagcgagtgccgatgaccgtgcttctatttcgaacatttctctccgatgaagaatggtatttggccgactccagtctggtatgacagcagaaacagcacgattgcccctacggataccatgggtaaccaactgacttcattctggaacaatatatcataatatgttatgttttgtaactcaaaagaaaaacaactcaggtaaagcatgctgacaagacattcagatcatactcacaatgaaataaattactgttgtattc

SEQ ID NO: 774 - DNA, 1296 bp, Aedes aegypti
atgaaaaacttcacgctggtggcagcagcaaatcgacgcgattacgtatatgctgttggcttgctgcaagtgcggaaaaaagtccatcgatcgcgacgacggctggaacgaaacgagtttcttcaacttctgttggcgggaggcgcgatgcagaacccaacatttccgtttcccgcggtcccaaatccggcggttaacgagaaataccgtcggaagtaccgccggctcaagcgagttatgaaaaatctagtctttgaaaacgctgccctttgtgatcacgttgctcagatccaggaaaacatcctgctggtcaaggaggagcgacggtatcttctgaagaagctgctggagcacgagaatgatatggaaactcagatgggaaggccatgtagcaaacttaacgaattgatagccaatagcttacctccaaaacgacagtacaaaaagcgagcagtgccagatggtaatgcagcggattcaacgccgaaaaccaagggccaatcaaagaagggtcggtccaacgccagttcaactaatacggataagaatgccgccaccaagaaaaacaacgttccgttcaatcaatcgggccatcccacctatccgatgacggtggccggtttcacaatctataatctgggggaaattgtgcccgaccggtccggctacaataccgagtacactatttacccggttggatacacagtaacccgaccgtacggtcatctaaaagaccccctaaaaaaatgcatttacacatgccgggttctggataacggcgattctccgcgttttgaaatcatcccggaaaacgacacggaactgaccattacggggaattcgaccgatgcgtgccacgccacccttcttcagtgtataaatgcctccctcgattgccgcaacatcgacgggagaccctccggcgattggttctttggactgtcccacccgaccatttgcagtctgttgcagagtttccctagttcaaaacgttgtctcaattacaagggcatcaagaaggagaactttgctaacatggacaaggcaaacgatccgacgctgaactacgaggccctgcagcggcacataacgatttcggcgtaccatacgatgccggagattaaggaagaaccgccggacgaactgctcgaccactcggatgggaactctttcagtttgtcctagtgaacattgagtgaactgctagaagaaaatcagatctggtttctgggtgaatgttgtgtgtcctgagtgtgattgaggtactttaataaagggatatcttttatgtgaatt

SEQ ID NO: 775 - DNA, 1053 bp, Aedes aegypti
atggctgtgctgcaatcgataatcctggccagtgtcctgctgctatcgttcgttgtacaaagaggtgatgcgatccggtgcttcacatgtaacagtgcggatgattcgatgtgctcgtacgataaaccgccgaacgatatgatggttgactgcgacacccacaaggatggcaacaagtacaccttctgccgaaagatcgtccaatcgattgaattttccgtcaacaatcctcatcgcggcattgaacaggacatcgccctggacatcaagaagggcatcgaaaccaagagttacgaaggtattggtgaagccgcaaagctgaaacctctggaagtggatctcaagcgtctggaagatctgtcggacgccattgttcaggactttgctctcatgcggaagcgcgaggaggagatgcgtgacaccaacgaaagtaccaacagccgcgtgctgttcttcagcatcttcagtatgtgctgtctgcttggactggccacgtggcaggtgctgtacctgaggaggtacttcatcgccaagaagctgatctaatctgaaaaacgaatttgattttgatttgggcagtagttgtgcgtgtatgtgagcgttcgccatgagtgctagagagcgtgagatcgattgtgcgattgttttccggatttataattgggttcaacttggtagcaaatcagaaagatgacatctgtcgcgtcgtccagcgtgaaatgcagcggaacaaatttgttgagttagtttataacccggcgcgaattatgtttctattattatctattctgtattatgtttctattcaatttttcgactgttggcaactgataacagaaatcgtattcaaacatattattcagtttaaaacatccatgcaagtaactttggcttgcaatttcccatttcctaagtttgtcgaaggggttgttaaaggccaattttgaatataagctcaaatctgaaaatataaagttttcttttgttttggttgtcttaaacaggttttatatagtttaatgtaaaaatagacttggtacatttgacgcattc

SEQ ID NO: 776 - DNA, 1290 bp, Aedes aegypti
acaaacaaaacgtttttttattctgaccgcctgagcgctggaattacaatttgcatcagttttgctgtaaattgaaaagttgagtgacacattaacatgcaggaggaatgccgaatcaccccagatgtatcaccttcaccaccaaccacccaaccggactcggaaccgatggtcttggaatccgatttaattgaccacatttgtcgcgaccagaaggtcttctacaaaagtcagcaaatcaacgatcccgaactgacggacgacgaaaagttgcaaatcctcagacaggttctcgataaaagtcacactacgttccttgcccggttcggcgcattcatcagggaagatcatttacggtatttcgagcaggaaccacaaaccagttgctacagcccggatgagcgatatgaggtggactactatttggacaggattcgaaaatctcaccacggcggaagagagcaagaagtacgcaacaggcgatacgcagcattgaagcaactggtccaggaggggaactattttagtgaaacggagatgatgcaacgggaaccgcttttgtacgatcaactggtgggacagtatttgacggagcaggagaaaaaggtgcgggacgctacgggggccaaaaatgatagtcttgtggcgatactgttcagtggaatcgataaggaaaacgctgaatctctgaagaaggaacaggaaagtgaggaacggcagcaggatttggcggatgacgatgaggacagctataaggagaagccaccggattcgcctgggttctcgagagctcagtggggaaactttgatctggaggaagaagagcggcagcagaatatccaacgagaactggaagcaaagaggcggaataaaaggttctctgtcccggtgaacatgctgactgcaggcgaaagggatttgctgagagatgagttcttggggacgatgtattccaaatttatatctggggaggatggtgattttgattattccaaaatcgacgaaagtgtcgagtacgataatctggacattttggaacaggacgaacaggagcggtatttcgacacggaagacgggatggatgagttggagagcggactgatagaagagcagaatggtgacatgcaacaagacgaagatagtgaagaggacgatctggatgtctacatgaggcatttgaatcaacatttggaaaaccagaagaatgtgcagcaaataagcagtcaaatgggagacataagctgtgaatatgaaagtgaagaagacgagtaaaagtatccttcatcagag

SEQ ID NO: 777 - DNA, 927 bp, Aedes aegypti
atgtccaccattacaccgcaggagaaactcatccactcggacgatggatttctcgtgtatcttactaagcagacaacttcaaccatcggtctccgatgggacttctctgaaccgctggaggcaccattcgatttattcaaggtggaaaagtgctacagctgcaagcgcaatcaatggcagatggtgcattgggggaaggcttggtccgtcaccgttcgcaacttagaacagaacctgtgctattcgttccggatcactgccctcaaacaaaatgaggaagacgaaagtttcggttgcgtgagaaagtccgagatattcaaatctttcacactgccggacgtaccgtcgacgatggccatttttcgggcagtgaaaaagagtcaaccggcgttgatacggaaacttttgagcatcaaaccggagttggttaacgttccggttaatggggagacgtttctgtatcaagcggtgcgcaataataacttggaggtgatcgatttgctgttggagttcggtgcgaatgtgaatcttggggttccgagcaattcggagacgccgttgcacttggccatctacaacaagaacatcaagatcgcccgtcacttgcttgagcacggggcagatatcaatgctgggaactgtattggaatgacagctgggcactatgcgatcgacacgaatgatcttcacacgctgaagtttgttctaacgcacggagggagcacggagtcacgtgatcgctgcagctggacgttgatttttcgagcgatctacatgcacaccagcatggagatcatcaagtatctactggagagaaagtgtcggttgaaaattcgagacaaaaatcgactgatgccgttggactacgctcggctgacggatcagcaggaggtcatcaatctcatcaaacgacgactcaagatctaa

SEQ ID NO: 778 - DNA, 3745 bp, Aedes aegypti
ttctaaaaagtccaatgatgtattttactcacagtgtgggtgatggactatcccatcaaagagagaacccctcgttgcctgcgaggcgggcaaattttacgcttcgcacagccctgttgcacgcgctctcagtcgcatccagtgtcaaacgccaccccctcgcacacctgctcatgctcagtagtcaacttcccacccgctcgcaggtgaaatttatctgtgactaacccacccactgtttttacgtccctgtgactttcgatcggagtttttgtgccataactacgcgaaatcggtaccatatcattagtgaacagcggaaatcctcctttcagcacaccgcctatcacaaaatcccgtgcgagccgtcaaatctttttgctcggttgttcttgctgctgctgcttccccggcgggacagaagcacggcatcgtcacggtcgtcgagttctctcgcccacctcctcattcaacatcggaagcttgatggcatcggatccctagaagacgacggcgtagaggatttcgttccgattcccccgacgactatccgtccgaccaccgtgacaaaggttccagggagttggtcggattagctgccagtaccggttcggtgttcgtgttccgcggtccgtacaagtccaagttcgggattgtgggattgaatcctccggatagtgaacttggtgcctatataaataggagagtgttggtggtgaagggaagaaaaacgaaacagcagtgcagtgaaaatgacgaacatgagtgaaggtgaaaaactccgaacggagcatcgggacatctgcgggcagttgaacatcgatgccgcgacggaggaacagtcgtggaactcgttccaggacacccagaagacgtacaacttggatgttgaccaactgcattggctatgctgttcattattcatcacctgccgaaagaaggtgacaccgaccgtggggaacaccaattccgtactgcatggcaactgcgtctcgatgacacggctcctcaggctgtgcaaaatcaacttgaacgaatttttcaagaagatcaaccaatggatggaaatgacctcgcagccggaagattgccgcaatgccatcagcagtctgcagcacaattttatcgtcacgatgtccatctaccagaagtaccgtgatatgtttccgagcatgtttgtggcaccctgcgaggaggaacaaaggcgtggcaaaaagtcgaaaccccagccgtgcacatccggtcagctgaacaagttctgctggaagctgtttatctgtgccaaatccgagtatccggaccagaacggcgatttggtcaaatcgtacaacatgctgttgtgctgcttggacctagtttacgccaacgtgatcgcagaagggcgcacagatctggttaatccggcttttgaaggtttgccaaaagacttcattagccagggtgtaattcccccggaaccggtttgcatcatcgagcacatcaaagaagataactgcagctccgtcataatggacatgagagaaaccatctggaagagcacgatccagcagttctgtcagactaatgtgcttcgtggcaattcggaaacactgatggaactcatcaccgtcgcaaactttgagttcaatctcaaatcgctggacaccacatacaacactttcatcctgagctatggagaatttgatgaaagcatcgctcttgaacagaaaactcctgaagggcctctcctagtaaagtcggagcttccgctatcgggaactccggaacgtattccgctttaccaacagactccgttgaatggtcgaactcgtcacgtctccaacgatgtaatcaaattcacaccaatttccaccgcaaatgcctcggttgccaagcttcacatgaagcttatgataagcaacgccggtgaaggacatggttcgttcaaagagttgcttcggatgtgccctcaggatctgtcccaaattttgcgagagcgggtagctgctatgcgggagaagttcgtcaggtatatgcacgatcagaaatggagtcgccaggccattgccagccgatgggaaaaaattcagactctgtactacagactgctggaatttatcattcgcgccgaagtgaaacgaaccaaggtcaacatggtgaaggagctgtgctgcgaggacatgttcaatcaaacgctgttggtgtgcagcgcggaaattgtcaccttcgcccacaacctgcagcaaaactttccctgcattctgaaggtgttcgatatgccgccgtttattttctatcgcatcatcgaactggtgatgatgcaccacaacgatcttctgtccagagagatcaccaagcatttggatatcatcgagaaccagtgcatcgaatcgctttgctggcaaagtaattctcctctgtggcgagccatggaaaacattggctacagagtgccttgcgccaaggatgtggaatgttccatcgatctatcgggcatcactccgcacaaacctggcgacagtgccagcaaaattaacggccagcttcaattggaatctacgccctcaacatcgacgtccacgccttcgaccagtgccccgggcagtgcacgcaagcctcccaatccggactcggccaagaagcgcctgttcatgttggacggcggtgacgagtcgggcaaattggacgcatcacagggcaaggattcgacgtccgaaacgtccgagcgtccgccggagaagaaggaaacaccgaaagaatctacggcaccgatttcattcatgtcgcccttcaaggctcccatcccgaatggatccgtatcgaagcggaagccaggaaatgcctcattgaacctgttcttccggaagtactacgctaccgcggctcttcggttgaagcacttgtgcgctcatttgaacctatcgtcgagagcgatggtagaaatatggaccatcttcgagcactcggtggtcaacagttccaaggagctgatccgcgatcgccacctggaccagatggtcatgtgctcgatctatctgtacgcccggatcaaaagagacacgagaacgtttgccgacgttatgaaggcctaccggaccttgccgcagtcgtacagccacgtgtaccgcagcgtcttcatttcgcgcaaatcggtggatcagcaacaatcgcaacaaaatgggaccaatagcaatacggagggtggggcagagtcgcgtcgagtccagccgggagatatagccggtgtttcggtgcagcacggtgacgaagagcgaggcgacatcatccggttctacaacacggtctacattacggaaatgcagtccgtggccactcagtttggcaacgaagaagggcgttcgttaatgttgtctccgctgcctaaaactaccaatcggtgtctgcttcaatcaccgaaaaaggtcgataatcgtatttccttgtacctcactcccatggacaagagcaacgagttgaaggagtcgcccaacgccattacgatccagttctgccatagtcctgcaaaggtgagtatcctgggggtcgtccttataccacgtgcataacttagatcagggtgtcgaccatctgacaaaacttggaaggtcacgaaatgacagggaattcatttcctgatctgaaaagtcagtgaatgtctgcagaggcgttgcgtgcccaaaccaacgacctgtgcaacaacaagaatttttatgaaatttaattaataacgcgtattttaacagtaaattccctgtcctttgattca

SEQ ID NO: 779 - DNA, 759 bp, Aedes aegypti
atggatgaggattcgaatcaaagctctcgtagcagtaatccccacatagatctgcatgacgaagaatcaaaacatcgcgaatcggattcgcaaatgactctgacctacggtggatcagattcagagctgaatgacaatgatacgctccgtctggaggattccgatgacgaagaagaacaatgttcagcagagcaggaacaaccgaaggcagaatcagggaccataaatgaaactggttcgagcaatgatcctcaatcgataaccgtttcccaggtcggaatggaaccgagcaatggacagaatgagggtccagaaaagccgtcgacttttgacgatagcaatgacgaggaggataaatccccaaatatcagaagtcgtaaaaagatttcacaactcattgataccgactcggaggaagaacagactagatcgaatgttcccgccaaaaaggtatccaacattatcgatagcgatgatgggtcggaacaatccgacaaagaccagttgaagaagcagaatgcggaaatcgatgccattggtgaaaaaatcgaaacatccatgagcagatttaagtcgttgatcgactcggattcggctagtccggcaaatgattcggatggtgaaacaaagacgcaaaagaagaaaaagctcaaaacgaagaaagaacgggatcagggcaaaactaatgccaagaaggatgatcctaaggatttgctgtccagtatccgtcagctcgacgtcgtcatcttcagcacataa

SEQ ID NO: 780 - DNA, 2983 bp, Aedes aegypti
atgaccccagaacagttggcagcctatgcaaaacaactggaagaacgtgagaaggaagcattggagttcttcaaaagcgaaagcgatgaagatacgaacgaacaagagaaacccgaaaagggcgaacaacctgatgtcgaaatgaaacccgcagaagaaggaacacccattgacaaagcgatggtacctgccagctctgaaggaaacaagcatgatacaaatgatcccgtttcaaccgaaggtgatgtgattgtgaatgcatcaaatggtgatgaaccagcttcggtggcaatcgcgccaatggatactgaactagtcgaaagccttcgagtatcagatacggaggacgacgctttggacgctctcgtcaataaaacaagcgaaaacgtggaatcgcttttggcttctcaagtggagcctgaaaacatacaagcaccggcagacaatgaacctgttgctggaccaagcaatcaaaagccggtaattgattacgacccgttcccggaaccaacgccttctaaactggcacagataaaggcagaacttttgatggaaggttcgttcaaggcatgtccagcacttacaggcgatccggacatgatgattgatttggacacgggagacgtcttgccaaaaacgccttcaggacctgaattgcttcttcaacgctttgtgaaatgcagtgggaaaaaggcacacaaagctaccagtgtggacattctcagcaccgacaaaggagtggtggaaatgaatacggtaaagctggatctggagcaagaagagcgcgatccaaatggaaaagagccagttccgggtgcagcttacatgaaacttaaacaaagcttgtgggaaaagatggaacaagcgcgacgaaacagccttttaaagaaacaacaagagacgcaatcggtgaagaagatcgatgacgacgaggaggatgaggaagaagcattgattgccgatggcggactagctgaagatgatgatgaggacgaaacagaatgcaacgataatgatgatgatgatgaagaggaagttagtaagagtaagcgatgtgacctgcttgacgacgaagcggaagtagacgaagatgacgaagaagacgatggggcattggtaaatcaagcagctgagtgcgaagaatcgaatgaagaatcaagcgatgaagacagtgagcaagaatccaaagacgaatctgccattcctgataaggagaaaagaaagagccgaatcattgcagcatttgaagattcagatgaagaagttctagaaaaagaatcaaaggcgaatgaaacgaagactgtagaaagaacgactaccgaggaattgttttctactctagaaggtaatgagaaattcactctctccgatcgtaacaatctcgaaaccggcgaaaatatgacgctactatggaaggacactgaagaacaggaatctgctaatgcccatgcggatgatgaagacctcttagcattgtgttccggccggttcgaagcaacgcaagctcgtccaccgctatcgaactccgagtcaatagccactacccaagcaatgacgactccttccgattttatcctcaccgaaagtgatcgcatgacggcagaaagtgagcaacctattacaactgctgccctttttacacagcatggcaatcaacaggttgacgatggtgagttgatagcgctctgctcgggaacgtttgctactcagcgacaaacgtcagaccttgaggcagaacaacctctaccatcagaagtgaccaccaatggaaagttggtcatagcttcttcggacgaggaaaatttacaacaagacgaggaagaaaagacgaaaaagaaacgtaaacgacgaaagctcaatatatcagacgacgaagaaagtgaaatggaatccgaggcggatgaaatcggtgatgcagacgatggagaagtggcagaggatgaagacgagccagaacggttcgtggactacgattcggaagagaatgaagtcgaagtagtgctgagcaagaaggacaaagagaaggtggccaaaacttttgtggagaatgaagccgaactgtcggagtcggaatggggcagcgcggatgaggacgaaaaggatctcgatcggtacgatatcgagcttggtgacgaggaaaagttcgatcaagaaaagttgcaggaagagttggagcggatccatatgcggaggatattggagcaggataaaaaagaggtgaagacattgcaggacatgttcttcgaagatgaagagaaagatggcgtaggtcgagagaggcaattccgatggcgcaatgtggaaacaacttttactttggattacgataacaagggaaaagatgaacagaaggccgagggcgaagaaagtgacggtgagacggaggctcagtggcgcaaaatgagattcgaacgcgagatgttgcttaaggagaaaaaaatcgatttggattcgattgatttgagtgggtcactaggagatcaatctgtccaggaggacgtggagaataaccccattgctgataatcaatccacgttggtgatgaagcggaaactaactgttgttcgacagataaagactgttgaagccagcaataaaccgcaagaatcctgttttctaattaaacagtctacaagtttgctgggccacagtaaagcatcctttttaacgcgcgattcagaaacactcaaacggctggccaatttagccaaagtaaacccggaaactgaaggactaaatacagccacggcaggaaaaggtagaaatttcgtgttcaccgccgtcagcccagctgtggataaaatgggatccaaacgctcatcggatgccgcagaactcaatgaatcaaataacagtgctaaaaaagtgaaaacgactgacgagtccccaaaggcggaaagcaaaaaaaggctgctactagcacagctcatgtagataagaattttgatctatttgtacagaatatataaaatataagttaatt

SEQ ID NO: 781 - DNA, 2326 bp, Aedes aegypti
gcattcaagcatctgcttctgttctgtattcaagagcgttgatttagtggtagaatttcgctgatttttgttgaatttccgttagattattgtttaattgtaatcgttttcaagtgcgtgggtttctttcgatcggtgattcaattttcgtcacaatgcaacgagattacactgccgacaaagaaacgatcaactccttcctcacggaattctacaaggaggatgaggatggcaagaagattttcgtctacgcccgtcaaatgaccaacattgcccatcgagagcaggttgcattgacgatcgatttggatgacgtgacgagttataatgaccagctggcggaagccattcaaggaaactgccgccgttacgtcaagctgttctcggatgccgttttcgatctgctgccctcgtataaggagcgggaaattgtgagcaaggatccgttggacatctacattgaacatcgtctgttgatgcaatctcgtatgagaaacccgaacgagcatcgagatgcccggaattccattcccgcggaactgatcaaacgcttcgaggtgtactttaaggccccgagttcctccaaagcgatttccattcgtgaggtgaaggcagaaagcatcggtaaactagttacggttcgaggtatcgttacgcgatgcacggaagtgaaaccgatgatgaccgtggccacttatacttgcgatcgttgcggcgccgaaacttatcaaccggtttcgtccatgagtttcatgccagcgattgattgtccatcggaggattgccgcgtgaacaaagctggtggaaggttgtatctgcaaacccgcggttccaagtttatgaagttccaggaactcaagatccaagagcacagcgatcaagttccggtgggacatattccacgctctttgacggtgatgtgtcgtggagaagtcacacgtttggcgcagcctggagatcatgtcgtgatcagcggcattttcctgcctcttcagaaatcaggattccgagcgatggtttctggattgttaagcgagacattcctggaggcacatcgtctcgtatgcctgaataagtcggatgaaggagaaaacagtaatgaaatcaccgaggaagagatggctgaactggcaaaggatgatttctataccaggatggccagcagtctcgcgccggaaatctatggacatttggatgttaagaaagcattgcttctgctgctcgttggtggagttgatcgtactccagatggaatgaagatccgtggaaacattaatatctgtttgatgggagatcctggtgtcgccaaatctcagctattgggttatatcgatcgtctggctgttcgtagtcagtatactacaggacgtggttcttctggagtaggtttaacggcggctgttatgaaggatccattgaccggtgaaatgatgctagagggaggagcactggtattggccgatcaaggagtttgctgcattgacgagtttgataaaatggctgaaaacgatcgtgtcgctattcacgaagttatggaacagcaaacaatttcgattgccaaggccggaataatgacttgcttgaacgctagagtttccattctcgcagcagccaatccagcatacggccgttacaatccacgtcgtacaatcgaacaaaacattcagcttccggctgctttgctgtcccgtttcgatcttctgtggttaattcaggataagcctgaccgtgacaatgatctccgtttggccaagcacattacattcgtacacagccatcttaagcagccaccaagtcgcattaaggccctagatatgtcactgattcgtcgttacatttcactctgcaagcgcaagaatcccgtcatcaccccggaattgtcggaatatttcgtcaatgcctacgtggaattgcgccgcgaagctctcaaccgaaaggaccaaaccttcacttccgctaggaacctgctgggaattctccgtttgtcgactgctcttgctcggctccgtttggccgatgaagtggacaaggacgatgtgcaggaagcgctccgattggtcgaaatgtccaaggactcgttgaatttgaccgagcagaagactactcacgttcccaacacctccgataagatctttgccctgataagtgagttggccggaacgagcaaaacggtcaaaatctccgacgttttggagcgggccactaccaagggctacaaaccggatgaggtggatacttgtatcgtagagtacgaggagctcaacgtgtggcaggtcaatcagacgaggaccaaaatcaccttcatttaaatgcgttttcctttttg

SEQ ID NO: 782 - DNA, 545 bp, Aedes aegypti
atggccccggtttgccatcttgacttcttttggcccggtcggctagtgctaagtggtgaccagaaagctcccctagagagaatccgtgtaccgctaaaccggatcaagtttttacggcaagattgtgtgcgttctggtggaacattgtggagcccctgtgccgaaggaaatggcgactttctggtgtggaagcagccgtggggatacgaagaagattccgatgtgccctttgcgcgtttggcccggctggcttcagtgattcacgacctaccaactgaagatcgacccattacgcccgaggattgcgatcgccactgaagacgtcctgttcacccgaccagaagcgaagccaacaccgaggcggatggtaacgggacccgcaacgccatgtggtcaggcaagaagctggtaatgtacccgacaatcctattttccttcctttctttgttaaaccaaaagcaccaaaattaaaatgaatcttattaatctaactgagaacttttaaaataaatgtaggcaaagccctgaattttctccatctcctg

SEQ ID NO: 783 - DNA, 1131 bp, Aedes aegypti
taccgatgtgccgactgtgggaagcaaatggtgtctccctatacgtatcaagcccatctgagaatccacagcggcgaacgaccgtttgcatgccctcactgtgaacagacattccgaatttcccagggactgacccggcacgtgagggaagttcacgagaaggttcgcaactattcgtgtgaagtctgtggcaaacggttcggaaacggtcgtaacctgaaggaacatcgttttctgcacaccaacgagaaaccatatggttgcgacgtgtgcggaagttctttcaagcaaaaggcgtccctccatatgcaccggagaacccacgagaccaaccgaaacttccggtgttcggtttgtgcgagatcgttttacacccgttccaagctgcaactgcacgagacaacccattcggatgtgagggcttacgcgtgcgacgaatgtggccaaagtttccgatcggggcacaatttggctcggcacaagaaatgccacctcgccgatacgtcgttccggtgccacatttgcgaggccgcgaacactttccccagcaaatccaacctggtggatcacctcaaggaccagcacgcggatcagatattccactgcgagcagtgtgacaactatctggaccggaacattctgattcagcacatgaccatgcacgctctgagcatcaaacgtccgctgtactgttacatctgcgagaaaacgttggccaaccgaagtgcgtactcgtatcacatcaaccaggtacatctgaacatcaagaacttctcctgcacgtactgcagtaaaaaattcggaaaccaaagactcctaaacaaccacgtggccggtgttcattcgcgcgaccggaacttcacctgcgacacctgtgccaagcggttcaaaacgaacgtcgccctgtacaatcaccagcggatacacgacgatgccgccgtaaagttctcctgcacgttttgcgacaaaaagttccgctaccggaaccacctcactagtcaccagctggtccacatgaacgagcgcaacttcccctgcaaccagtgcgacaagaagttcaacaacccggaatgcctgcagaagcacaagctgacgcacgtcgaaacgctcccgtatcagtgtccgctgtgc

SEQ ID NO: 784 - DNA, 1655 bp, Aedes aegypti
aaaatttcgtagaaaaaggcagaaaaaatgcaaacctaaacaaaattgagtttgtgcaattaaatttttcgtgaaatttcgtgattcaagcgcgttgccataaatcaaaagtaattgaaaacagttatcatcagcagcggcatcatgaaccgctagtgaaaatctgtgaaagtaatacgtttaggccgcgaagagattccgcgattgcgaaatctggaatcaagtttcaaccaaggaagcaaagtatcgacggcaaaacaaaaatgatggacatttgccgtctgacgtcggatggcctccagccggaggacagcctgaagatggtggagattgactttcaggccctgtgtcggatatgcggtgccctcggggagaatttaacgtcggtgtttggaaagcgggcggccgatcgattgcgggaacggatccggaagtatctgcagatcgacatcctggcggaggattgtctgccgacgaaggtttgcgatggctgccgggagacgctggatcggttccacgaactgttcgaaaagtgccatcggacggacgaaaagttccggaccatgttgagttccagcgaggagctgaaggaagtggctgcggttccggaagaggaacaggaggaggaagaagaggatgacaggcagacgaaagtagtggctgaggaggagacagagaaacaaatagaggatgttgccagtccagcgaagaaatccaaagagagcaagcggaactcgaaacaggaggaggatactttggaggaagttccggagaagaaaggggaccttgttcggcactccatccacattgtgaccttcgacgcactgcacacagaggaatccgaagaagagcattacgaatatcagttcctggaggaacagtcggaggctgatgaattggattcactcatgcagccatcggcattgcttcgagctcatccagttcctctttcgaaggaactcgttgaacagggaaaagtaatctcggatggaaaggttgcctaccgatgtgccgactgtgggaagcaaatggtgtctccctatacgtatcaagcccatctgagaatccacagcggcgaacgaccgtttgcatgccctcactgtgaacagacattccgaatttcccagggactgacccggcacgtgagggaagttcacgagaaggttcgcaactattcgtgtgaagtctgtggcaaacggttcggaaacggtcgtaacctgaaggaacatcgttttctgcacaccaacgagaaaccatatggttgcgacgtgtgcggaagttctttcaagcaaaaggcgtccctccatatgcaccggagaacccacgagaccaaccgaaacttccggtgttcggtttgtgcgagatcgttttacacccgttccaagctgcaactgcacgagacaacccattcggatgtgagggcttacgcgtgcgacgaatgtggccaaagtttccgatcggggcacaatttggctcggcacaagaaatgccacctcgccgatacgtcgttccggtgccacatttgcgaggccgtattcaaacagaagcgatacctgatgaagcatttgaacaaacagcatcggcaccaggaggaccatggcgagtagaagcaatgatatggctccgaatggtggcctgagattatttcaataaag

SEQ ID NO: 785 - DNA, 4427 bp, Aedes aegypti
ctccatatcagcagaaaacagtagtgaatattatcgctgaaaagtgtgagaattaagaagtaaattccgttctctttctgtcgaaatcacatccatccgtaagaacatatgagcgagctattcagattggtttactgaatccttgactgtcgaagaagctatcgtaacccaatacgatagtgagtaattactgcaacaggaaacctggtgttaagagaagtaaaaaaatcagttcctacgaaaaacttatctggatcaagttttaaatagcatttgtttgcgtaaatataatgaaaatgaaggaattcttaaaagtggcggttccgaaaggatttgtatggtgaaaaaagtcaaaatcctgaattcctcatagtgcttctgttgtgggtggggatctagttgatccctttcgagcctagaataagtctttcctaaacatcgcgtatggaattacagtatcgcctgacgtatactctatacagtaccaaccaagaactgcactagtgactagataaatcagcataaaaaggagaaattctttatctttggattgtgtgggacatgggatcggaaaaaatgtccgatgaatgttctcagcgtgatatcgacaacaacaaatggctatatttgagaaacgactcgaacaaaaggtcgttctagatgatacggaaccgatcacctgtaccattgaaacagcgcagaacatcgatgggcatacggaatacgtgttaagagcacagcgaggaccatatcctgaaaacagctggcgtattctaaggcggtacaatgacttcgcttcacttaacaaatgcttgcaaatatcaggaatcgatttgtcatttcccggaaaaaagtttattggtaatatgcgccctgatttcatagctgatcgattaatagcattgcaagagttcataaatcaagtactaatgaatcccattttggcatcatcgttaccaaccaaaaagttcattgatccggacagttactcgacgccgttccatgatctcgctctgcaatatgcgtcaatgtgcttacgcacggacggcgtctatacactgggtcaatctttgggtccaataggatggcggttgcggaagcattatttcaaagtagtgcacaaaccgcaaggaaacaaacactcgccgggacattccaacaccaaacatcatttaataaaatcaagttcgcaatcgcacggcaaacagcacacaactcaggtttgtgtaacaacatcaaccgagaaggactacaatacgaaagaaagtggaaaagacgacttgatcttgacgtggactgaatttggaccggataagtatatcgacgagaaagaaattcacaatgtgttgaagaactttggtggcgttcaacacccgttcattgctccaattgaatatatcgcatcgaatgatagcggagcactcgttatccgaaagttttacaaacaaggcagtttgaaagatgttctttgtgcagcgtccccgtgtaatccgttcttgtccaaatatggtagccctaagggccgagctccgctaccattaaaagagttagcactttatgcacgacaaatcttggaggctattagatttctgcattcaaaaggcatggcttgcgggcacgtgcactgtggtaatgtgttgattgttgatggcgtggcacgtttgatggatgtagaaaacttcattttcggtgtgccctcattctatcggccattctttgttcaacatagcaaaataaacacatgcgaagctatcgacgtgtatggatttggacacctattatacgaaatgtgcatgggttatcctttgcaagattcatacgccagacaaatcctcgactgtcctgatagtttgaagtccctgttggaatcaattctttcgaaagatgcatgcaaatcagttcttccgacgttagaccaactggccgctcatcccttcttcagtgaatatgctgcgagctttaacgatcagtacgcaatggcgattgccgcccagaaaccttatctcaaattttcaaccaatgccaaagaacagctgaagaatgcagtccagaaaacggaaaatcgtgtgcgagatgagcagaaatcggtcaaaaatcaaaaacgtctagtcagggtgcaagagatgatgacttcggaggaagagaagaagaaaatcaaacataaagcgaaacaagaacaacgtcaggccaagcttcgagcccaaaattcattgcaactgaataatggccctccgcaaacggtaacggtgagtgcaagctctggatccgccggtgctgttatggtaaagtcagatagtgcgaacagtatcgtctcaccacatgaagcagcattaatgtcacctccaccgcatgcaaccgacagtggcggaagtgcttcttcaccgttaccgcccccatctgctccaccgattccaccgccatcatctctgccactgttcgaacaagctgctgcaactggcttggggtcctccaatggaagacaaatggtcaagtcaatttccggcgacgataacagcagttccaatcgtagtgccctgctggaatctatttgtaactttaacaaaagtggactcaaaaagatcaacataagcgataactgagaaaaggttttagaaggaaacattatgtgtagattcacatttcctattgatcgaaatttcagtgaaacttgacggtaggcgtgtgtaggaaattgaatatcttcctaatctagcgtacgatccaacataaacactgtgcaaccacacccaaaaactacaaaataacaagcattaaactaaaggaagagttttggaccaattttttcgtactctatagataaactaataaaactacaaacaactcgtaggtaaccgaaattcaaccggaattatttatatgactgaaagtgtcgaagttgttgttgaattgatctgttaaaatcgacagacacgctttactaggtggtatgctccaattgtttcattttaacttcctgttagtaatatttatgtatttggaaatcgatcttttttatcatttctttaaaaggcatttgtggaatattaccaccgagtaagcattgaagaagactctagggcaaaaccaaattataaaacgcgtttgaaattacgtatattttaaatattattcaattggacagccaaataacttttctcggattaaatacgattggcgaccttaatcgaaatggatatgtttcctgcacgtttatggctttaaacaaggaaaactaattatgataaacttatgaatgaagtaacaaatttaacacaaacacacttataaaaaccaagcacagataggcacattcaatggctaggcataacaaagatattaaatagttttttgtagttgttgttatgtgaaattattgtaaaaaagacatcaatcatatgcctataaaattttgtttaatatgaaacttatctactttctttgcaagttattctgattgatccctttctggggaatctttgcaagccttgcattttttgttaccaaacattttttacgtgctaaaccatgcatggtcatattatccacagcagggtcgtttcttaatctgtgatgttatgttactccgtatttaacattcaaattggtcttcgaaatggtacgtcgtttattatctgaacgagttttgattaaaggaatcaaaactggcaagtggaaatgatcttatgaatgaaataatgttaaatgcgaacttttgtgtaacaaatggaaactgcatgtgttatagaagaaccctgtaataaagaatagcgaaatacttattaatgcttcaatcaaaaatcatacatgcatagtcggctccatcatcactttctgactccttcatcattatttatactgtccagtccatatttagtgccatacgatacttcgtgcacgtgtacaaatcgtcacgttgtacaaagtctgttggaatcggggcaaacatttcaaatatagttgttggcatgtttctagtaaccaaaaaaagaacatctacacacttcatatatttattccaaaacggaaaacttatcactatctcttataattgtgatttatgtgaacgtatttgtatcctgatataactcctcttttataaaaacattatacaaaataaatgataccaaccagtgtaacatattcgatagtataacaaatcaacaaaaatctattcatattttgatgggtggcgaaaattaaaaacgatggttaaacaacaacatttttgataacggactaaatttataagaatcatgatgtctttggtacaggctattgtctcctaaaatcattttaagaatcatacatggcttaaatttaccacatcaacaacactagcttcggcaacgtaatatattaaaatcatttattatatacgcatacaatccaaatatatctgtggtaaaataaacattaacaacactttt

SEQ ID NO: 786 - DNA, 2615 bp, Aedes aegypti
atgccctcctgcagtggattaatcgatgtgatcaaatacccgagggccctgttccggacggtgtttgtgatagcgaacaatatttactgcgttccaacgtatctggtatggatgtttttactgctgcccttgaagaaaatccacgagaactactactacaaaattgagggaattctgttccactggctgctggcgaacgtatccatgtggtccacaacggccggatatgatttggtggaaatgggtgacgacattgggccggcgttggacgagcggacactggtcattgcaaatcaccaaagtacgtcggatgtgccactgttgatggcggcgttcaatgtgaagaaaggggttctaccgaatattatgtggatcatggaccgtatgttcaagtataccaatttcggagcggtcagtttacttcatcaggatttctttattgcatcgggcaaatcaaatcgagagaaatcactggtgcaattgaaatcgcacctcaaaaaatcctacattccacgcaagcgaaagtggatggtgctttttccggagggtggtttcctccgcaaaaggaaggaagttagtcaaagatttgccgagaagaacaatttgccagtattacaccacgtgacggtcccgcgggtaggggccatgaaagcgatcgtagatgttctcggttcaccggattcgccttgccgggatgaggaaaagatgttgaacagcaacgactatgtcgagagcacaatagcaaccgttaccgatgaattcaaccgtagtttgacgactgccggattcacaaacgtagatcaccaccagcagcaaccaaagcagaacgatgtcattaacaacagcagtagcacctttatcaatagtgaagcaataagtaccgatgactgtgatagttttaaggattcaccactcaccaagctgaacggcaaactgaacgactgtttagaatacattctggacattaccatcgggtatcccaatgggaagccactagatttaccaaatatcgtgcacggccttagaaatccgtgtcagacttatttattctataggttataccgtagttctgaggttcctcgggatagcgaatctcttacccagtggctgtatgaccgatttatcgaaaaggagaaactcctcgatgaattctaccggactggaatgttcccgtgcggctcgtcgtcgatgttgccgaccgtgatacagcaggatctgcttcgattccttctcatccatctattcttcattacctccacctacgtccattaccaattgatactgatgcttatcaattactcgaatgttatgtacgtgtatctacttagcgatagctaagctccgtcgacgagcggctgatgttgcgatgaggtgagtgagaatcatttaagcacattaacaaagactaaagacaggtttagtagatatttatgaacatgccgagaacgaacgcacgattccaggttttcaggagtgctcaaaagagtggcacattatgtttaaaaatagcactggtaagaagcagcaagtaatcttatgaaaatgaagacgacatcgtaacaacattcacaaacggcagcagattaattaatcaaactagttcatatattgtcctattttttggattccttagaaactttcttttacgtccgatcaaaaagcataaaattgcccaaactcctgttagcggaaatgattttccaaattgtataaaaaaaaactatatatttaatgtgtgtgttgccaacaatcgtttttacaaaagctgacaaactttaataaaccaaattgctgaaaacacagagtatcattgatagcgttgagaacggttcaaacaaatcgaataaaactgaattgtaaatgataaacaaaacaaaactgtattaaatgataaattacaataaaaagaaaaacaagcaaacaaacaatgcattacacaaaacgatttaaaacaagaaagatggtagacattaaggacactgaaaccaaacaggcagttttacacacaaatccaataaatgaattgtataaagagacgtttgctatggtactgatttccctaatcatagaagttttcattcttaaatctttcgtctaagttgtaaatacagttatattctctacaatcacttgagttaacaatcagatgatcggaacgatttgaaacagacctgtgcccaagtctgtgaaatgaagtggaacgcgactctctttgtagtagttgagaatcgagggaaagggtggaagtgaatgtcagtggctgtgtatgtatgtgtgcgtaaatgagaatgatttggcttactattgttttaggatctagtgattttgtttgcaacctgctaaagtaaatgtagcacaaactgggtttgtaagaggtataactacaagtcgggaaaagatggctggaactgaaccgattatgatcttgcttttatggactgtcgccacggtaattgtttgatcgcttggtgggattgaaaggcagtgatcgatcacttaaaaaaaaaaacaatctaaccgaaaaaaaaatgaaagcagtaaaaaatgttcttttttccagttttgcttctgaaaagtgagaatttattggaaaaataaaatgtcatttcattgta

SEQ ID NO: 787 - DNA, 2643 bp, Aedes aegypti
gtttaaatttttaatcgtgtgcgacgtattttgagagtgtgcgcaacaaaacatcgatcattcactcttgtagcgcgacatcagtaaaacaaatcaaatcgatgattgccttcaagctttgacagttcttcattttcacacaaaaaatatcactttttcagaatatcagcaaaagatacgtattgtgcagtggaaaaatacacaacggtgagcagattcgtccaatcgacccacttcggtaacagagaagagtaccgtaataaggtgaggtgcgcgaaaacaggcagacaaaaaaaaaagaccaacagggagaggaggaggattgataacgatggtcagcccggataatgtggaccaaacgctgcggaacctttcgctgactccgctggatggccatcagggtagcggctccgacaccgagagcgacaatcggagcctaaagtggcatcttccgctgaaggaattgtacaagatggcctgtgcgttttataaggaaaaatccggcaaggcgattcacttgagctacgaagataatttgaagttggtggcattcacacagcaagcagctcatggccctttggatcccggcaaggcgcctcagctgggaatgttcgacgtgattgggaaggaccgacggattgcttggcagcatctgggtacaatcacgaagcttcaggccatggaagggttcatagatttgttggaccggctgtgtcctcagttcaaaccgtacgtcgaggcgatcaaaaaagatcgcgaggagaaagcacaacaagcacaggccgaagaagccaaaagaagggaacaagttgagaaggaaaaagagaaactggccgagctgaagagaatcgaggacgagaagaatcgggaggagatccagaggcgtcagctgcaggatgctctgaatcaacaaacttatcatcagtttaaggactacgccgagaagcagtttccgggtaatcctgaacagcaggcagttctgattcgacaattgcagaacgagcactatcatcagtatatgcagcaactgcaagcacaagtcgccagtaatttctctcacatgcgcgccacaagcgtggatagcgattcggcagaagtagacgctggaaaccaagtgacggaacagcacgccggatttcaaactgaacaggcagccagtgccaaagagaacacccagctggagtacaaggaacagtgcgatagtgatgacgagtctggagagtacgcagtcataagtcctgccaacatgtggacaaagccggacgtgaaattgttcaagcaagaggtgacctccggcaagggcgatggtgtgattcgggttggacatggtgatacaattacggttcgagttccgacgcatgagggtggttccagcttgttctgggaattcgctacggataattacgacatcggattcggtgtctatttcgagtggggcaaacccatgacgacggacgtttcggtgcatgtcagcgagagtgacgaagacgacgacacgcttgaggacgatgacgtagtttgcgcggatgatttggagtgtggcggtcagcagcagcacaaacagcagtacaacagtggcagtggcagcagtgccctggccaaccggaatccgatctccatcatcgtccccatctataggcgcgagtgccaaaccgaagtgtacgccggatcgcacagttaccctggcgagggaacctacctgctcaagttcgacaacagttacagtctttggcgctccaagacgctctactacaaggtgttttatacgcgataattggttctaagttagaattagcaaaccggaaggaggaagcacgtattttcgcacaagagatattagcttctcagtttgtaagatcctatcgttctagccaaatgctctgttctctgttactgtactctgtaagaaagtgttttctttctctatgtgtaatgtaatgaaacgtaccttttgaaagattgcacacataaggaccactaatggtgaaagcgaacgtgaaatctagttaatttattgccggcggtgcagatgtttgttagttaaaagattttaaaagtagcaagtaatccttctttatatgtgaatataatataaaaaaacacattcaaacatataccttaacagtgtctcttgaagcgattcgatgtagggtgaatttttaccgatttcaacagttcagctaacgaacgaaaacagtttaaaggacaaatttaaagcatggaactcaaacgatacctatctaaaatgtgacattgtttcatttgggtgatgatttatgacgcataaactaattacaaaaggtagatgttacatccctgtgaaggaaaagctgtgaaggcgaatcaagtcgagaaataaagagaacatgatgttattagatgtcataccaaaaaagaacgtgtttctgtacctatattgcttaagtaacttccgaagaatactgtttggtaactcttcagattaggacagcaatttaggaggatctctaacgcattatgtatttttcatctacagtaggcgttggaatgagttccggactgaacgagctctttcaaatatttgcgagctaccatgcgtctccatgcgttcaatgtccgtcacaaatggttaatccaagtcagaaatacagtcaattttctaca

SEQ ID NO: 788 - DNA, 2182 bp, Aedes aegypti
cgtcgcgttaacactttttcgatgggtgcgatcagcgcgtagaatatcttgaaaaaaaccgtgagagtgagtgtgcatgtttcctttcattcctagtgccagaaatcgacgcccggataaagaacactaccgattttttaaagaagacaaggcatggtggccgtgaatcgttgtatgcacttgtgcggcagtagtgcggaagcatctggatgatggttttatgacttgtgttggagaagaacgcaagtccggcatcgcgatagaatatcaaaccccagtcatcgctgagaactgcacgcagcaacctgcactccgatcggagattgcaaattcttttcttctggataattgatgtttatttcaagtgatttgtgatgaggcatgcatccgtatgggtgtgcatcctgacattctacaacctccaatcttcttcgttagccgcaatcgttccaccaccatggagtgacccgaataaaaacccctgtgctagccagccgggagggtggcaacttctctattggcctcctctcaagaaatgtttcaaaatcttccagcttggctatccatgcccggaaacaatggagctcagtcctgttggcgtaggttccaccagcaccggatctacggctgagtgtcgctgtccaccaggaaccgcgcaatctccgttgacaaaaagatgccatctactgttcgaacgaggaccgtgtgaatttggacaattttttgcaccgattgcggattcagatgtgaagagtgccataccgaaacaacgatggggtacgtgtaaatcggcggaaatatgtgagagtggaatggtttactggccacaggacaacaaatgctaccagatgcataccaaaggaccctgtacaaaagggaaattgatgagcttagataacgatgggatagctaaatgcaagtgtgaaaatgaaggagaattgagtaattatttctatgaggagacagaaacatgccatgaattttttactaaaggaccatgtttgcgcacaggggaactatttctaccttctaaaaaatgtgcatgccatcaacggttaccgcatttccataacgaatcaaatcaatgttacgaaattggtacaattgggccttgtcctattgggcataccttcattattgctgataaaagaggtcaacaagaggtaagcttaatgaaggcagaatgccgctgtaaagaaaactacgtgctatgggcaaatggctattgctataaattgtacacacaaggtccgtgcgaaacaggttcgtttttgatagatgcaaatgtctgtataccaaatccttgtgaaaaaggcagattgtattttcccaaagaaaaaacttgttatcgaattggctcacagggtccttgcagtctccatcaagtcgtgatatttgactttacgacaagaccctctttggacggcatttcctataacggaatctgcggctgttctggagttatccataatctggatcaatcatgcacagatgatgaagttcctaaaagtgcttgcgatagcacgcctgatatgatagagataaataagcagtgttataagctttatacccgcggactttgtggtcctgggcagtggctggaaccgaagaagacatcgtccaatttacgtgcagctacttgtgtttgtcgaccaggatatactccgtacgaagcaccgctccaaaacggcgtaatcggctgtcaacccccagccgtaggacttgccaggtatttgaataggaaacggatcctttcgattagaattggaaatattacgttagctattccacaatagcaaagtagcactaacaaaccatcgatactaatctattaccaagcatgtaacgctattgtaacacaaatgcagtcgatgacgctaactctttcctttagtaggtgtaacagcatggaccggttatgaaagtggttcatgagtctattaggatttgcatcgccagaaccagaagaatactgagttaccaaaaacaagcgtgctgtggcaacggagtatcccgataagcaacgagatattcacgatattagattgtaagctgttaagcaggaaatattctgatcgaccccagtcaagtaagcaagtacattgccttctagcaagttaatagttacgataagttagagtgccatagtcgcagaaatggtgtaataaaaatacatggaaca

SEQ ID NO: 789 - DNA, 1518 bp, Aedes aegypti
atgcaatacatatttgcggtactgttgctaatggcatatggtatcataccaaataagtgtagattcgcctctgaagtgtcaaccatcacatatgaaacaaagtacaacggggacttcgacaagaacattggatgtcaaatttcactgaatgatgacctcgatcaacaccaaccgctctttattgtaccgggcacatctagatttgtcactccgacagccaacaccaccgatttgcagttcaaaagcggtgaacaggtagagctccattgctgtcatggttttctcatatcggatgcaacttcgataattgcaacctgcaatgggaaagataaattcatccaccatagcaaagtgtacgacatttcgcatttgacttgtcgagatcccgtttttcacattgcctcgagagtaggaacgctttgctacaacaatggaacgctcatcaaggttgggttcgatttgggtacccgattcctaacactttatgaaatctgcttcgacgaaaagcttcttcaaactcactacgttaaatacggtctagctccgtggaatatcaagcacgaaagagccaaacgtgatcatttcgtgcagggtgattttttccccgatatggaaatggctgagatctattcgttcgatgtacagcacgccacattgggattgatactgggttctacgaatcgtgctaacaatttgttgaatcgaaggaaggacattttcatagcaaaaggacgactcgccgcgcaagcagattttgtctatgggtcacagcaagcagccacgtttcgatacagtaacgttgctccacagtgggaaaagttcagaacattcaactggcagcacattgaaaacggtgttagagcctttgtaactcggcataatttgaatgtgaccgtgtacactggaacgtatggagtcatagaactgcccgacgctaacggaaaaatgcaaccaatttacttggattatgacgtgcgcagtggcggccgcgttcccgtgccgaaaatattctacaaaattcttcacgacccacagcatagtgcgggaatcgccttgattggtgttaacaatccctacgccagcttaagcgacattgagaaggattatctgttctgtgaggatgtgtcgcgaagaattaactggttggaatggattcctgactacattcccggaggatacacttacgcgtgtgaagtgaatgagttcaacgatgttattgggcaccacaaatttgatgagatatcaaatttgttggtttagagtaactacttttacgtaccagtagcacaaacgaaagtgataacacaatagcacaggaggcttctacgttccgaatggacatgattgcagaacactattagcacagttttctgctttgttgatctgtttgaagcatcatttcacggtttatgaaccgggtgattgaaataattgatgcattatttttgttagctgtgtaattattaagagttgtacatacattatgttgtctaaataaaggctaatcctacatatata

SEQ ID NO: 790 - DNA, 3865 bp, Aedes aegypti
caaatcctcaaaaaccgttgctattttcgtttagttttctagttttgatctaaaaagtccctaaaaatgtgtacatttctgataaatggttagctaacagtgcttatacattcgcgcattgaaaatggacatcgatgccctgcattcggatttgcgcaaacggctcgacgtgctcggcttcaatcatccgcttccgttgggtgcaatcggaatcgtgtctgccatactggacgacctgatcaaaacgtccgaaaaactgaaggcctcgaagcagcaaatcagccaactgcaacaggaaaaagctgcctgggacctgggcgtagaaccgtacaagtgtgacaattcccgactgctggccgagtgtaacgagctgcatctggagctggttaagcagcgggacaaatttgtcctggccaacaccgagctcaagtgtcgggtgcgtaatttacaaacggacaagaaacagctggaggaacgatgcctgcaggcggaagctaaaatacgccagcttcagtgcggcgacagcaagtccaaaaaggatggtgccaatatgcaacgaaaaccatttgtttctaccgtgagaccgggccagtatcaaccgtcgacctgttgtggcgtcgagaaacgtgaaagtaaatgttgctgcccgtgcaatcaggctcgcaagacggaaatattgcacgaaatagagcgcctgcaggtcgagaccaagaaccaggaggaagtcatcgaggcgtacaaaaaacaaattgattaccgtgaccgtgaaattcaacggttgggagcattgttttccggtggtcggccggctgctgccctcgctaaggactgttgctatcgtaatgtgaacacattggcagaagatgtcaaatgcctccaggaagagaaagcctcaatgcaaaacaaattgaccgaagctttggagagccaacaaagtgctagtaaaaagattcaaaaactatccgagcgcaataaacagttagaacaagaacttaaggaaatagagaatgtcgctctgagtgtggaatccgaagctaatttgaacattttggataaggatagagaaaattccgatctacagattaggttacagcgttccaacatgaaagtcaaagagttggaaacattgttgaccgcgagaacatcaggatccactcctgtaagctcatcctcgtcggcatgctcgatagactcaactttacaaaacgcgctaaagcaagcaaatgaggaaaagcgtgctctttacaaacaactaaatgaattgaagcaacgtgagcaaacttttctaacagattatgaaaaaatcaaatcgaaatattcaaagttaaagttaaagttgtcaaaccaaattgcattcagtaccaccgactgtaatcgagacaatgccgaaatcgatgaactgaaccaaaaatgttcagctttggaaatgtccttgaaacaagcggaatccaaacgcgatcaacttacgaacgacattaaaaagctgcgagacaatttcacaaaactgaagggtgagggcatcgacaaagatcttcggatagctcagttggaaagcgaactatgtctgcaaaagaagtcgacaactagcagcattgtagttccgcctcgtttgcgtacagccgaatctgctatttccggtcaaacatcactgtcagttcaatctgcgtttcatcgtgtcgaacgtgaaagagatgctgctaagagtgaagtgcaacagctaaaaattgaaagggatgccctacgaaataaattaaaattggcaaccaaaagtcagatggacgcacaatctaaacacgaggaaacgatcatcagctacagcacacagatagcaaaattagaagccgaaaaacgagatctaatgtgtggtcaaagctcatcccagactacattgcatttactaaaagaagaaaaccgcgagttacaagagcgcttgaaggaagtggaaagcaattttagtaaactgaaagtcagccattcacaattgaaaattttgcaagaacaaaccgaaaggactatgttgcaacaccagaatagactgttctgttcggagaatcaactgggtaatgctgaagctaagctgaatcaggttgatggaaccattgaaagcgctcagaaagacattggtaaactgagaggcgacataagcgttttaaaagcgtcgaacgcttcattacaacgcgagaaggacaaactactgatggatctcgacaagaagacagagaaactttatacggtcgaagcagagttgaacactctgaaaacaaagaaagctgaaatgagggacacaatcgatcggcttgaaaggaaacttgagaacgccagtgtggataacttccagaaagacagcaacctgcgcagcgtggctacggaaaccgatacactgagaaaacaggtggcgacactgaagcgttcgcacgataacgctgttacagagaacggacgtctctcgaatgatctgagtgacaccgcttcagagctgacgctgacgaaacgtaaactagccgagtgccagaaggaagtggagcgcatgaagtcccaactacgcgaatatgttcaggagattcagcgtgccgaagagctgctgtgtatcaaggaacgtgaacgggaagagatgcttgagcactataaatctctttccgaaggagtgaatatgctcgaagtaagcaaccatacgttggaggctgagagtgccgaagccaaaaagcttcttcaggaagcggaaggacgcatcaacggattgcaagagcgagttggacttcgcgaagctgaaattaagacctatgaggagcagattaatggactgtcgagcaatattgttaagttggaaactgagatcgaatgccttaaggaggaaaatcacaatctccaggaagatttggatgcaacaaagaatctttgtaataaattggatttgcagaaggataagttgaatgccgagttggaagaacattctagcatccgcgaacagctgaataaagaaaatgcaactttgaagcgacaactctctttggctcagactggagataaagctgcagttgatggtttgcaggagctacttgctgctagtcgcgcagaagtcgagcaacagaggatcgttacgaatcaattgaaccaagaggtgaagacattgaaggcacagattgaagagttgaatctaaaattggatgaagagcaacgtaacgctgcgcgaaacgaagctctggctaatgagtatagtgttcagttacaggaactgagacgcatgattacagatgatcgatttgcacaagtccaatccagagaagaggaggattacaataggtatggtacattctgatccttataacagtcttattcacaactcgaaataatgagagacgaactgtcacgatttttgttacttgttactcatatgacaatttttcctagtgtccataattacaaaaaataattattggttcaagatattttaaaatgtttcacatttattaaatttcaaataatagttttgtcctttgttttctaattgcacacctgtgaacaatttttatgtttcaatgtgaagatgaatcgaagccaaacttaaagtttcaagagcacaaagctctataacctgacagtagttcaagctgaaactaaatcgattggtcgctcgtcattcgatcatgttttcaacttgaaccgctgtcttgtttcttgttttcggtcttcttaaaaaactacaaatatctttaattgtaatagctgtggaaaattgcatttctgatagttattgtattagccttaatactgacgtattataactgccatggatattattataattagatatgcttctttttcaatagaatcaagccctatttaaaatctgatgaatctcttcgga

SEQ ID NO: 791 - DNA, 2902 bp, Aedes aegypti
gtgacgtagaaccccactgctagggaccaccctccagtacattatacaaataatgttggataaatatataccgtgatttcagtggtccaatgttgtggtgcaaagctacgcatcaatcaaagctcactgtacagtaggtaaaaagtatcaaggtccatcgtaaagcaaaaaaaaaatgtattaattccaatatctgccatacacaatcatacatatacgacagtcataaaatgtgatgattcatcgaagtccatttgacttccgttgggcatttggccagcacatcaacgccacccatcagttccttgtggacctttgattgatacggacgcgaaccggaaagcaaagaagcacatcacgcaaacaggacacgaaccctgcttttagttgcgcgcggtgcctcgtacaaatttagttgtcgaaatttttagtttccgtttctttcatttccgccgaaccgccaaacttgtttcctactcatttcaaaaaaaaaaatagtgattcaaacacgattctgaaacttaaggatttcaacctggagtacaaattttctggagaatacaaaaaatgtcccactcaagtgccattgttctcaaccatgagtgccagtgaatcgaaatcgaagggcaaagttgttagtgtaaagaaatctatctgtttccggtggccctttcggctgctttttgccttactatgtttcaatctgctggcaacggttgtggaagcggacgtgccggtcgtccagccggaacggttcaaccgaccacgatcgaaagatcccatcagtgccggattctaccagagcgaagaaaagaacagccaggatgtcaaggacgccttcatggaacagttggctaacgagctgaagggacggatgctcaaggtgaccacactggaggactggccgctgagttacaccgaacgtcagaatggtactctggtcggacgcggtgtggcctttgaactactagagttcctgatggaaaagttcaaattcaactacacactggtcatgccggagcacaacatcgtcggatcaaccaaggatatggaaggaagcatcatcgaactgctggccaccgagaaggcggatattgctgtggctttcctgccaatccttgctgatgcccgacagtacattctctactcggccggtctagacgaaggcgaatggatgatgattatggtgcgcccaatggaatccgctagtggctctggcttgttggctcctttcaatcgggacgtgtggattttgatcctggtatcgctgctggccgttggtccaatcatctacggaatgctgattgtgcggtacaaaatgaccaaagacaaggaacaggtgctgtacacattgcctcactgcgtttggttcgtctacggtgcgctgatgaaacaaggaagcaccctatcgccaacgggagattcaacgcgcatccttttcgccagttggtggattttcataaccatactcacctcgttctacacggccaatttgactgctttcctgacgctgtccaagttcacgctgcccatcaacaatgccgaagatgtccgcaaaaaggaaaaacaatttgtcaccatccggggcaacgccatcgagtatgccatcaagaacagcgacgagaccctgaactcgttgagttttttggtggacaaacacttggtggagttcacaaccaacctgaacgatagcgacatcctgatgacaacggtgtccaagaaaaactacgtctacgtacgggatcgaccggccatcgaacatctggtttacaaagactacctcgttcggcgcaaggtgaaccccatcaacgaacgtagccattgtccgtttgcaacggctacaacacctttcctgaaacgggttcgcgcctttgcctatcccaataccacacgctggaacacgctatttgatccacaactactcaacatggtcgaaggaggcttggtgaaattcaagcttctggagaatctacccaaggccgagatctgtccgcagaacttaggaggcactgagcgtcagctgaagaatcgggacttggtcatgacatacttggtgatgttgaccggctttgccacggcaattgctgtattcgtttcggagatgttcttccgcatcctgaacgagcgcaaactgaacaaagaacagtcggaagctgcccggaaccgtggcaccgatggagttacctatgtgaatgcaaaggccatgggttatggcgattcaccgccgccgccgtatgcggagattttcagccgccatgctagcggtggaagcatgtttggaagcagtattgacagtggtagcggtgcatcacggaggatgatcaacggcagggattacatggtcgtcaaggagcgaaatgggatcggttcgcagctcataccaattcgggcgccgtcagctgcaatttttcagtacacttatacgaattaaggtgactttggaaagtagccccacttttttggtataggtattgttcagcatcaatcataaatagttaaccttcaagagtcgctgttacatgactcgatatcatgtaacggttgtcgatggaaagtatgcaaagtgctgtttgtctgttttagagttaaaatttcatagttactatgatggtcctctctcaaataagtttccaaaacatttatatagatctagagttttagtaaatgtagattttcgttatctatccagaccagtaccggagatttcattttaaatctttttatttggcatagcacactgtattacacttatctaaatatggaacgaaaaattgcagtgacttagggaccattgtgcatacgaattcaaatacagtgaactctctttcaatcggtattgaagggaccatcgagttagggaggtatcgagatgcagaatacatatttttcagttttcagtttc

SEQ ID NO: 792 - DNA, 2018 bp, Aedes aegypti
cggtttcctcaggtcggtgtgtatgaatcatccttcaatccaaacataaaacctttgcaagggagagaagagaaagtttagtgttttgatcgcagcggatcaggcagaaaatagtgcaaaacttgattgattcggaaattgcgaatgtaatttttattttcgaaggttttatttattaattgcacttgaggaatcggtttccacggatcgatacaaagtttggctgaaatgtcagtaagaaaggatctcgtgaccgccgaatcggcccagatgggaattgtggaaccccaggagcgtctgaagcagctggcttcgatgagcaacagcgttgaagtagatccaaatattccgatcacgagatattaccggtcgggcctagaaatggtacgcatggccaatgtttacctgcaagagggaaacatcgatgctgcctatatattgtacattaggtttataactttgtttgtggagaaagttccgatccaccccgagtacaaaacggttgcggctgatgtaaaaatgcagaacaagaaaaaattgaaggaagtttttccacttaccgaaaagctaaagctgaaactgaaggcaaagtacaccaaagaataccagcagtttctggaagcgaagcgattggagaaggaactcgaagagaagcgattacgagaggaaaaagaacaacgagccaaagcagcgtccattacaccgcctattaaccttccgcaaccgagtgctccttcattgcccccatccatgctcgtggatccagatatgctggaccgtgtgctctatccaaatgatttcccaacggatcccaatcgctcgtcgtcgggtaccggtttgctactgccggacacgaaaccatttccaaagccagcattcgaccgaacgcttaaaccttcgcccacttcggtgcaggccggaagtctccgatcggtggtagtccccaccaacacgatggccaaattccttgcccttgcttcgcacaatacgctgagcaatgtggaaacctgtggcatcctggcggggcgactggctcaaaataagctccttataacgcatgtcatcgttcctaaacagcgcggaacctcggacagctgcacgacgatgaacgaagaagacatcttcaactaccaggatcagcacaatctgatcacgctcggatggatccacacgcatcccagtcagacggcgtttttgtcttcagtggatttgcacacgcactgttcctaccagatgatgctggaggaagcgatcgcaatcgtatgttcgcccaagtatcaagaaactggatttttctgtttgacgcccaactacggattagactacatttcgcagtgtcgactgacgggattccatcctcatcctaaagatcctccattgttcatggaagcactgcacatcgcgttggaggatagcgccaaaattgaagtggttgacttgcggtaaacttggatcgtggaccgagataatagaacctaaataaattgacacaaagcaaaacattcacataaggtaggtatgctagatggttagtgtccgatagtgtgtagaatgaaacctgacggattgtgtgtgataggctttatttaacaaattgtttgcgtcgtcttgagaaaaaaatatattttcatctgttttgagtttagatgaaaggattctatttatagatacgtgttttcatattgtagcttcagaaggcagataactataatgcacagtaaggactattgtttgtttggacaatgaaatataaatgtatgtagcatcttttcgatttatatagtgcttttaaaaaatattcaattcacacggtatataattagatttgaaggtatttatgaagttttttttttagtattcaactgttctaaatagcccagcattattttctgatagacgatatcgttgcaatggtttttggacgtgcttggttagatacaggcaaagactgtgcattcaaatcctaatgcctgaaggaggcaaaattattactcaacaataaattttgttcggaaaat

SEQ ID NO: 793 - DNA, 1558 bp, Aedes aegypti
atgtccggaagaaagctggaagattgttcccagcaccgtgatagtggctcccgatcggaaagtgccggcccgtggtttcgagaacgcgagtgctgtatagtgcagtggaaaggccaatcgccaaggaagacgaagacaggtgcgtacaaaggggcgtaccacctgtggcaggattctgcggaatctgctgggactgcttacgacaccgaacgcccagttactgtttgtcaacgaatcgtatcggcagcaacggtcactgctaaaatgtggcccatcgaagcttgttttatcgcacttgcaatcgcgacggtatcctcccagcctttcaacggaacggtcggtcagaatggaactattacgaatgtgactcatattactcacatcacccacgtgcagcatgtcatccatgtccacaatgggaccaatttgacggtgccaaaggcgttcgattccggcagcaatcttcctccactcgcgacagttccaacgcaattgccggctctgaacaaccccaatgtaaccttaccaatgcctttcaaccccgagaatgccctaccgccactggccacaactggaccacaaattatatctggaattcctctttataaacatccacattacgatacggctggaaagcctctatggttcccgcggatcatcggtggaactccagctacgttgggcgaattcccctccaaggtgtcactgcagactacgcaaaactcggcacatttctgcgggggaacgctgctcactttgagacacgttctgacggcagcgcactgcattaccgatattcaaggggttccgatgagcgtttctcggatccaagcgatggccgacgatctgaatgtgctcccaaagatgggaagcgcaacacggcaagtgcgtcaggtcaagtcgttgaacatccacgacaagtacaatccgtcgactttggcgaacgatttggctatcgttagtctggaaaaggagttcacgaagacgaacaccctttacccgtcgaagcgtgcttccagtgcacctccgcccggacagctttgtgcccttgccggttggggagttactgcagagaactcccagagcatcagcccttcgttgcagcgcgtcaacctggaggttatttcgttcgagcactgcaatacggcctatcaaggggccttggttaagggcatgatgtgtgcctctgctccaggacgcgacgcctgtcagggtgattccggtggagcactgatttgccagaatcgagttgccggagtggttagcttcgggtctggatgtgcgcatccgaccttcccgggggtttacatggacattacccattacgagaagtggattggaaaggctctgaatggagtggatagtttggttggagggttctcgatgactttattgatggcgtttgcggtgacgtttaggaaccaccttgtttgagttttgactcaaaatgatcggttagctatgaaaatattcattagattgatgtgtaggtagctaggaagaaatgttgataaaccttagattttttgtcgaatattaaatttattttgaaaccatt

SEQ ID NO: 794 - DNA, 1282 bp, Aedes aegypti
ttctaccaaccactactttaaatacatcgaatggccatcattttagattaccaagttttcgaagtttgtcgtatatcgtgaagtccaaatacaaatattaaaaatgtcaaattccgcacaaacgcatcaacagtataaagaacacttcgacgtcaagccagattatgcaaacggtggtatttccgaggaacatttggctgctaaagatggcagagctacaggatcttcgagtccagaacatcaacacgccaaacgtgaggaagaattccgctctcattaccataatccatacgaaggattcacctcccagtttacggaacacccagcaccaaatatgtcatctctatatgggcctatgtttgggcataattcagttgacagcattcaaccgtatcaatcgctcccgaatactcaaccctattttggttatccaccaaccaataccaatttctcttcaccaagctatcgaccatatggagtaacgctacgagattgcagcaatgacgtaaattggcgaaatccaggtgacgaatcaacacgtagagcaacccaaaaggtagcaatacatatttccggaatgggaaggcattttccagaaacgaatgaaaatcaaccgattcctttcaccagtccttattcgaatgtagtcctatacgtttccggacttaatcatcttgagccgaaccctcccaggattccatcagtcgtggaacctactgtggaaatcgttgagctcccctcggattccgaactggaagcggaatctgtcaacttctgcccccagtcaacggtcgcaactttcaacggaactgctaggaaaaaattacgcagagggattaagaacacgagtctttacaaacctccggtgatcagcgaatggaaatgcattccttgcaacaggatgttccggaacaaaggaggattacttcagcacaagaatacccaccactccggagagaggccatttgtgtgcaaagtatgcggaaagcgttttcacgaagagcctaaaaagcagcaacatgaaaaccgacatgccgtcacagacaaaccgttcaagtgcagctcctgtccgaggcagtatctacatcagtacgacttgaagcggcatgccgatctgcaccacaaggatgcaacgttcacgtgtaagtattgcggcaaggggttcgatcgacacgatcacgtcagggatcacgagacgagtcacgaaaatggtaccgccaaacgtccacgtaaaaatctaaatcttgtgaaaaaggacgaggaataaacttattgaacagag

SEQ ID NO: 795 - DNA, 555 bp, Aedes aegypti
atggaggaggaaatcaccaaactgtacaacgaaaaagtagccaagaagcggcatcagataacccggctctacacgcccgaaaacattatgaacacccttgtcgctcagccgatcattggcgacgctgtatcctcgcagctgacgttcatcaacaagcaacccgtttccatcaaatcggaacccgattggaatgatttgcttctgccggaaccggacggtagacagtatggcctgcatccgcagcagcagatgcactataacccactgccacaggcgccacaacaacaccatcaacctccgcagcatccgatgcagcaacagcagcagccctcgatgagaaatggcaatcttccgggcagcttgcaacagcaacaacctccccaaagtcaacagcaagcacctcagcagcaacagccccaaccacaacagcaacagcagcaacaaccgttgtccaatgatccggtggacaatgaaccattggacatcatagaaaatgttgattcggacgataatgactttgcagaggcggaatcgctcactctgcagcagtataag

SEQ ID NO: 796 - DNA, 1278 bp, Aedes aegypti
ctcgacgatgtttgtagatgtgtcaaaataaagaactgtcacgtcggaaaacttgcggacagcaaagcagcagaattcgtacaacaaattatatttcaactagtttttgtgcaatattttgaaaatttcccttaatatatagaagtttaccttactttatgaagccatagtatctagtgcactagtttaaatcaccagaatgtcgtcgcccgaagctaaactggagctctacgatgattacgcctcggccacggagtcaatggagggccaaatgtccgtcccaaatgctacacggaacaccacagatcccggcgcacccaacttcagcacactggacgaacccatcaaagatacattccttcgtgacgtgaaagcggtgggtatcaaattctaccacgtcctgataccacgggaaaagaacaccctgctgcgggattgggacctgtggggtccgttgatattgtgcacactgatggccacgattctgcaagggtcggccgacgacgtccatgacggagggccgcagtttgcccaggtgtttgtgatagtgtggatcggggcgatgattgtgacgctgaactccaagctgctgggagggaatatatcctttttccagtcggtgtgtgtcttggggtactgcttaacgccatgtgctgcagccctgctggtctgcaggataatcttgatagcagagcaaacgcatttcctgttctttttgcgactcttggtcgcaggagtgggcttcggatgggccacatatgcgtccatcatatttctcggggacagccaaccaatcaaccggaaagctctagctgtgtatccgatctttctgttttacttcatcatctcgtggctggtagtgtcgcactccaacgtctaactagttcaatgtggatggagactttagtatgcaattaggccgatgtttttttgttccctacagccaccgatcgtatgcgtgtgtgtacttgaagatgaagcgacgaaagctaatgctaagctatgctaagggtgataaatctattcctagatagacaggtattgtgattgtgaaagtgttttagtatggtatttgtatataatcggatcacttgccctcgtggactaaggctacagcaaaatagtcaaaatcgctttttaaattacaaccttggataccaattagtatcatgagttgttataattggagataagtccttttgtaccatatattttcactgtcttgtgcacttgaagcatccttatgagaataataaaagtactctacaaataaaggga

SEQ ID NO: 797 - DNA, 5175 bp, Aedes aegypti
cctaccaatggttaatggtggctggtgttgttatgtttttaggaggttttgatcttcaaatgatctgcttgctcctccagtcgcagccgaagcgcaacagcctttagttgagcgttgagttgcccgcgcctccaaccttcaatcggggtagacagagcgcacgccgtacctaacgcgcattggttcgtgtcgtcgtcgctcgcatttgggttcgaatccatcgtcccccgtccgtccatgtgttttgtgtgtatgatctctttaaacccctcagttaaactttggactccgcaacggacgcgcgcgtcgtcgagagcagcttaccgccgctcgcatgtgctgcttgtggccgatcgatcgttgatcctttctcctgaatacggcgttcagttaatcgatagctccgtagtggatagaacgtcctgtgcgcgaagtgtgatatctacgtatcggcaactaatccaaagaattgtttgttgttggagagtgcacgtacgtgggctcaagtggattctgctaccccggtaatcgtgcaataaaatgcaattatcagcagtgctgcattggttggtcggatgaagagtgttgtttattattgtgcattccgtgaaagattgcagaaatcggtcggaataaaggcagccggaaacgccaggcccaaccgaaggaacgaacggacagacgaacaaacgaagaagtgtgcgcgcgagagagcgagggtgtgctctgcgaaggtgtgtgttgagccgcgggaaaactcgtgaagaagagggcggggaatcggagatctttctcccggagatttgcgtgtgagtgcatttccgttgatattgcaccgtgtagatgcggtaaaaataaacgactgtgagtgcaagcaaaggcggtgtgcagacggcgaacgaagacctcgacttttccaaccctgatacgataagccgttgctgccgtgtgtcgccggatggtgtgagattctagcgaagtcagacacagaggccagttttacgatctcagcagctgcatcgttgcgctgcaccctctctttgtgtgtgatatacaagaaatagcaatcggaccgggagtcctctttctcctggacgactccggagtgtgattacgattaccgcggggggaaaagccataaaagtaaacgtgcagatctaggtgtgtggtagtaaggaagtggtgaaaagggcgaagtgctaggcgaagacgcgggggaggacctccctgctgcaatcgagagcacaagagagcacatgggtgctgcatcccaataataaccccctcatacgattactcactccggtagcggtgcataagggggggaagagtgtgtgtgtgtcagggaaggtgcagcgtacagtgcagtgtgcacattgtggtgaagaggtgtgcagcggaggagtgtgcaacaacgccaacgcgtttcgagcctctcgacgtcgacgacggtctcgatttgagaatattgttgtgtcttgttctggaagcgggttttttattgtctacgatggttgcggtatctccgggttcgcaatagaagtgcgtgcgtgtagtgtggtgtttgcgaggatttaccgggaaggatttgtgccgtttgcccgttgtcgaggcgtgaatgccgcagaatcgaatcagaatccaatcgtgtagagacgacagtcgttttgcgtggctctggaaggattagcccccgagcggagatacctcaatgtgtttatactgctattggaaattatggatacagcactataggattctagaaatcctctcgcagtcgtccgagaagctggaacacctgatcgcctcctcacctgcctcgctagctgcgaaagcgtccgccgagcaggatgcgatagccgccctccaagcgttacgcaacaacaacaatcatacagcaaagtcagttacctcagtacttagtaaaacgcatctacaaaacctggaagcgaattccgtatctgtgatcccgattgagagtatgaaaataacgtcgtcctccaatcagcaacagcagcagcatccgtcgataatcactcaaacgatacacctgcatcatccccaacagcagcaacagcaggtgcctcaacaacaaattcagcaactaccaaaacagcaacagcaacaacagcaacagcagcagcagctgatacaggtcaagaatctgacccagctgcagcaggaacatctcgaaaccgcagcggtattaatggacattagtaaaaaagtgataatctcgccaccaagttcgaacccacagtcgcccagcttgattgccgagcagcaacagcagaaacaacagcaatcgcatcaacagtatcagcacagcatcaacaacaacaatcaaccgcaactacaaagtattaagtcttctgtgataaagcctcacgagtatctcctgaacagcctcaagcgatcaccgagcagcgaagaaatggatcttaccatgaagcgcgtcaaggtcgagccgaacatcctgtcgccgaccctgccggccaccaccctggtcaagaaaaacgtcatcaagcgggaacacatgatggacgacatggccgtggacgatcaggcgagtcagcacagcgattcggccgacagcagcgactcgggacggctccaaatggacatctcctcgcaggacgccggctccgaatgcaccacggacgacctcaagcggtccaacaacaataataataacaacaatcaccaccaccatcatcaccatcaccacaaccagcaccagcagcatcagatggaccaccacattgggcgggaaacgccggacagcttgaactccctggaagaacaacagcatctccagcaggcacagattcacctgagtcaacaatttggagcgctggccgatggcgcggaccccgctacgacccagctgtggcaggcgctggcccagaatacgaatctcattgtcaacggtgccggtaacgaagccacgcagcttctccgaaagatgatcaatgctcgcacattaggccttcaattttcaccgtccatccagattacaccgggagtgtcgctcattaagcaaactgaatcgaaccgcaacagtggccagagtggccgccggaagcagtcctgtcccagccgaacgccagtagagggcaactcgcccaacaccacgatggaagcgctgaagctgaccacttcgaacaaggccagtggcgtaggagtaccgacgatagttaccaacaacaatagaagcagtagcagcccggtccatcttgacgcggccagtcaattgaaccgtgccaacatcctgttccggacgaagacggacggttctccgccgggggttttgctgcccggtgtaatcgaccagcagaacagtggcgccgttagtcctcagttgcaagccgttaagttggccgcccaacaattggcccagcaatcgcaagcccaacaacagcagcagcagcagagtcaagcttcaccaccgcagcaacagcaacagcaaggccagaaccagaactcgtctcagaaggatatgacatgcaccaactgtggaacgacgacgaccaccatctggcgaagaaatatccgcggagagatggtctgcaatgcgtgtgggttgtacttcaaactgcacggcgtcaaccgaccacacacgatgcgacgggacacaatccacacgcggcgacgacgtcccaagggcgataaggccacccgaaggaaaaatatcaagcaagagggagccgaggtgatcgataacggcgttatggagggcgctgcggacttgcatgccctgcagaaccacaacctgctgattgccctgagggatgccgcccgtgcgacgccacccaacttcccgatgtctcctgccttccagcactacctgcgcgtgacgcagaacttcgacccgaacggtgctacaagtggtggcgtcattgtcggcggtggcgaaatcgacgccggtgacgacagtggcccggagaacgacatcgattcgtgcaacctgccgctgaatttggttgccacccagctcggcggcagcgacaactcgcaacactgactgcgtcggaagcccgtcaaaaccagctagggccggcgccggaagaagacgacgacgacgcttccgccaaagcgcaaaaagcgtcgccgccgtaagaaacggaagccgtaagttgtgatcgccgtcgtcgtcgtcggtcggtgatctggtcagatgggttctggcgccaaacggttacgaaactttttgataactattactactactgctactactattaataactattactacttcgaacactactatcaatactacaactaatacagaaaggggagaactgctagcgaaaggcagcaacaagcttaacgctacaccaccatacttaagaagacttgaacagtttgtagcaatcccaacaattttcgccgactaggaagaagcaaggcaggtttagacagagccaaggcaagtagcacctctacgacacgaagaatttaaacttaacgggagaaaatatgcacgcgcaacttgataaaaaattctaaatttaggacggtagtttagagatgaaaaagggaatactcagaaaaaagcaaaacgtttcaatcgaatcggaaaagaaaatactcttaatgcagacaagatctaagattccaagatattttattagcgaacaaaagttatcagtagaactgcactcactcacagaaagtgaacaaacaagcaataattaggcgaacgactggaagagaattcgatcgaattaaacgcgcataatacgactttttccgcgaaaatcgaacgcttctcgagggaaataagcccaggattttagttcagtcgccatagggtttcaaataagtatttgttttaaggcaacgcccgaaaccagagatctgattttaacagtttttaatgcaactaaccgacaagcgaatgaggaataatgtgatagttgaaagttaaagtaagaactttcgaaaaggaatgaaaggaacagttgaaatttttcgggaggacagtgtcccacctgaggaaatggttataagagaaagacaaatcaaaatttactagtagaggtgcgcacgaacggaggaaatgtaacagaaaaactgttaaatactcatattgggaagtataagtaagctctttttacatctagtttcttccattatgcctctctgccaattaaaaatccccttttctcc

SEQ ID NO: 798 - DNA, 1780 bp, Aedes aegypti
atgtcgaagaataagattgcgagttccaaactcgaaagcgaccacatcgagataaagtcaaagttcgacgccgaattccggagatggtccctaaaacggtccgagcagcacaacttcgaggcgttccagtcgctgattgaacggttgcacaaactggaccgatcgcagctgctggtgtcctacatagatccgcgagataacgatctgctgccgattaacaatgacgacaactttggacgagctctgaccacggcccggccgctccttcgcgttatcatccagcggaaaggagacagcatagaagaaataaccggatacggaaccattaggccacggaatcttatcagcagcatcctcggacaaacccctgtgaaatcaaaaagtttagctatttctaatccacatgattttcgacaagtatccgcaatcattgatgttgatattgtaccggaaacttgcagacgagtccgtttacttaaacatggcagtgacaaacctcttggattctatattcgtgatggtacatcagtacgcgttactgcgaacgggctagagaagcaaccaggtatattcatttcccgcttagttcccggtggtttggcggaaagcaccggcttgctagcagtgaacgatgaagtccttgaggtgaatggtatcgaagttaatggcaaaacgctggatcaggtcactgacatgatggttgccaatagctccaaccttatcatcacggtgaaacctgctaaccaaagaacgttggcccctccgaggcgtggatctttctcacgcaacagtcaactgtccggcggttcacaccaatcacaccacacaacgggatcggaggaaaatgatcaagatgatcaggatgaaattcgagatcttactggtgcggcgacacttgaagaaaacgcattaattacgcaaaaagatggggtgcttcatttgtgagtgacttggcagtaattgataagcgagtaacttaaatttaaccagcaccacaacataccttttagaggtgccttcccacaccagcctccacagaaatgtataaaacagcacactattgtgcgtcaattgtgactcaaatatttagacgtctttttagactatgtgtaccaacttatagataactgctaacagtatttcagaattcattccgttcgtttatgttgtctgcatttagattatgaaaaacaagtttatattgtctgttaggaaaatacagtatatgcatttgggaaaatcccaggcctgaaaaaaaacttttattgttctacttgttgcttttgtccattgtgctattcgacttatttggaattttgtttgtgtttaactatcggtacactttttttctcgtaacatatattttaccacgatcttaatctgtacttaaaaaatggtcaaattctcaattgttgcgggagtaattcttatcatttcaggtgttatcttcacttatttgttactatgattataattcgttattattgaaaaaaatcaatccattcccaaaagtgctcaatgtaataacgcgcatcaaaattttgaaaacatacagacatgaagtagagactagtgcctttagagtatgactattaggaaacaaaattctcaaaagtgcacctttttataattggaagtctttattagtaatcaaaaatgcctttctatacaaaagtgattaaagaatcagaaaattaaaaaaaaatagcagatataaaaagacatcaataagatattccaagaacagtgcaagtatcaaaatataatgataagaagttat

SEQ ID NO: 799 - DNA, 2289 bp, Aedes aegypti
atggacaacgtgggaagtatagtcatatctacctcttccatagaggaccttgagcaccccaaccgagtgctccgaaagcccgtttccacgctgtcgattcctggatcgatgaaaacaccgtgcgccggtaatagggaaacagtatcggctgcatgtacagaagaagccggtatcgcgctcgtgggcgtacactcagaatatcccaggtacatggaggagcgaggcctgggtggcggagtctgtaaaggtcccggctcggtgcaaggaggtccaggtcaaaagcacaaacccaatgtcggataccggcttgggcggcggaaagcgctgttcgaaaagcgaaaacgaatcagtgattacgccctcgtcatgggtatgttcggaattattgtgatggtgatagaaaacgaattaagtagcgctggtgtatatactaaggcatctttttattcaactgctttaaaaacgttaatatccgtatcgactgtgattttactcgggctcattgtggcctaccacgccttggaagttcagctttttatgatagataattgtgcagatgactggcgaatagcgatgacctggcagcgaatgagccaaatagctttagaattactcatctgtgcggtgcatcccattccaggtcaatattatttcctatggacaaccaaactagcgaataagaacaaagccatgggttcggagtacgttccctacgatgtcgcgttatctttgccaatgttccttcgtttgtacctgatatgtcgtgtgatgctgttacattcgaaactatttaccgatgcctcatcacgtagtataggtgcactgaatcgtatcaatttcaatacacggttcgtgctgaaaacactaatgacaatatgcccgggaacggtccttctagtattcatggtttcattatggataatagcatcatggacgcttcgacagtgcgagagattccacgacgaggaacacgcaaacttgctaaactcgatgtggctaaccgcgataacgtttctttgcgttggctatggcgacatcgttcccaatacttactgcggccggggaatcactttaacttgcggaatggtgggagccggctgtacggcacttctggtggcagtcgtatcgcgaaagctagagttaacacgagcggaaaagcatgtacacaacttcatgatggatactcagctgacgaagaggctgaaaaatgcagcagcaaacgttctacgtgaaacctggctaatatacaaacacacccggctggtgaagcgcgtcaatccgggccgagtgcggacacatcaaaggaagttcctgttggcaatctacgcgttacgaaaggttaaaatggaccaacgaaaattaatggacaacgccaacacaataactgatatggccaagacacaaaatacggtttacgaaatagtttcggatatgtccacaagacaagactcattggaagaacgcataactagtctagaggataaactacaatccattcaaacacaaatcgaaaatcttccggaagtactgacccgttgtctaacccaacatcaagagcgcatagatcaaagaagaaattttcttcatcctgatgcggcagtaaccgggtcatcatccggattgccaactccggctcctcccctcggctcgccattgatgctgccgcattccagtttttcttttaggagcgttccatcgtcgtcgacaccggcctatccctggcccgcaagtccaatactcccgccaatctccagtagaacgcctcacctggtcccggaaacactcactcctgcaccggcaacaacggcctcatcgacactgtcaaattcgatcacctacccaagtgggtaccaatcggccagcaaccagtcctcaacgaccggggacacgcaaacgcttacctataggggaactagctgaatcgaaaccagtagctcaaactctatctccctgatttcattctccaactccaacagtaaccaccaaaactccaaccccaacacccccaccccgacaaatagtagtagcaaattcaccaaacagcgggaacgggcgacacgtttctagttattagcggtgcccctccgcaccacgtactgacgtgtggccaactgacaagcagggaactccgagcacatccaaatgttcggctagtgtgaggctggggcgaccgaaaaccgaaagtgcatcgaatatgtatacgtagcgtaagcagaggccgagtcgttccatggcgatttatggaatggtcagaagtggtctttgagtatttcaacaattgaatgaatt

SEQ ID NO: 800 - DNA, 1122 bp, Aedes aegypti
atggcggcatttgtggcaccacatttcgatgcctggcagtcgagcggcaacatgaccgtggtggacaaggtccctccggagatgttacacatggttcacccgcactggaatcagttcccaccgatgaatccactgtggcattcgatccttggatttgccattttcgtcctgggagtagtctccatgcttggcaatggttgcgtgatctacatcttcaccggtactcgaagcctccgaaccccatccaacttgctggtggtcaacctagcgttctcggatttcttcatgatgtttacgatgggaccgcccatggtgatcaactgttggcatgagacttgggtcttcgggccattcgcttgcgagctctacgcgatgtttggatcactgtttggctgtgcctccatctggaccatgacaatgattgcgttcgaccgatataatgtcatcgtgaagggcctgtctgctaagccattgaccaacaatggtgccttgctgcgtatactgggtatttgggcattcgcccttttctggactttggctccattcttcggatggaaccgttatgtcccagagggtaacatgactgcctgtggtaccgattacctgactaccacttggctgaatcgatcctacatcatcgtttacgccattttcgtctactggactcccctgttaaccatcatctactcgtacaccttcatcctgaaggcagtctccgctcacgagaagaacatgcgtgaacaggccaagaagatgaatgtcgcttcgctgcgatcctccgaggcacagcagaccagcgctgaaatcaagctggcaaaggtcgctctggtaaccatctcattgtggttcatggcgtggactccgtacctggtcatcaactttaccggtatcttcaaggcagccccgattagcccacttgccaccatctggggatcacttttcgccaaggccaacgccgtctacaatccgattgtgtacggtatcagccatccgaaataccgcgctgctttgacccagaagttcccagcgttgtcctgcacggatgcaccagcggcatcaaacagcgatgataatcaatcaaccgtctccggagcaacaaccgcgaccgacgagaaggcttaa

SEQ ID NO: 801 - DNA, 1616 bp, Aedes aegypti
ttgctttcatcttgctagctgtcgtcgcgcatccgtttttaaattgattaatatttcgttcggccttcacaaatcgggtgtttgcaagtggcaaaactgtcgcgtaatcccgtcggtgacgagaacaggtttccgggcgttaggcgttgcatgtggtgtagtgtaatccggaagggcgattgttggaagcagcaccagtttcggccggcaggattttgttccagacacttccgatggcgtaacaaggagtgaccgattggaattttgattggagaagctttctgtagtgtttttctggtgctgattgacagcaactccgaggattcataggttcgcattgggagcggtatagaccgatatcgtcttacattgatagtattgcatccgatttcgctgcatccgggcatacccaaatcggaaggctccccctaaagggccaacggcacaatgtcttccttcgacgttcacgatcgtgccgcgtggtacttcggtcccatgtcccgccaggacgcaaccgacctgctgatgaacgaacgcgaaagtggagtatttctggtgcgcgatagcacaaccatcgtcggagatttcgtcctgtgtgtccgcgaagactccaaagtcagccattacatcatcaacaaaatccactcggccgatgattgttcaatgtttcggattggcgaccagacgttcagtgactttccagatctgctgacgttctacaaattgcactatctggacacgacgcccctgcgaaggccggccatcagacggtatgagaaggtgataggcaaattcgattttgatggtagcgatccggacgatttgccattcaggaaaggtgaaattctcgaaatcgttaacaaggatgaagaacagtggtggactgcgaagaattccaagggacaaaccggacaaattcccgttccatacgtaacgcggtacgaggagaacattctcgagaggccaccaaatgcaaccggagcaggaaatcaccatcatcctccgccgccgccgccggttggattgcaccattcggaaaactccaacgtattcaaatcgaacctcaaccgacagttgcctgcgttggcccgggtgaaacaggaacgggttccgaatgcgtacgacgaaacggccctcaagctgaacgtcggcgatgtgatcaaggtgatcaaaaccaacatcaacggccagtgggagggcgaactgcgcggcaaggtaggtcacttcccatttacccatgtcgagtttatcgatgacgacgttcaacactggggcggacattaagtgggcgggattaggatcgattattttctcttattttaatttcattgtgaagaaatattatttaattgtacagattattttatgcataaggatgtacgtttcgagtcatttttacatatacgtttatgtttagtggtattacaacgtaggcagccgtatttcaggatgatatttagttggtaggtgtgtattatatagagagaaatgcaaaaaaaaaaaacagtgtattaagtcagcaacaaattcattctaaagtgacaagattgtgaagcatccaatttacatgaagacaagtgaaaaaaagccaataaatagcaaccatagacgaaaac

SEQ ID NO: 802 - DNA, 1051 bp, Aedes aegypti
aacgacgactcgaaaccgaataacattcaccacaatcaagctaagccagcagcaggcccagataagcgacttactctaagcggacatttttaattaggaattgaacgcgaggatcatcagcataagatgtcactgtcgaaaccgttctacagtctgctgggagcgtactttgagcagctgttcaatcacccggtgcgaaccaaagccatcaccagctgtgtcatcgcgtcctcggccaattactgctcccagaagatagccggcacgaaaaaagtcaacaccgacacactggtcgcctatgggctgtttgggctaatcttcaccgggccgctgtcccatctgttctaccaatggctcgaacggatcacaaacgatcgccgcttcaagcagctgatgatgctgctgggtgagcgggccatctttgcgccggccatcaccgccctgtccctttacttcatcacccggttcgagggcaaaagccacgaggacggcgtcagcaatctgaacgacctgtacaagctgatcctggtcaacaattggaagtacctcacgatgccggtgctgatcaacttccgatttgtgcctccgatgctacgcgtgcttgtcgccaatatcatcggattctgctggatcgtcttcctgtcggccaagcgccgaaaggccgaactcatgcgccgccaggcggaggaacagcgaaactcctgagtgacggagaacgtctcgttctggccgttcgccgtaatgacggggaagcgctggaacgacgacgacgatgttgacaactacgtagcaccggagaagcccacgtcgtacgagaagctggccggaggcatatcaacgtagaggtacatttcgacacaaagaaaaaaagaaaaaccaaacagcaaaactttcggaaggaaaatccgcagcaatcagtttttttttatttttaaccttccgagaaatgggaacagaagcattccataaatagcaagggagaaacggttataggaaataagttccggcgatttacaaaaactttgcaagtatcagtgcaaagattaaacga

SEQ ID NO: 803 - DNA, 1316 bp, Aedes aegypti
ccagattctaccatatttaccaaaaaactattgtccgctagaacgttagcaaattatcatctgtttagatgtccggtcttagtgcggcagcgatgatgaccaacgggcagaatccggctgtcccggcggggaccttcaaggacgaactggacgactttgagcggtttgctctggagagtttggtccggaacgaatggggcctgaaggtggccaccctcaatcggttgatgtactgcggagtttcggtcgaatgtttggaggtgattgaggagcacgatctgaatgacatcttcaacgacgagcgggccatcgggcagaagatactgctgcggcatcggttgcgcgagtggcgcaagggactacactggaattccccagaacatccaccttcaaaacgccgctacgaacgccactccctcgacccgctagactcagagaagaaacctcgcatttcaaccagcaatgccatccacgaatcatcctcgtccacgccaaccgtcatcctgccggacactcgcaacccatccaccggtggaatggcttcctcatctacgtccacgtcgtcttccatgaccggagccgccctctccagcagcaatgtaaccgcttctggcagcgccatcaccgacgccggcagtctccccatccagatcacccccgaagccctagccagctttctccagggcagccgttccggccgctgggtgctcaaattcttcgccgacaatcaccacctggacaagaaggccctaaccgagctgacgcacgtcgttgtcgaaccgttcctggtgttcaacatcaccttcacgcacgcgctgatgcgacactacgccgaggtcatctgccagctgttccactcggaacaggcggagacattctactgcccgcggaacatgatccgcaagaacccgacggggaagctgtacgatcggtacgtcaaccaacggttgcgctacaaaaccaagttcaacgctcagaggccgaccttcgtgccggacacccacctgcacaggaccttcgccgagatgagtacggttacgatgtccgttatgatgcaacatcatcatcttcagcaacaacagcacttcatggagtatgccaacgctgatccgcgggagttcaacggtacgccaccgcaaccggagagtttcagcgaggagtccatgaacatctacggcggggacgagggatccatcctgatcgatggtaactgaagtacaaaaacggggggaaacgaccaacaagtcgtttcgaacaagataactaatgcatttacaatatagatgagaattataggtttagtgacacacctagcg

SEQ ID NO: 804 - DNA, 3043 bp, Aedes aegypti
atgaatccagacgaatatgaatcgctgccgacgaccagtgtagccaccaacatgacggccggtgcgattgccggcgtcatggagcactgcgtgatgtacccgctggattcggtcaaaacccggatgcaatccctcacgcacatgcacgtgaacgacacaatcatctcgacgatgcgcgacatggtccgttcggagggcctgttgcgaccgttccgcggtgtgatggccgttgttgccggggcgggccccgcacacgccctctacttcggagcgtacgagtactcgaaggagacgatcgggcgcttctcggatcgggatcagatcaactacatggtgtcggccgcgttggccaccctcgtacacgatgccatctccaatccggccgacgtcgtcaagcagaggctacaaatgtacaactccccctacagatcgatcctgcactgtgcccgccacgtctatcgaaccgaaggcctgcgagcgttctatcgatcttactcgacgcagcttgtgatgaacatcccgtactcggcaatccaattcccgacgtacgagttcttccagaagctgctcaacaaagacaataagtataatccccccgtgcatatgctggcaggaggtgctgcgggcgcggccgcttcagccctcactacacccctggacgtgtgcaagactctgttgaacacccaggaggacggtgccggtaaaaccactggtctcatccaggccgcaaagaaaatctaccgcacggccggagttatgggcttcttcaagggactacaggcccgagttctctaccagatgcccgcgaccgccatctgctggtccacctacgagttcttcaagtacatccttacggagggcgcccggggagcagtgtggagcagcagcagcagtacctcatcggaagcggcagtagagaaaccgaaggaatcggacaaaaaacagctgtccgatctgcgatacgtgctaccggtaagtgcggcatcggccgaagcctcggccagcagtctgatcgtgcgcggtggggccggacagtcgtccggtggcgatcgggatgggggccgccgcgaactgcccgccatgtccggggccggaatctacggagcgatgagctacaacacgatgcactcgaatgatgcaaacatcaccgatcatcaccatccgctgcggaggaccaactagagggcccccgatcggctggacgtgtcgtcgtcactcaagttgaccttggttctatagcgaaaaaatgtggcaaacaaagatggagacgcgcccgccagcctggttattggagggacaaaacgaactatcgtcggtggattgacgacggtgatgatgatgatgataataattattgttatttagttatgtaaatagaagctatcgctctgtggtgcccccgtatcgcgtattgtgcgtggttgcatgtaccgagtggtgggagttggaacagctaaacagaacaaacaaccatagatcagggaattaaaaaaaacgcggaacggttcttctacttgatgaagctgcgatcgatttagatgatgcgcgttcccagcgtccaagacgctgctgccacttgtaaatttttagtcgtgtaggttcacaccctaatcctactctaattagtaccttttccccgcctgttccctgtcccttagtttagttttattttcctgttccaaatacagcccagaaaagtgtgagcaacaatcccaattcacaaatttaggagcatctggccgaggacgatccttcactcgatcaatcgaataatcagtaatggtctgcgctttgcaaaagaaatgagtcaattaatacaaataagttcgacaaatgaagttccgcctaggaaaatcgataatcgattggtattttttctctgtagaatacctacatccggaatttgttcggaaacgaaaaaggttccccgcccgactgatatgctctacaagttcctttcctacgaaaaaatcttctaacataagattgttgccaccgtaaattgttagactgttcttgcgctgcgcgaaggcatgaatcgtggaccttcccgcagtgtactctgttctttagtgtttggcacttttgtagagtgtttgcatgtgtaacctcgttgtcgttggtgatgtaatacacctctgccgcaccttcccacttgcaataagaatcagtcgtcaaattacaatcaacttacccaaaaaaccacacactacccgcacccaaaaccatgcccagcccacgatagattgccagtaggtaccgcggtcggaaaatcgcgtttgtcgctggtgagaacagaatagaagcattaaatcaaaattgttttcaaaacttaaccatgttttggctccaatacacgtaaggtgcaaacaaaaattttcaaaactacattagtaaaatacagaaaaatagataaaacgagagacaaataaagaaccttgacgcggttgtagctgaaatattagtcagaagcagaagattaacagaaactacacgtacacagacacacttattatacactctctcatatattctatacatatattatttttaccgttttgaatcggtactaagtatcgtctgatggtgagatgccatagaatgcttgataccaaaggatcaagatgattattattgaacgatgaatctatgcttaattattaactacaaagacaaacaacaacaagagctattagattagacgaaggacaaacggtgttatcacaaagaaacgcaaaactgttcgcgttcacaacaccctgaagaaagaaagattcagattgatattacctacccacactgagtattccgttcaggaacgtgacgggtgaccggaaacaagtttacggaaaaatgtttgttttaactttggttcttgttcggaacgagcgacagacaaaaaaaccccgaatgtttaagattaaacggacaatggaaagcgatttgtcgaagatttgtacagtgagatggaaagaaattcaaattattggaagaagtgattaaaataaatacctgtatatgagaaaaagttgaaatttaaagt

SEQ ID NO: 805 - DNA, 2078 bp, Aedes aegypti
cgcaagtcgtctgagtcatgtcgtgctggggttctgcaccactagtttagtgtgtcttagcccgcgccagattcaaagttttgatcagcttagtgtcttttgagaattgagtgtctaagaactttagtgaactgtggaattgtgaagaaatgtcggtcttaccgagaaatgtaacggaagccgtcaaggagcacgcgacctcccgggggatcaagaatcccaagttcgatatatctagtgggtcccggaatggggacagctattcgggcgatgtgtatcggattgtgatttcaccggacgaaaaggatgtggaagactgccgcaacaataatagtgacggggccatcacggggcttccaaaggtcatcagcgtcatcgcgaaggtggcgccaaccagccctctacgtaggggtctctacaacagttcggcgcatttccagcgcgaaaaatacatattcgacatcgtgctgccgacgttcgaaaagtttcaggaaacacgtggcctgaagccgtcgcgtatgttcaaccactacccaacggtgatcgcctcggattgcaccgaaggccaggagtttgtactgcaggatgatctcacggctcagggtttcaagaatttccaacgaaccgagcccttggactacgacaacgttctgcggattctgaccgagctggccgagttccacgcggtgtcgtttgccatgaaggatcaagctccggacattttctccaagatcgttggccagctgagggagacgatcttcgtggcaccgttgcacagttccttcgaggggttcctgaagcgacaggttgattatgcgatgcgaacactggaacacaatccggccaagggcgatgaagcggtttgcaagcgattgttccggtttcgcgacgagtacggaccatcgatggttgagtgcgttgagaacaaggacgatgtggtgatctgccatggcgattgctggatcagtaacgttttgtacagacataagaacatcagccaaccgaaggagcttcgattcctggactggcaggtcacccgttgcggcacaccggtcatcgatctgtcctacttcatcttctgctgcacagacagcgagctccgaaagcgactgcccgagcttctgcgaaagtatcacactgccctggtggagcgaatcgatgagctgggaagcaacggccgtcgcctatttcccttcgacacattgcagcagcatttggaaaagtttgcccgatttggtttcggcatggccctcatgacactccactccacgtgctgtgtggagaaggaccttcccgacgtttcggccgccctggaatcctccgaattgatcgacttggacaagtacaccaaagatttgctctacaatccggcctacatcaagcggatgaccggcgtttgtcgggacatggtccgattgggttacctgtagtttcccatacaaactagctttaaagttctgattgacaataacggtagcgacgatagatttctagcctagcgtagaaacgtacttagtcagtattgcttcggatttaacgcgtaatgacagtattctagaggggtgtagttccgattgcaatggaatcaaatcatgagagggtaaaacaaatcaaactaaactgatcataatcaaatacacatggcacctgatgcagggatattagagttaagagagtcgtcgtgtagttatcgactataaattacgaatcgtaattggcgcagttgaatcatcacattctagtgatctggttgtacaattgatagagtgaaaaacaagtagagtaaggaatttgaatggaatgttcagatgagaacagaacgcggaaaatttattgtacgttatcgcactgttttaacttggcacaagtatactcaaaattgtgggttagagtagtactagtgaacagctggggtagattatttaaaagtagaagaacagaaatacgtacacaataaagtctatatcaaacatgtcactgcaacaatgagtgggttcgccacttgttcaaatttgtggttaagtaaaaggaattatataacgttttaagtcaacatatatgaataaaatattatgttc

SEQ ID NO: 806 - DNA, 740 bp, Aedes aegypti
atgatggaaatgtcattttccatcgctttgtgttttgttcacatcattcgccttgagcataaaagtgggtccgggaaaagctggagatttacattggtgtccaatctaattgaacacagacgttggatgaaatgctggacttattggtgctgcgataaaacgcccattggccgttgcgaaaccagtcaaaaactgtaaagaccagacagcagctataaacaatgtattcagcaggagtcccatcagaagctggtgaactagcggtgcatctggtggtgccacctgtccaggacgtgttacttagttgatttcaatttgaactttggaactccccaagtagtatgacgtgaaaattatagtgagtaaaaccgtttgttccgatatgagctagctggttgtccgatatttcgcggtttaccgttttgcggtagtaccatttcgcggtgtggtttttcctacaagttgcactgaaaattgttggcattaccactaatagcattttcatcggtgatttacccttcttttaagcacaggctttcttccaaatttcactgttaagatagataaaacatctcagtataaaccgcgaaatggtactgaccgtgaagtgacatgccgccaaatggtactaaccatggtgcaccaaatgttgtactgcgaaatggtacaccgcgaagtggattaccgcaaaatgctagccagggctgaaaaactcgtcaataaagatagaaaaaaggcgt

SEQ ID NO: 807 - DNA, 891 bp, Aedes aegypti
gttttgattgtttcgtaaatatcaatccaaagtataaactgtataacattttgataatcagcgtgagattgaacctaccttcaataatgaccgaaataaagaaagaaatctcgtcggaaacgatttgccggctatgtcttcaagaacgggaccactatcggtccattttccccagcgacagcatcgctctggacgattggatcgagagtcttaccacgataaagatactgtacgtacctaactcacctgcagcgctttgccttgagtgtgagacgattctgaaaaactacgagtcatttcgagagatgtgcttcatcaacgatcgttcattccgggagatgtttccccaaacgacggaatcgatcgatgattatgaggatcgcaaagagggtcatgaagtctatacctttgaatacatggtgaaggaagaaagagatcttcaaagtgacaccattcctgaaatcgaaaacatcgcagcaaacgaaaacaactcgtcggaatttgaagcagtccacgattggacagaatcatccgccacatcaacggatcatttcccctatcagtgccacatctgtttgcgaagattccgtgtcgagcgtaatctgaagagacatggtcgagtccacatgccgaaaatggcaaaagtacagtgtgagcattgtgaaaaaatgttaacaaattatacagccctacggatacacatgcgaagtcatacgcgagaggaggaaccgtacggatgccaggagtgtgggcagtcgtttagcacttcgggtctgttgacgcggcacgtcagaatacataacaagaatcggatgattgattctgtagacgcacagttgataaaataaacgattatgaataaattttgttatgccgtgttatatgtgttat

SEQ ID NO: 808 - DNA, 910 bp, Aedes aegypti
gactggctcaaactggcgcgaagtttattcacaaagatcgtcaatttcagtttagatagttttatatatataaatttaacaactttaattttttaacaatggaaccagatgaacttgaatttgtcggagaaaacacaaccattggagtgatacccaactttaatcacgatccgatttacctcatatccggtgccattggcccattccggggaggccaacccttgcacattccgctgtggtttgcgatacatctgaggcaacagcaaaagtgccggatagttcctccgctttggatggacatcaatttgctggaagacatcaaggaggaggaaaaacgctcaagaaatttcacaaaaatgcccagtgaacactacatggtagaggcaaaactggttctcaacacagcaccggaagacgttccccagtcggatgaaatcaaaaccctaatcaaggatatttgggacattcggtgcgccaagctacggacgacgacggacatgttcatcaagggcgagggcgaaatggtgaagctggacaacattacgatagtcgagttgaataccattcggcctttcttgccacacgcgatggatatgttgctgcggattctaaacgccaagaagggtctcacccagaattcgtccgtacacaatcagtcggccacgatgaacagcatgagcgggtcacactcacggtatacctaacggttgtggtgttttaatttattttataatgtaaattattacaattgtggaaaacatatggctcgactttaagatacccagcttcgcaaagcttcgttatcaaatactgcgctgtttcagagtaaggtttgcgaacagattatgtacgtatttatgtttaagaacgaatagagttgtaataaattaagctataaattgtacagatt

SEQ ID NO: 809 - DNA, 1080 bp, Aedes aegypti
atggcctatgtagtggctcccaatattgaacccttccgcaagggtcaaactttttggatccgtcgtttaacctatcatttccgtgtgaacaaggttcaggataacgataaaaaggatcaaatgttcttgttgggcggtgattacctgttcagcgaggcagaaaaactttatccgacggaggcactgttggatgaagtgtcctatgaggtgctagttcaaaagcttagggagcgtttagacagaaccgattctgtattgcttcaacggtaccattttagttcgaaattacaacaggccggtgagtcggcaagcgattttattttttcccttaaactacaagctgagcattgcgagtttggggaccagaagaacaggttgattttggaccgtcttctggttggtttgtcagatactaagctaaaacatcgcctcctcactgaggacagtacaaagttaacgctagaacaggcggaaaagatcattgcgacatgggaaatggcggcgacccatacaaaagccttggcaaacaatgaggatgttggcttggtaggttctttgaatgcaaggtaccctctaactggaggcagaggagcagtgattcaacgattcagggaagcagctcagggtttccgtggtccggtgaaaagtcggcttggtgtgcgaccggaaattcgaccagcggaggatcgtaagcaagaacgtcagtccaattcacgagttcgattcagatcccaacaatccaaccgccgggatgcttcagttagtccagctcatcggaggttccagcgaggattccagcggggcaatgaacaatggccggtggatcagcgctactgtgaatattgccagcgtactggtcatgttcgcaggaaatgctacaagttgaggaatgagcggaacagcgaggtcaaccatgtcgacatgcaggaagcgaacagcagcacaggtagtttgagccagctggccgagcgtctggaccggttgaggtccgggaactgggattcggatgaagacgattcagatcatggttggaaacgaggcgacgactaccgctcatccaacccaaatccggctcgttaa

SEQ ID NO: 810 - DNA, 3675 bp, Aedes aegypti
tcttttttccactaacaagcaacaaattttgattttctgaaaaaagcattaaattattataattgaaaagtttgacgaaccttttgaataatcttacattgttcgaagaatattctagattctacttcagtttcttcaatgattttacgtaataggatattttcaagatctttttagaaatttcttctgaaaattacaaatggattgtttcgcacaaatcttttcagtaaaacatagccttcaatatagggtcggtgtaccaatagccacacagctaagaacaaaaatgtgtatagaatcgaaaaataaagtcagcctaattgtttttgcgtcatcatattggttttaaagaaaaaaatatgaaagctataaaaaatcaaatttatgtgtataatatcacttgtgccactattttaacacacatgcgtatagtagcacttattattatttctgtttctatagtagcactaggttcacggagtaggcaaaacacaaatcaaaatcatatttacacaaaacttttatggttttcctaagaagaatgaaacaaaagctttcgattcaggtaaaaatgttatcaattcttccattattttgtttagtaaaacatagtttctcttagtagtgcaattgtaggtgaaaaaacgtttaaattttgaaggaaactatttatttcgatcatgttttgaataaaatcaagctgtgaatcaatggaactttgttaaatggcttctgatctttatgccattttttttaattccatgttttacagggaaacggctgtaaaaagccactagtactagtagtagtaaaaaaagataggtacattctgataacaataaaaacataatattgtaggctctaaaatacttcaattttatattgtatccatccataaattttagaagttattgaaacccttcgcattgatttttgctttcaataacatgtttcagtgtcgcaatggtatatttttcatcatatattggcatttatctaacaaagattttaagtagaagacatcgcaattcactaacaattagtaactcatagcttctgttttcagttcatctatagatttttattttcctgattttggctaactgctgtataaatgatatgtgaaaacaaaacggaatctttttggctatatgacgtaaagcgggtattcaacgcattgaaattaaccgggtgtagatcgaattccaggcatggctggtgtcaggtctcgtactacatcaatactttcccgtttaaaaggatttgcaggaaaaatagtgcattacttcttggtagaagagaaatattttccaccgcgttcacatcgattcacggccgtctacagccgtgataaagaatacctcttcgacttgaaacaagcctgttttttcacggcggcagttcgatcacgtatagtccagttcatattagatcggaaacgattttcagaagactcccggaatgattacgcattcgggatagagcgattgataacagaagaagtatacattgctgcatatccgttacatgacggtgaaatcaatgttccaggtagtatgcgacatcttttgtatacgaagtgggcagctgtttcgaagtggtataggtaccagcctttggactacattaaagaatattttggcgttaaaatcgggctctactttgcatggcttggttactacacctatatgttgttgctggcatcgattgttggaattttgtgtttcatatactcatggaaaacgttaagatacaacactccaagtgaagaaatttgttccaaagaaaataacataatgatgtgtcctctctgtgatcattggtgcgattattgggaattgagtgaaacatgtttgcatgcgcgcgctacttatttatttgacaatcccacaacggttctgtttgccatttttatgtccttttgggcgaccttatttctcgaactatggaaacggtattctgcggaaatcacacaccgttgggatttgactggttttgatgtacatgaggaacatccgcgtcctcaatacctggctcgattggcacatgtccgtaggaagaaaatcaatgctgttaccaataccgaagaacctcaagttccttactggcggatgaagctgcctgctactatacttagtttctccgtcgttttgttgctagtctgcctagctatagttgccgttcttgctgtagtattgtacagaatgtcggtccttgccactctaagtgtttacggagacgaagtgactacctcagtcgccattctttttacaactgccacggctgcgacgataaacttgtgcttaattgtagtcttcaattggatgtacacttatctagccgaatggcttacagagcgagagctactcagaacacagaccgagttcgacgactcactaacattaaagatatatttgctacaattcgtaaactattatgcttcaattttttatatcgcattttttaaaggaaagtttattggatatcccggaaattacaatagatttttcaattttagacaagaagaatgcggctttggcggttgtcttatggagctgtgtattcaacttgggatcattatgattggtaaacaagcagtgaatactgttctagaaatggcaatcccaatattctacaagtggctcaattcattgaaagtacgcattgggaaacagcgcaatcagtctttgaaaagtaagggccagcgcttcgttaaagacctaaagctagtcgagtggggatcccgaggtctgtttcctgaatatttagaaatggtgttacaatatggatttgttactatatttgttgcggcttttcccctggctcctttctttgcattgatgaacaacatattagaaatgagactcgatgccaaaaaactgctcaccttttaccgaaggccagtatcgcaaagagtgcgcgacataggtatatggtatagaattttggatagcattggaaaactgagcgttattactaatggtttcattatagcatttacatcggatttcattccgaaattaatttatcgcttaaatatttcttccgatggttcactaaatggatatctcaactatacgcttgcgtatttcaataccagtgattttcaaaagggaagtgaacctttccagtcgcaatataatgtaaccgtatgccgatacccagattttcgtgaaccaccagggtcgagcaatccatatgagaaaacaacgatgtactggctgattatggcggcaagacttgcgtttgtcgtaatatttgaaaatattgttgcaattgtgatgatactcgtccgttggtgtattccggatatgtcacaagacttacgagatcaaattcgccgcgaagcttacattacgaacgaaattatcatcaaacaagaaacccttcgggccagaatggatcgtgaaagtgaattcgctcaagatgttcctaagcccagatctcggattgccaaagataaaacgcacaactcatttgttaagttggaacgtcttatttcttccaacctatccggatcgcaactagacctttttatacataatgaacgtgaaacgcaagtagaaggaaagacgagcaatgtttgaaaaacgttgctaacagttaattatttttatatgtggtgtgtcttgccgtaaattgtaataaaaaacgaaactgttgtttcagcctcaa

SEQ ID NO: 811 - DNA, 1573 bp, Aedes aegypti
caccagtggataagaccattgtgacacttgagcggatgacaatttcttgaccgttctcttgagttcgactctgtatttatgctgcaagtgctgtcaattttatgctgcccattttgacatcgacttctgtcaagtatcgtgcgcgtagtaaacatatgcgtttgttttgtaacatcgtactcgtactgccatcgccgcaatttttgcagaaaatctttggaaagctaaagttttcttctcttaaaccgtagccaactgaagtgtaatgtacgtagtgtaaacgatctgttaaaataattaatcacaatgtcagaaactaaagaaatgcaaaccgatgagcgcgaggcgctggcttccatctacgagggcgacaactgtttcaaacaagtgaacggggaaacctatcaatataagtatggcgaagaggatggaaataaatcattcctgttggaaatatgctggcaagagaactatcccaacgaacttccgacgatcaacatggacacattttacaatagaaatctgtctcgtgccctaaaagacaaaataatatcgatactgaaggaggaaggagagcagtggttaggttgcggaatgacttacacgctattcgagtgccttaaggataaagttgaggaattgctgtcggacgagagtttaaccggtggaaccgatcagcaggtgatagggacaaaccatcaggaagatgaacagcgtagctccgaggaggatgacggagacgaacgggggactaagggtagtggggcaggagcaggtggcggcgcccagaagaaggaacatttgactaaggcacagaagcgcaagcagtgggatcgtgtagacaacaaaggaaatcgccccagaggctgggattgggtggacatcatcaagcacctgtcacagaccggtggcaaagcggagtaacgtgatatttgtggattaggactaggtcaaagctcaacgggacatttggcgttggaagtttgtgtgtgttgacacgcaatgaaataaaagcatgttgctattgcaaacaaaaagagcgttaatctgtatcgggaagtctacctttactaatcccaggactggtatcgaatgagtgtcttcaaattaggaactttaagacctttggcctggaaagagaccaaacaggggccaagaaaacaaaaaataaaccttacaggaaccaaacgataagagttggatttgttacaggacatagtgtagcattttttaggtaatcgaatgtaagcagcagatgctgaaagtataggtccattttagcaacattctatttgggatttgtaagattagttcaaaatttggagtactcttccaatttttcagcttgattttaactcaatatagcaacagttcgtaaactattgagaattttttgatgcagtcttccaacaaaatgctttgcacaccaaaaggcacaacttttttgaacatgtcgtgaggatatacatatttttcgtagcgttttagtacaaaaacttcagaaaatggcagatttttttcttacctcttcaactagtgttgcacagatatttacttaggttagatatttaat

SEQ ID NO: 812 - DNA, 722 bp, Aedes aegypti
ttcagacgagaaataactccatcggtttgctcatgccgaaaggttatcacatttctgtagtcattacaattgtaaactgtcaatacgttgcattacgcaccactgtgtggtagagctctgctgatcgatactgatgtgtatggcctcaatcgcagaggcatcaattgcactaggattcaatattacttattggttcgttagattattattcgttattccagtttcttaagtcggaagatgaagtcgattgtaacaagtgtcttggccttaggcattcttgctgccgttattttctgttcaccagtgcctacggaaaattctggagaagtggtttgcaacaaagatggttgtagatttcctgtcaaagattacggaccttctgtaacgccttacactccgacgctaaaaccaagagtacggaccatgattgtaccacctttgtgggttaaccaaacttggatggaaataattgcacgatcgtcctctactatggcgcctgaagaagaccaaagtgcagcgacatccgtggaagataattacgatgagaacgaagaagataacatggtgtgaccataatactaaataattcgtttaaattgatatttttgtatgaaaataatatagaaataatatagatgtaaaattacagtttgtttcagtatgtcctaaatgtagaagtgtacataatctgataaatatatgccttcacgtgttaccctgaa

SEQ ID NO: 813 - DNA, 1917 bp, Aedes aegypti
atgcaattacatctacaaatgcaagcttttgtcatacaactgcattaacgcacaaatgtcgcgcaaacacgtgcgaaaaactacatacgtataagcatacgatagttgacagcaatcatgtctaaccgtctcgtggaaatctcctccgaaaattggcccgaattgcgcgatttgttccgttcaaattggcctgaacatgtgtttgcctatggagtagttaacaattattggaactggaaacagcaacctactaagaagaatcactacccaacatcggaagtgcaaattttctccctcaatggatcgtggcgagagaatggtacatttttgttgttcgatcattttgaaatctacttctactcgtgtgattcaacctctggatatgctagtttaacagaagcgctactactagtagattggactaaatataccgaagttagtatggactttgtcgagatgcatcgcattgcactggatcgggttatctctgcgaagagattagcaatcgtgaacgatgaagtaactaacttttactacatgccgaaagagaacgcttcttctttggaagtaaatctaccagaaagctatcacatcgatcgaatatccctggatcaactggactacgtttatcaccagtggccactaaaggacagtatcagtgctaccgcaggttacaatcttctggaacgactcatcttgttgaatgatagtgttgggctttttgatgaaagggataatcttatttcctgggatcaaacaggagcgttttcggatttgcagacatgtcaagcacatctacggaaaggatatgcccgaatggtgattatggaattcgcgagacgattggcagccaaagaagatgattcgtatgcgtttgttcttcgcagtaacgtgaaatcctctcagttgtttgaatcgattggatttcagaaaattacacatctgcattgggttgttatacgaaacgcaaattaaaattgtgaattgcagagctggtatcaggtttttatttaaagacttggtcatagctgagcagctgagatgcagggtctgtccctgtgaggacgtaatgccaaagaagaagaagatggatcaatcaagtataataaagtttatttacgccagcaaaaactgcagcaattattccagtaatttcaaacacaaatttctgctgatgtttttcaaggaattctttcataaaattctgcaagattttatccagggattatattgatatttttttttctataaatttcgtgactagaaaatccttcaaggcttctctaagagttaaaatttttttttcagagatccttgcatgagttcctcctgagtttcgacaaaatcatcagagattacttcatgatttcgtttagagatatctaccggatttttaaagaatctcttcaattgtctgaaaaatgtccttgacaactacctggagacattcctagaagaatcactaggtaaatttttcgaagactcccttgttatttctaaagaaatctttatagatattctggattgaaaatttaaagaaatcttaaacggcgaatttggaggaaatgctaagatatttttcgagaaataattgtttatattctttaagatgtcctgaatgaaaatcttttaagaaaattatagggaaatcgacaaaagaatcactttataaattcctaatggacttgaatctttcctttgaaatttctgaaagtattttggtggaatgtatttgattaatttttggagctattttgaaacatttcaagtcataacctcaaaggtatcttgaacgaaatcgggcattgtagaactcgttctcaattgatttcctctacacacttaatttagaatgacgaatctcggtttatttttaatcgagatttgtacagctgagtagtcggcaaacaaatttca

SEQ ID NO: 814 - DNA, 3183 bp, Aedes aegypti
ctgctccccaccgcgcgcgacgacacatcgaaaatcataacaaccgaagtccgccattttttattatccctctgttcggtcgtttagcttttcattccgtaagcgcgtcgttcactgtgtggcttcttttcccagtttatcgccagggaaaaaacgcaaatttcggcacaaaaacgtagcggttccccgtgggaaccagccagaagtgaagattatccgatcgagcggagaaaggaagtgaaaattccgtgaagtggaaccgattgacagtgattggaagcaaaaaccggacacggcgaattttagcgcggctggatctcccggacggtgttttcttatcgaaagttttattttcgtagcggtcacttgagggcgtaggaattgccaacggcagcaaattgccaccactgggaagtgtttcgtcgtgttatcaaatcaggagaagcatcagctattttcatcaataacttttgggcggaaaatcaaggaagcgtcacccgggaaggaaaatgaccgatagcaaaggttatgctgttaacgatctggtctgggccaagatgaaaggcttctcgccctggccaggtcgtatctcggagcccccggcagagcttcgccgtattaccgtcaagaaaaacattcccgttcgatgcattttcttctttggttccaacaactatgcatggatcgaggaaacacaaatcaagccataccaggagttcaaagagaagctgctctcgtcgtgcaagtcggccggcttcaaggaggccgtccagcagatcgaagagttcatcgcctcgccggaaaacttccagcatctgttcgcctcggagcaggacaaccgccccgatccggacgtcgagttcaacaaactgcgcgaaggtggcaccgaaagcggcgaggaaacgaccgtcaacaacacgtccaccccggcagcgctggaatcggtcgaaacgacacccgtaacggccaagaaatccgccgccaaaaagaaagtacgtgcttcactgcccatcaagttgcatgtggataaggctgcttccacaaccaaagcccgcgcgataggcaacaaagcgaaagcggcagcggccctgaacgacacttcatcgcccaaacgcaaacggaaaatcctcaacgataccgccggcgatgtgtcctcacttgatctcgacactttctccccggtgcggcgcaatgtacctgtatcacatctgttgaaccgaccaacggttgcccgcccggcaacgccggaaatcgatatgaccagcgtgtcgaacgcgctccagtcgcgcaacattcaggcctcgaatctgaagttcggcttcctcggactcggcatcatgggctgcggcatggtcaagaatctactcaattccggccactcggtcgtggtttggaaccggacggccaccaagtgtcggaagttccaggaagcgggcgccgaagtcgccgacaccccgtcggacgtgatcgaaatgaccgatgtgacgttctcgtgcgttgccgatccccaggttgccaaagagttggtattcggaaattgtggcgtcatgtcggccaatctggtcggcaaaggctacgttgagatgaccggcgtcgatcccgaaacgtcacatgacattgcagagcaaattatcgccaagggaggacgatatctagaagcacaaattcagggatccaagaaccaagcggaagagggaacgttaataattctggccgccggcgaacggttgctgttcgaggaatgccagacctgcttcgaggccatctcgcgcaactcgttctacatgggcgacgtgggcaatgccaccaagatgaatctggtcctgcagatgatctccggcgtgatgctggccggtattgccgaagggctggcgctggccgatcgagcgggtcttcaacagaaggatgtcctggaagtgctggaactgacaagcatgtcgtcagagctggtcatgcagaagggaaatgcaatcatcaagggtgaattcccgccccagcaggcactgaagcacatgcagaaggacctcaagctggcgctgaacatggccgaaggtctggagcagcccctgcccatcacggccgcctccaacgaggtgtacaagcacgcgaaacgcctcggctacggttcccacgattccagcgcagtttacgtgcgggcaaggttttaacagcgactcggtctagcgctgaaaggaggagatgtgagcttgaagagttgaacggcgacgatgaagaaggaatgcatataacagcgtggggatggaccaagatggatggaataacgcatccctgttgggcacccccgaaatgttggggtgtgtagggacggcgtggacgtttgaaaaaaggttgaaggattatttttagtagctatttttttgttttcttttagtagcaaaaacgaatcccttttcaggaggtttaaacgtgactacgcaagtagatggtgaataagaagaaatctggtaatttatattttacctgtttaagcaataagactacaatttcggaaagtaaactgataaattctatggtaaaaaaacacatttcttttgatgtaaatgatttttgtgcacctcccatgcgaagaaaatagatcccgcactaaatagccagcagcagcacatttgactgtactatttccccaaaaaaaaagcaacacaaaaaccgtgggaattatgtgcaaacctcgatttccttgagtcaggaaggaaacaagtcgcctctattaaaaaaaactacttttgcctatattatagttttacattgtaagttttattaatgaaagaataagatgcacgaaaaaaaagaagagggtggattataattttctgtttcgtagttgatttattttataacgaaattaaagtggatcatttacaacagttcattaggggggataatccgaatcgaatccggttggggggttcgccattaagaggccggacgagaaaagtatctatagagaacgaacagaatatttgtcgtacgcccacttacgcactggaagaaaaaaaaaacgaacagatatattttatttttattgtttcctaagtttgactagcttttccaaatcatcaataccagacaagagcatagaaataaaaaacaaacaaatcataatggatttctattttcgtgaaacaagtggatcgtaaaataaatgaaaagtgtttaaaacaa

SEQ ID NO: 815 - DNA, 1171 bp, Aedes aegypti
attcactagcgccattaaaacgctggtaaaaatgaagtcgttctttgtgtttctggtgtgtctggtgctattcaacaaaaacaattttgtttcgtcaaacgatgaagcttcttcaatcgaaaatcgcctggatgcgattcaatccgctatgaacctcatgttcgtggaagctagtgaacagatagaggcactgacgaatgaaattcgcgctctgaaacaatctctcgatcatctgggttggtactccgaggaagtgaaacattccgtggcatcaattcaggacaacaacgaactgctgctgagaaatttgaccatactcacgtatcgttctgacgagattatagcaaaccagcagtactgtgccaatcatgaagctttgaagaatctgttcttcgagttgactccaaaatgtggctcattcaattcaactccaaagcctccagaaatgatttacaattcttgtttggatgctccttatcgatctggagtctatcagttgatgcttaacgtgtctagttggcaatacaaagcgttttgcgatgttaatgaatttggcgcaggttggacaataattcagagacgtctcgacggatcagtagatttcaaccgtagttgggctgaatatcggaacggttttggtgacgtttccggtgaatattggcttggtttagaaacgttgcaccagctgaccactcgaaggcaacacgaattgctgattataatggagaactttaacggatcgaccagctatgctcgatatggtgggatcgtaattgatagcgaaacacagaggtacaagatctttttcaacgctagtggaactggtagtgcatttgattccctgtatgcatatcgtaatgagatattcataacccccgatgtttcgagtggctcgtacttaaattgtgcaaaacaacttgcatgtggtttttggcactatgattgcagtggtcccagtagcaggaataacctgaatggagtttacggcacaaatggcactaaggatggcatctggtggtataattcattttcaggatatcaacaatacaatcctctgaaaggtgtcaaaatgatgattcgaccaaagctcaactgaaaaataccaaaggaaacaactttcataatgaaacaactttaacttaataaaacattcatgtcaattaaataaaaa

SEQ ID NO: 816 - DNA, 2034 bp, Aedes aegypti
ttttgtgacaaacgtcgtttcgaaaagttccgctttaatttattcgtgacgttcagcaaaagtgacagcagttttagtttgttttgatcctgattcgcatttatctcacagttttcactaaaacacagtgatttacaactaaaattcaatttcgtgagatctaaaatttaaaatcctgccgattggtaactattttcaacgaagtttatgatcgtgtgaaaacaatgtccatatcccaagtgaaaacactggtggagaactattcgaaagtgtgccggttttgtttgaatatgaatgcggccaatttggcgcccctcttcgatagaattgccggaaaaatggacatcatcacaatcaacgctactatccggggtgttctcactacgctggggattcagattgcgcagaatgatccgtacccgaatcgaatttgcgacagctgtcgagatttgctgcattccattcaacatttccaggaaacggttaagaagtccgtccaactgctggatcaggcccggttgctgaaagagtttcccaatgccaaatttgacgatgatccagttgcaatggtggttaaagaagactacgaaatcgaagaacctgtcctggaagtggcgtacgaggaactggtcgagtcgcagcaagaagaaccggaagtggttgaagatgtaaaaccgagttcacctgaacaaccggaatcgccgccacaaagtgaaaacgctgatgcgaaaactgagccggaatatacggatatggaatgggttgttctggatgaaggcgaggcggaatctcatcaggaagaggtttacgtggatgaggagtatatcgtggaagaagaggaacaaatttctgtggtttccgaggcgacgccgactcgacaggaaacccccgaagaagaaatatcagctgaggaaagtataaaagaaccatacgttaagagtcccaggatgtgtccaatctgtggaacgacttccacggccatgaaggtccacatgaggacgcacaccaaggttcgaccttttgcgtgcgacaggtgcgaaaagaagttctataccaacgccaaactccgatcgcacgtcgaatccgttcacataggcgagcgaaagtattcctgcgaaatctgcggcaaagcgttcgtactgagaaagaccctcaacgcccatatgctttcgcacgccgcagaaaaagacttcgtttgttcggtgtgttccaaagggtttctattccggtgggccttagtgaagcacgaaagggtccacacgggagagcgtccgtatgtgtgcgatctggatggctgtgggaagcgatttgccacatcgtctaatttgaagcagcatcagaaaaccaatacccattggaagaatccgcgagaggacgtgtgccagcattgtaataagtcgttccagaataaatacgccctgagggcacatctcaagactcacgatgtgaaagctggcattacgagtgaaaccaaggattaggtggctctgtattattgataatagaaagctattcaaattgacatggttgtcgttttttggatgacaatccttttatggtttgtggaaaggttttccagtgaagtgttgtgaacaatgctctgtgggaaataaggaagtggtatgtgacgcggatgcattgatcacgagttatacacaatatagatgtactcagaaaaaaatatttatgaagcaaaatatggcagttttcagtgggctggtcacttagtgcgaatgtcggaagaaaagattgtgaaaacatttaacatgaaccatgatagaaatcaatgatctcatggaagtggaaggtcacggatttgctaactgcatgcacagaagtcggatctgggaacgttttgaaattgaaaaagtgtcgcccaagatcgatgaaaattgaatcctacaatacgcccaaaggcgtgatgctacactgcagtcaatgaggtacgaggttagtaatctcttatttttgtattaaaaacatattacggatattcttacaacctatagggagtacagtcgactctccacatct

SEQ ID NO: 817 - DNA, 1629 bp, Aedes aegypti
agcttcccggacattagcaaccgtacggttgccctgctttcgatgccaaagggacgctatcagcacttgaaacgactccagccactgcttgccaaccagagcgaggattgcttgacacttaatatctacgtccccggaagtggaagccgcggcctcgaggcaccgtactccatctttttctacatccacggcgaagcgtacgactggggctcgggcaatccgtacgatggctccgtcctggctagctatggccacgtgatcgttgtgacagtcaattttcgtttaggaattctcggttttctcaaaacttgtgcctctgcctcaccggtcggttctggtggcaacctaggtttaatggacatcaccctcgcactgcaatgggtgcgagacaacattggcgcattcggcggtgatcccaagcgcatcaccgtggtcggtcacgatacaggtgcggctttggccaacatggtcctgatctccaaggcgggaaaaggtctcattaatcgagcgattctgctcagtggatctgcgctgagtccatgggctctggttcccgatccggacgccatacggatggaagtgtcccagcagatggcctgtcatctgctggtggatccaccaccggggaaaccagctcggaagccatcaaccgacgacattaccgagtgtctacgggacaaaccactcgaggccctgatgggtgtaagactgcacgccgtacggttcatgccgtcttggggaccatttcttccgctggaagattcactagatccggagtttgccatggaacattccggagagggcttcatcaccagcgagctgatgctcggaatgaccacaaccgaaagctacaacgatttcagcgcttccgatatacagtatggcctcgaggaagagcaacgcaatcggctgctgcggacctacatccggaatgcctttaccttccatctgaacgaaatcttttcggccgtgcggaacgagtacaccgactgggacaaaccgattcagcacccaatcaatatcagggactcgacaatggaagcgctgagcgatggccacacggtggcaccactgatcaaggtggcctaccttcacgctcgccggggagccaaaacgtacatgttccacttcgcctaccagaccaaggaaaccgagtatccacagcgactgggaagcatccgtggcgaagacctaccgtacgtgctggggctgacgctggttcagggcggtccctcgtttgggcagaacttcacccgccaggatatgggagtgaacgaagcggtgctaaattttgtgaccaatttttgcaaaaccggggacccgaacgaagccggccatcaggcgccactgttgcatccggactacggaacggcaaaggagcgaacgcgtttccgcggcataacctgggacacattcgagacgaccacgcagcagtatctgagcatatcaaccaaaccaaagatgcgtagtcactaccgagggcacaagatggcactctggttgaacctgatcccgcagttgcatcgccccggagaccaggacgtttcgatgcggcaccatcacttccgggagcgggagccccattactacgctgctcacagttgcacattcacggaaatggttcgttga

SEQ ID NO: 818 - DNA, 1277 bp, Aedes aegypti
atggcttcggtttacagccgtatgccacccgtataccatttcgaagataaatctcaatgcctcaatgcagattcgagcaatgtgtattgtgtatcaagaaccttgatcaaaccagatgaatcttcggaaaactggaaacttatagagcaacactctgtggaggacacagatttccaaagatacgtgctggatcgaggattctgtgttaaaagctgcgaaatgctagtcaacagtttgacaccacaagaactgaagcagtatgaccatgagcaagtttcagtggatgttccgtgtatgcagcagacctggtacttggcagccgatttccagttcttttgcataggaatgctcatcatgatgatcttgtggcggtttccacggtccataaagacaatgatttatgtaatgatgacaatttctattgtggttcccatacttaacaattatatttacaattttgtaggagttattctgctcaacttcaaacaccttcggtttatgctattcttctacgagtgggtcaaacgtgactacattctatcacatccgcacacgtgtagctacttttccggaattatagccgggatagcctaccatcgctaccaaaaggacccacagtacctgaagaacctccgagtttaccaagtcttgaaacgtttggccccactaatggttctactcctgtcggctccggccacctttttctactacaacaaaccagttgaaccgtccctatggatggctatctacgcatcggctcatcggaatttcttcggaataatgtgcggcgtgggtctactgtatggagcgaccgagggaagtgtgaaacttccggagattatgcgacacccaactttgctggccattggaaggttgtcgttcagtgtctatctgacccagttcaatgccattcgatacgtattcatggacgtcaaggagtacggcttctatttaaatgtgataaactatttgcaagcctttgctacgagttacatcgtgtcttatactgcagcgttggtactatgcacaacggtcgaattgccaatggtagcggtaatcaaacgcttacaaagccacaaaaagcagaagagcagtgacgaatgccaaaacataacaaacggaagcacgaaactgaaaagttcttagggattcttttggaatggtttatttttgctcggatgttaacattgcattgtaaataatttgcggactctgagatttcagtaatatttgcggtggttttacaaatttgatgtacattttaaaatatagtttac

SEQ ID NO: 819 - DNA, 1118 bp, Aedes aegypti
caactccgtgacggcgaggagtcggttcgccatttttgtaagcttccagaaagaatcgcttggtttttaaaactgttgatcaattcagcctaaaaacctaactataaggacttttaatcgtatatttcatatcgcaaacgatggctgaatatctagcctcgattttcggtacggaaaaagacaaggtcaactgctcgttttatttcaagatcggagcttgccggcacggtgatcgctgttctcggattcataataagccaacattctctcaaacatgcttgctgcagaatttgtacgtaaatccgcaaaattcggccaaatctgccgatggaagtcatttggtagcaaacgtatccgatgaagaaatgcaggagcattacgacaatttcttcgaggacgtattcgtcgagtgcgaggacaagtatggagaaattgaagagatgaacgtttgcgataacctgggcgaccatttggtaggaaatgtgtatattaaatttcgtcgcgaagaagatgctgaaagagctgctaaagacctgaacaaccgttggtttggaggacgtccggtctattcggagttgtcgccggtgaccgactttcgcgaggcttgttgccgtcagtacgaaatgggcgaatgcactcggtcgggattctgtaacttcatgcatctgaaaccaatttcgcgagaactgcgccggtatctgtactcaagacgacgtgggcgatccaaatcaagatcacgttctccaaagcgcggtggtggaggcggcggaggcggaggtggaggtggacgtgaccgttctccacgcgatcgtcgcagatctcgaagccgcgatcgcaagggacccgaacgaaacgacaatggacgtaagggaagatactgaggcgaaagcgttctgcacagatgctggtgaacaaacattttagttaaaggtaaattgtgtttgcataaatccaataactaaggatattcttatagttttgtccatgctataaacttttagccaatcagaaccaattctaccactggctatattttctctataagttgaatacattttcaagtatttgttttatgtcaataaacttacagtaacgagatgcaacaattcccgaaaaaa

SEQ ID NO: 820 - DNA, 1814 bp, Aedes aegypti
ggtattttttacccattaaagggtattcgcaaaccaccgcgtagtgcattgtcggtacaagttctattcgacggaacgggatgatccctcgatgacgacaaacatgcaaaaggatcaaaaagcaaacatctgtcaaactagtgcaaaaacgtgaaagattttccgtactcgcaagccgctgtcgtgcaaaaatcagttttatttcaagtaaaaatggtaaaatcgatcgtatgaactttgttacattaacgcaaatctgtttcagtgttcaaccccatttaacaaaacaccccgacttctaattaattcgacgaacgatatatacgaaactttgaaagtaaagtgagctgtttcatcaacttcgacaaaaaaaaatgtacgatctgaaaccaatcttgaaaccggtccacgtcgaacttccgacgtgcatgtatccgatgaaaccggtcatccaacacggtgtcgcgatggcggaccaaagcagcacggaagatcttcccgaaatccaagcactggcagtcaagcaagagaagatcctgaaacaattggctgaactgcgggagcagttagtttcgatgcgaacggatttgaaagtttgcaacaagccagcccaaccaagcgcccagacagcacccgccaaaaccggcgctaaaagcaaaccgcaaacgacaaaggtcgaacctatcaatgcatcctatctgcaagacttcgtggtcaatgctagccctgaaaatattccctacggattgctagccctgaagaagctatggatcgatcgtttgaatctgcaggtggagtgtttcacccactccactatccctaaactcaacgaagaggcagtccactttcaaaaccagatcaccagtttcgagccaaaactggagaatctgccacgcattctggtgacccttatttggaaaaacgtcggtacctacaccgaaatgatcacttccccgacggcgtacgttccgatctgcggagaggtcaatatcctgcgcttcctatcccgttgcggaccaagcgagttcaattacgaaagaaacgacgacgttgccgaggtggattcaatcttggacacgtgctatcagctgatcaacaagcagaacgtcaaggacaagaaacaggtgcttaaaactctcagttccaaactgggaaagacgcccagcttcggcggaagtgatgtctctctgtgcgacattgcggctaccagtgcgatcaagcaggtgcagaaggcgcttgccaaggatattaatcccaacgttgcgaagctgattggccgagtttcggccgtagtgggcttctaaaactagcaggtgaaacgcaaaggatttcgacgcgaacgaactttttttttatttaaaacttttgctataagttgacagtgcgatgcgcatttcccctactcttttagcatttgaattcagcagcacataaaaatgttacttgaagtgaaactttgattttcgtactgatactgaaaaaagagtgaacaagttccttatgtatgcagtaagagactatccataaagccaaacaccaagtggaaagggaagaggagagttttggacccatttgtaaccggtttaggttcctgccaaggtaggagaagaccggcatcaacttgagaggcaacagtgtgcctagacaagatctatccaatgtacgggccgcggctccattttgtgtgacccacgcacattgaagacgcttctcatatctgttttttttttttttttgttgctccactaacttgatgtttgaacattccaaagctaacagggtaatttacagcttcggcaccattcgactgttat

SEQ ID NO: 821 - DNA, 2334 bp, Aedes aegypti
ggtttgaagaagcccggatccgaggccagaagtgctacatctgcaaggaacagtatgccaatatatcgtgctgcgccaagaagtgcttccgtacgtttcataccgtttgtggcctgaagaatggttgtctgtcccactatgtggacacgttccagtcctggtgtgataagcacatcgaactggttgacgcggagaaacattcggagacggaagcctgcgggatttgctacgatgaaatgggaccgtaccggaagctggagtcgattcgtgccccgtgctgtcataatggctggttccatcgacgatgcgtggcccaatttgcccaatcggccgggtatttcttcaagtgccccctgtgtaacaacaaggacgacttcagccagttgattcgacagcgtggggtatacattccggaaaaggacgcctcatgggagctggaaccgaatgcattcgacgatcagttggaacgtccttcggagtgcgacgcggaggaatgccgttgtcgatacggtcgagattttgacgactgcaagcgatgggatcttataatgtgtgcaacatgtggctcaacttgtcgtcacgatcagtgcatggatgtgccctcgaaaaactacgtttgcaccttttgccggccgattgtgggtgacgagcctccagctggtgtgttggagttggcagaagcatccagaagggcggaagaagctagacgagcagcggcagaaaaagaaaacggttccggtgggagcagacgcggcaattcacgaaactcaagaaacagagctcgagatggatctcaatcggacagctccgattcggacagttcagtggaagacacttcaacaaaacgcaagaagaccaaaagatgcattgaatcgtctgaatctagtgcttcctctccaatcattgccaataaaaaacgcaaatcccagaaaagactaaccgtacttgatagcgaagacagcgattcggacgtagtaccgaaacggagaaagtcaatcgctcaaaggcgattgtcttcctcttcgtcctactcttcgctagtttcttccaacggagaagaaatcagtttgaaggagttggttcagaagattccccttccgcgaagggcatcggtcgagaaactaatcaacgcgaaaccagtcgtaaaagtggaaaagctgtcagaggaaaaaatcaaaaccctagcatcctccgagaacgaggacgaagaagtttcctcgacaggttcgtcagccgtcttcgacttcaactaccgtgtcaagttgaataggaagcaacggcacaaatcgatgatcgaaattccggccatcaaggaagctatccgctccgacacggacacgctgaccgatgcctcagtcggtgggaaagaggccatatcccgtccgaaaacacccgccagccagaaaccgttcgccaagcagttcaaactgaaactgctgggctccaaatcggggccacggaagcgttctaccagcgaatcagatccggacgttattgcagcgaagaaaccatgttcaacaatggatctaccgcacagcaagactcgcatatcgctgtttccctctcaagacgaggaaaatacctgccccaacagtcctaggaaggcctccatcgaaccaatcgccttcgaatctgcccaagagtcgcagaaaatcccagcaccttctccggtaaagatgaaactttccaaccacaaccagccctccatcgtgttcccgcccactcccccaacatccactggggaaagcactaaatcggcgtcgcatgtttcccaccagcagaagacgctgaatgcattcttcaagataaactccccgatggaggatgcatccggtgatgtcgtcgttggcacggaagctgcagccgtaggacaatcatcccagagtagtgcaataggagggaccgcgaccgaaagaaattgtagcagcagcagcgggcggcaacagcgcaaagattgagaagagtgtgaaaaaatcgaccgcaaccaagacgccgaaaagtgcgccgcggaaaaagctgatccaaatggatcgaagccaacgaaatctactggattatttcaatcgctgctgacgctcaaaccccggagagcggaatgtttgatttcgttgcacactggacccaggacattgttccgatatggagcggattatttttgacattgcattatttttctcagtttatcactacaaattttatattgattaaaatgtcagtttttttatacattattgatgagaattcgatattaggtaggtatcgtagagtgaattataaataaagcgcataatagtaatgctcgacaaacgtgcggtgaaaagtcttatctagatg

SEQ ID NO: 822 - DNA, 1639 bp, Aedes aegypti
atggctgtccccacaaaatgggttgacaagagctgcttgttgtggccaagagcttcaaatgcaaaaattgagcaattacggatttctggacaaacgttcgaaggagccactaagaaaattccggcgatagtgtgcggccgctttaaggaaatcagccttgcagaggaagcggtagaagaactgtccaagcgagaagtttccgatgtagacggtaagaagaagcggctcaagcctgccaaaaaaccgaaggcatcggcgaagaagaactacaatgatatgattgaagcacagccaaaggtgagagtcatcaatgccggcaaactgcaaccttccgtgccaacaacaatcctgcgtgcatcaggcgaatccagtgaagctcccagtaaaacagtagattcaacagcaagccatgatatgtcattccctgcagctgaagtggctcaggttgttacggatatccgccattcaacatcatttttggcggcacctacgcaggacactatgccaactgttctacacttggctcaagaaaatcaaatggaagctcctatggatcagactgatcagtggccaacatcgagtaaaatgattggaggaacgtctcctacaacgcttgtggatgccaatcaaatttattttcaggatgaaaatattgtttatcttcagccctcagacgaaaacgacatttctggtttacaaatcgcaggatcaatgagctacgagcaaatgaaagctgacctgaaagtgttcatagaacaaactgtcgagaaatctatcgagaatgcgttccaaaacaacttcgcgcgttatgcagctttgtctgagatacaagctaaggatgactctgcaaagactgtcccagatgattccgtggaaaatcatgcaccaataaatgacgaagatgagctagcgaagtggaatataaacctcaacaacaaagaattgcaacggcgttatttggagtatttctcaaaaataatcattccatatgcgtataaccaaaaaggcaacaatgcttgctatactgtggtagactgcctgttttcacgtgagttttggacgaagatgacatggacaggaatcagtcgaagcgataaagcaaagagaggtttccgtgaatacggtaatgtcactcagcttttgggtgatatagtacgaattggcgatccgtcctacactgcgcagcaattggagttattttgccgaaaccgcctgtttcgctactgcaaatctcgatctactagtcgacggcttcggaaatcagcatgcagaccaaaacgctccagtaaagcaacagccacagtggaacaaaatgccgccgatgctgatgatctgtgttcatctgatgacgcacggatgtcaggcgaactttctaacagcgacgaatatgaaactgattctgcaggactggagcgcgacgaaaaaatctcttcagattccagccaatttcaaatttaaataacatttgaagatcgaagttttttttttatttgttcaactcttattagagtttcgatatgaactacatttatctttttttttgtaagtactgactactaagtcactgtaaatgtctaagtgacacagtacaaaacatgcttatacattacttgagtccactgtataactttggcaggaa

SEQ ID NO: 823 - DNA, 3686 bp, Aedes aegypti
ttaatctgatttcattaaataatttttcataacattttatattctgcaagaagagggataccaaatccgtttgcattggcgaaactactaaccactaccctacgtgcggcttaaaaatttcgtttcgcgtttcttccctcccgcaagcaagatcgtctttctcgtcgtttgttctgaaatcgattctgctgagatgggtttttgacggaagcaagcaagtgctctgtgcggtgaaatatggaagtagcgcagggtgtaattgaagtttgaacaggaaacgaggaaagctggaaaatcaattgagtctgatgttttgacggagtcgcacttcattcggctgcgattgtggatttagtcttaatttaagtaaatttggataatccataataattgtgttgagtacccgtttataacgcaagtatcatgaaacccgatattgtggttctattttaatcgccggagtgccccagcaagaccaggattggatccgatcagcggttaccggatgccgctgcaaaattgagacgtgaaagtttgtgaaaatcggagcttgccaaccaattattgagtgagagtcttccgtaaatcgtgactaatcagcaagaaaagtagttctagggaaattgaagacgaaagcagcataagagcgacgaacaatgtactcgataaacggcaatgagcaaagtgtactcctatccatccctggatccgatggaggaggaaatggcactggcgacgtctaccggcgtctgcaggatccggaagcagacgccagttcgaacagcaacgaaactgatgcggacgagtaccacacattaatagatgggcggtacaaaaagatctccaaaaagtacgaagaaagtcgtcatctcggcagagccattcgaccgattccagtcacgggaggcaacaattgctcgaggaatcgggtgtttctagtcataatagcaatgttttgcttcataactctattgctgactgccgtgcctcttggaaccgataagggacgagttggaacaatcgcgggttggagtgtgaacacatcgagattaacgatcaactatgtgctaccggcggagaatactaccataatcgatccgttgaacatttgctccacggaggaacggagtggtgatggaagtgaagatgaaaaagttttcttgcttatcgtggtctgttcgtcggcgaaaaatttcgaggcccgacaaaccattcgggagacctggggcaacgtcagtgagttcaactatcctcagtttgtgcgattacatgcccgtttgaagggcgagtatttgggaccacgtacattcaagcacctgcaggattacatgaagaaggctgtgattgagaatctgcccatggcgacggaagatgatcagcaagtaactgagctacatatagtgtccaaaactgaatcttccaaaatgcaaaaccataccagacagcagagcactgatgaatctagtcaaattaaagcggacggtgatacaactgcacagattccaattaccaccacggtggccccttcactctgggaaaaccaaaacttcaacgtcaaggtagtattcctcctcggacagtctgaatccgaatacgttcaccagagaagtaaatcactgcatccgtcctcgctggatcaaacaacgacgacccaagcccaacaagaggctccaacccgtccagtggatcggagaacccctagtgtaagtttattccctccggaaggtgatgtagatccggctttcaacgtacgggaggcggaattggacgaactgcaggcgcggatcgtgaacgagagtgaagtctacggggatattattcaggagagctttatcgatagttataacaatttgaccttaaagacgatcatgatgctgaagtgggttaccaacaattgtgacggtcgagtcaagtacataatgaaatgtgatgacgatacgttcgtaaatgttccgaatttactgcacgttttacttggggggacggtaccggtctataaggcatctattccattctacgataaaaacacaattgatgtgaagtcggcgaaaaataggttgacggaagtcaagcgtctgctgacgggatttcttttctgtgaagccaaacccattgtcgacaccagcagtaaatggtattctccaaactacatgtacaacaaagagttctacccggattacctctcgggcacggcatacctaatgaatctgaacgcagccaaactgctctatcgcacgtcgctaacgacgccgatcttccatctggaagacgtttatctcacaggaatcgtggctgatcggacaaaacttcgccgctatcatcatcccctgtttttctactccactatcaaagacctctgttccctgcggggtatgatctcgcagcatcagctgcaaccaaacgagttacgcaatgcgtatgatttcattaccaatcaaacgatcgtgtgttcggcaccggatcgaaacttcactatggccaaaatgaaactccaacagcgtaagaaatgtcactgacacggggttaaacgtgtcgcaaccgtcgccgctaccagtaagaagaaacttgccagtggattaatgcgaggctaaaatgagccgattgttgatcgatcttttcctcattttggtgataagatccgcaactggtttgctgatctttatcgccaccgaatgagtctccgtcacaattctttcaggacagttcgctggctgagttacgctagtaaaacaaataagacaattgtaaaataatgcgtaggtagtaaagtttaaaataagcacattcttgttgattcatagaaaagcagtgcagaatgttaatagtgaaacattttactagtattgatcacttgaagagatttagcaaaagtcttaaagtttagcatattaaattgtaaaacaaaatttgcaattgacgtgtcttagaacaaaagcagaaaatctcagatgcgatgatgatgtaatatatactcttcaaaaatataatgaaataatttaattcagctgtgatttgaaaatattttagatagatttacaaaaaaaaatagaaactaaaaactgatgagcacttagtattgaagacgaaagttagtgaatcaaatctaccaatccgattagaagtcaatagactagtaagcatttatttcgcacatcgagtcttagctttttattataggtaaacagtcgtagtcagccgtatatatagaaggcaaattcactcaatcctggatctcggtacaccaataccagcagcttttgtcgatctattctcaattcagttactattagattttagtcaatcaagcacaaccatatttatgttccaatggaattcacaatcctcaaaaattgagatcgatcatagtcgcgcacactgtttgtcatagttagttaatttccctaatagaaaatcgttgtacacattcgtacgccaacaacgcttaagattgctaagtaatagtcgcgtaaaacgtggagcgcttaacttgtaggaatgatacattcttcaaacgtagtcgcggataaatctgaatcaacacgttagtcaacagttgtagctgtgaaaaattaattttaccagtcttactctcgtttagttttgttggatggtttcatttgaaaaatacatttgtaatgtctgtgcaactacacaaaccacaaacatatagcaaaaaaaaacagcaa

SEQ ID NO: 824 - DNA, 1936 bp, Aedes aegypti
tgcgcctattcgtcaacgcagtcaaaacacaataaaaagatgagaatcttcgcgcttttaatcgcgatctacaccgatcacaacacttcggtggaaaacgacacggcagccgtaaggttattatacatagctggggtcgaactttcggtgatttgtttattcggaatttgttttccattggaagaaatttcgatttatggcactgcatacgataaaatcgtatataatcaacacgatgttgtgcggcatcgtcagtagatagtggtgaatccttgagtgaaagtcagtatgaagctgtcggtggtgtttttaattgtgtttgctgcacttgtggtcgatttacaagctcaaacttataacatcagagataatttcttcaagccagatagagatgatgataatgatgatcgagacagcagtaagctccccatccctatcattactgatcaagctgcagccgctatagttcaaggatccaacatgctggcggatgcactcaaggcagcaatagcggaagaggtcttcgataagacgggagtccttaccatagtccggtcgttactcacggagatcaacaacatgctgaataatctattcacaaaggtttctggtgcagtagctattactatcactagatccagggaaccagaaagttccctgtcggacttgatttccgaagtaaaggaggccgctgatgagatccaccgaattatcgacgatttgaggaaatacgtcaaaccttctgaattgtccgatgtcagcaacgccctaaatgacatagtgaaaagagtgttgaatctcgatatcttgaagccaaaatcacgctcaccatataatccattcctctttgatgattttggctttaaccggaacaaggataaggatgcttacaactaccagggcctggatctgcaaacggtgatttccgattggtcaactgctattgagggaatcgcaaaggcagtgcaagttctggcgaaggcaatccaaaaagttatctctaccagatccctgaccatctcagtccagaaatcgatctataaatctttgtccatcagtggatcgttcctgagttcggtctcgacgaaactcaacagtgcattggagagcgcgaacaccaaactcaccatgtacggtcaaatgattctcacgcaagtcaaccaaagctattcgtcaatcacgtccaaccctaacaaatggcatcaccgtctgctcagcaaactgtacgatttcctcgcttcctacagtgactacgttcacagagattacctacacccaacatctgccagtatgaagaaagccgagatcgatattgcttccgagtttatcagagcaacgaggaaatccggactgaagatctcaaaggtagccacttacatcaccgatcgtgccgcagccagtgccaatcctcgagcttcatccacctgctcaatgagccaaatcaccattcttatgggtccaaccaactccctgacccgcctggctcaatgcatatctgtagagtctagtaatatccacggtatttctggtcaagcgcaacaactggtcactgtggcgaaggacaatgcagcgaacgttggcaatcaactgtcggtctgtaacagcggaacggacgaatgttaccgacagttctcccaagtgtttgacggcaagaaagagcgctccaaaaaagatctggaaaccgccgcggaccaggtggagagtatgatgagaggcatcaccgaacggatcacgaattgtttgaaatctgtggcagatgaaatcgaatctacgtgcaggaagtgcgagaaggatttcgatttttgcttgcgattctgaaggcttggcaggatgaacatctcagcttctgtagatcgattactcaaaatatgccagattatttaatttattgagactgagccagtaatttatttaaacaaattgaaatgcaatgcta

SEQ ID NO: 825 - DNA, 342 bp, Aedes aegypti
atggaaccggaccggctgcagaagcgatttcgctccaagcgtcaggcctactacaaatcatcgcgggcgatcgacaccaccatctatccggaaatcctggtcatcgtggactacgacggctaccggttacacggcggcgacaacgtccaggtcaagcggtacttcgtctcgttctggaacggcgtggatctgcgctatcggttgctaaaagggccccggattcgcatcagcatcgccggtatcatcatctcgcggatttgtaacaaactggcacaagtcactagcgatggcatgaaccagtctaacgaacatcgcaatccgcggctaattttgaccagttag

SEQ ID NO: 826 - DNA, 495 bp, Aedes aegypti
gagggtagtataggacatgaacttgtgataaaaccagtgccaaccgacatctcccgggcggaggacgaacctgtcttccgaccaaaacacgctttcgattgctatcagaacaataaatattacacctcgcagccattgcagatcctgacccgaaccgaactaatatcaactcacctttcccttttgttccgctctcgcaccccgaatccattggaaaacccccaaaccaaaacagcattcatggaaccggaccggctgcagaagcgatttcgctccaagcgtcaggcctactacaaatcatcgcgggcgatcgacaccaccatctatccggaaatcctggtcatcgtggactacgacggctaccggttacacggcggcgacaacgtccaggtcaagcggtacttcgtctcgttctggaacggcgtggatctgcgctatcggttgctaaaagggccccggattcgcatcagcatcgccggtatcatcatctcgcgg

SEQ ID NO: 827 - DNA, 699 bp, Aedes aegypti
atgagcaccgcccagctgcaggaggtgttccacgtggaccacccggacgccgtcccgcactacgagctgatccagctgatgcaccacaccaaccagccttcgtttcactaccgccgcaaaagaagcatagagacagcgcccagttcaaagggcggaagtgtcagcaacagtctactccccggtggcggtaaccaccacgtgaagaaagatttgagcaaagtgaagttcagtgagaaagtcagtgagagccaagttccggccaagaagagcaccgccgcgaaagaagtttttactaccacaacgatgacgacaaaagcagtcgagcaggaaccgatcctgccggaaatgcaacctcaacaagagagcgaacaacgacagccaaacacgagtggtgatgtgaatgagagtgatagtgatagctataggaaaatcagtggtgccagcatacgagacatcgccgagcaccgggtgtctttcagcgctttcggcgaaagcttgaacctaacgctggagaagaccgagggtctgttccgcgatgggccgcactcgttgcgcatgtggaacgtgcgggtcgacccgaatgccacccagggtctcgtgtacgaggagatacatgaagaggttcttgatttgcttgctcatgacattgaaggtcagtctctactaggagctggcagccagctcctggaggtggactaa

SEQ ID NO: 828 - DNA, 453 bp, Aedes aegypti
atgaggattacgtgcagtggggagatgccattattgcatcattatgcagaaggaattggcaccccttttggaacccaaggatcacaagggtttccctttcaacctacacaaacggcaactaaggttcattcaccccacatcaacgccagccagaggaggttagtccccaacaaaactggtccttcgagccggattgctcgttttggtggctcaacggtggacgaacgattcacggaggcgggaacagacgcaactatcgacgccatcggatacctaccaacaaagacgctgtacgccatcacggtcatcaagaggctttgttctgcactaccgtgccgtcaagggaaattggattcgccatcttacagaacgagggtgccattgctggacattgcagcaggttcatcaggtcatcgactcatcttcaatagaataatcggcgcattattctag

SEQ ID NO: 829 - DNA, 862 bp, Aedes aegypti
tttaatctaacatttaaatccgtaatctactgagcacacattcgtcttttgaacaaataatgaaaaagtctgccatctatttaaattataccttagcaaagtaagaaaaggaagagagagtgcactccttcataagagaagcatatttttcgcgggattacgaaaaatagagctttcacatacacattattcacaaatgtaagagaatgacacacgcgcggtatattacgacttctaccactacatctatgacacacaagcgcatcacggtggatgatgaggacagacgatacaagaatttcatgaatgccatcaaacgaaagcgattacaacacctaaaggagcaactgcagcagcaggaaattgtcagcaatcagcagtagtaattagcagtagtttagagtagcagatcccccgaaaccaatagaattctgtctttcttctgtaccataaaaaagaaacataaattggcaaccatggataagtaggcagcgcagagcaccatcttcttagatcgcggaaggccacacaggagactgacccgagttcgaaaccatctgaaactgcttggatttttgtttttcaaagcagtctgccaacccaaagtccatccgatatccacccgtagaaatataaaaaactgctagttttcttgttttgtattttcttcttctatgaagaaagtgacagcaaatcatttgtaaactatcgagtcacaagtcacacttcaacaactactgttcaaacgcgcaaaatacaatccacacgaaatgttaaattatacagaaagcagaatctatcttcaaaatacaattgtgatataaaattgtgcaaataggcgaaagaaactatttacttctac

SEQ ID NO: 830 - DNA, 1689 bp, Aedes aegypti
atggaaactgaatcggtaaagtcggagccgagcagtaaaacaacaagacgttcgagaggacataccggaggtaacaatagcagcacactgggatcacacagggaccggacgagacattctcataggaataaccattcacggaacaaacgaccagatatggcaccgtttcagacaagtgttaatattggagatgacactcgcgatggtcaagaagtgatagaggtacaaattttgccccaggatgaaacttggggagaaaatacaacggcaatcaccgggaacacatccgagcaaagtatatctatggaagatgtcagctactggcagatgtccgatgatactggcataggatttgcttgtcagcgatatttagagcgtgcactatcagtgttgctgtgtgctgtagcattcctgagcccgctagtgatggcagttttaccaaagctgggatttttcccttcagcatttgacaacctcgacctgacacagaacgacaggttacaactactggcatgcaacgcagaatgcaaaggaatgcttgtatcgttagcagcaagaatgcttctgctcgctataggtctgtgggcggttttcgtacgaaaacctgttgccatcatgcccaggatattcttcttccgagcatccgttttgttgctggtgctgattaccacattcgcttactggttattttacatagttcaagtcaccgagggcaccaaggcgatcgtatccggttcggaggctgttgattataaaaccttggtgtcgtacgctactaatttcaccgacacacttctatttgtgcattatgtagcagttattttattggagattcggcatctgcagccaatatactacattaaagtgattcgaagtcctgacggtgaatcccacagctacagtataggccagctcagtatacaacgaactgcagtttgggtacttcaacgttactacacagagttcagtgtgtacaatccatatctagagcgcttaccagtttccaaatctcagcgtaaggcgctgtcgtcgttcaagtattacgatgtagatggtgccaatcctgctcaacagcaaagtcaatctcgagctgtgttggcggcccatgcccgtagacgtgactcttcgcacaatgaacgtttttacgaagaacatgagtacgaccgacgtgtcaagaaacggagagctcgtttggttacggcagctgaagaagcattcacgcatataaaacgactccagaatgaccaaccccaacctcaagctccagtaattccactagatcctcaagaagctgctcaagccatattcccatccatggcccgagccctgcaaaaataccttagagtaacacgtcagcaacctcgtcataccatcgaatcaatactgaagcacttggcacattgcctgaagaatgacatgtctccaagggccttcttggagccatatctcatcgaagcaccagtgcttcaaaacgacaaagaacgccgaacaaatcacaattgggctctgatttgcgatgaacttttatcacgacccatcgcggatgggtgcacattccaactgattcagaacgacgtctcgttaaccgtatcgatcaacaaaattcctcatttcaccattagcgaagaggttgtcgatccaaagtctaacaaatttgtccttaagctcaactcggaaaccagtgtgtga

SEQ ID NO: 831 - DNA, 177 bp, Aedes aegypti
atgcacctctggtgtataccgaaacatccctctagcaacctgataatcagcgggtatccgtttggatcccgctcggtcaatctcagtaaaagtggtatacaattaaataattataagagtagcgcagtgaacctaatcggcgatgataaagcgtttcttgagtgtatgtgtgtgtaa

SEQ ID NO: 832 - DNA, 1817 bp, Aedes aegypti
gacagaccagaagcaacacgataagatgaacaaacgaaactatttcaagtgcagtaaaatgcaatgataaagcgattccagttcagtgtactgatgcagttaccctccacatcagtttatttccaacgttccttgcacgcggtcccattgaggcagaaatgttccaccagtttgactcaaccaccaaatcgtggatttcacgtcatcctgcaccggtgctcgatccggaggccaaccttggtcgtttgattctaagcatcctggatcgcaaccctgagaaggtcctccaaatcgatgccgatacgggccgggaaatgaccgccgcggagatgcgcctccgggcgatacgggtagcgcagaatctgaccgcactcggattccgcaaaggtgacatggcagcgctgatttgctccaacagtgaaaatctggcaccactggtgttggggttgtggatggtgggcttaccattcataagtctgccagtggggttcaacggcgacgacttgggccatctgatgggactggttcaacccaaggtggtgttctgtgacgatgcggtgtacaaaacggcactcgaaggtgccgggaaggcactgaagatgaaacccgtggtgtttgccgttgagagcgagatggagagcattaggaaggtggatgagttgctggagagcaccggaaaagaggaacagtttgaacccgagtaccaaggcgatatgcgcgagatgataggaatcattctttgcacttctggaaccactggtcgaccgaagggtgtagccgtatcgcaagctcacatcgctgtagtcctcgggcggccagtgaagggcaacgactccgacctggtgttcaacttcagtccactgtattggggaacggggttgtttgcgttgctgaactcgctttcaaccggaacgactcgaatagtgactcgaagcggattcaacgaagacgtgttctatgatgttctagagcggtaccgtccaacgcatttcttcacgccgccgtcacacgctattcttctgttgaatcacccacgtgtcgagcaagcggacttcagttgcttgaagagctggagtttgagtggaagcatcgcttcgccgcagttacggaagcgtatcgaagagaagctcagcaacggtaaaacagtcaataactacgcttcgtcggagattggattgattgcaatggatgctatacggaagagggaagggagcgtagggctgttgatgctgcatctgaatgcgaaggttgttgatgaaaacgatgcggcagtgggtcctcgagagcaaggagagctattactgaaaacttcacttccatttttgggctattacaacgacgaagaagcgaatcgtgagctcatgaccgaagatggatggattcgaaccggcgacatcggctacttggatgaggaagggtttgtctatctggttgaccggaagaaggatgtcatcaagtatcgaggctaccagatgtcgtcgatcgatttggaagtgatcgtggagaagattgagggcgtccagcaggtgtgcgtggtggggattccggagatggacggcacatccgatttggctgccgcggtgattgtgcgacggccaggaagtgaattgacggaggaacaggttgtgaagcaagtggaggaaaaagtgtccgatcacaagcgattgcgaggtggagttttcttctggaaggagcttcctttgtcttccacggggaaggtgttgaggagaagagtcaaagaaatgttgatggaagcaaacgttgtaaattaaaaagcaaatatataatacctctgtcgagttaaagaagatgataaa

SEQ ID NO: 833 - DNA, 2471 bp, Aedes aegypti
cgacagggcagaggcctactgcgcttgcatatttttccgtgtttgtcttattttggggatgggaaaaagaatttcgcacaatagtttggccttctgcaacgcgttttgcctcagactattgttttagagctcccaaaaaaggatcaatggcttccggaataagcaatagagggaaaatattgactttccattgtcccgttgtttggtcggctgatcgttcataagacgaagacgatgttagattagattgcgtagcattaatcttcgatcaatgtctggaaaagccgaaaatagaaaatcgaacgaatggttttcatttagcataaatttcattatgcttattcgggatgagaattttatattgtcacaatcgcccccgtaggaaactcccattgtgataagcagaagccgaaacgaaaactcgcccgctgttggtttgaaagcgatagttaaaggttgggaatcgataagactgaaccatcataacgcgaaccgaggaatcgaagggaaaagcacacacattgcagaaagtgggcagcaggaggtgcaaacagaaccaactccttatcgtacgtgcattcgtgttttcagggcccgttcagactccgaaaagccttcaaaatagatagatcacaaatgcccagaggcaaacgccggtctgcagcggagatgggacccagcgaagacgaccgacactcgtccaagagacagaggaacgcctaccaaaccagtcagagctctcggcgatacaataaagtagacgatgcattcagtcaaaagcgatgtctgacctggttccacgagtacacaacgccagacgatccgaatacgttaggtccggagggtatggaaaagttctgcgaagatattggcgttgaaccggaaaacgttgcgatgctggtgctggcgtacaaaatgggtgcccgccagatgggcttcttcacacagagcgagtggctgaaagggctgacggatctgcagtgcgatacggccggcaaagtacagtgcaagctcgactacctgcgcaatctactgaacgatccgaacgcgttcaaaaccatctacagatacgcgtacgatttcgctagggataaagatcagcgtagtatggacatcgagacggcgaaagcgatgctgcagttactgctcggcaagcactggcccctctatgcacaattcgctcagtttctcgagcagtccaagtacaaagtgatcaacaaggatcagtggtgtaatatcctcgagttttcccgtactatttcaaatgatctaaccaactacgacgtggacggagcatggcccgtgatgttggacgaattcgtcgagtggttaagactgctgcgatcacagtcgacgattagctgaggaatgtattattaatgcggagggcacagacactttcggtggccatctgcagctccacacacacacataacacaaacaatccagcaacattgcacaggcaacacaataaatacggcttcgtcacccgcatgcagccgccaaatcagcaacaatgcaacataattggatgcttttgaattcacaggccagtcgcgatcatccacacacatccccctcccttcccccaaaatagtcccaataatcgataaaacgtctccaactaatccaccacaaactggtcgcaaaatgacgaagcactcaaacatgggatgaaacaagacaacccacgcaaattctcttagtttaatttgtatcttcgtttctttatttctcaaagaaaataataataatgaaacgtgaaatgtacgagttcagctcttttaatgtgtttcccactttactattttattcggtcatcaaggctttcgtttatccccgtttcttgggtttaaaccattatcttttaatttagtaaaccaaataaacaccacaaaatcataacaaataagaagtgaagagcggaggagacggaatgagcagctacagtaggttcaaccggaaaacagaaatattcagaagaatatatcacgtactaaaactacctaaaaactatactttggaaaacataaaaatacttatcacaaaaaatacaaaaacaaaaagtaacacgataaatgcagcatacataaataataatcatttaggactctccctttacggctaatacaaaacaaaagaatacatgttactctggataataattcacaaaaagatagcaacacaaacgaaatttaaaaaaggtagaaaagaacactagtatagagcgaacacaacaacaaataaaacgggaaccgaacaagctgagaacctatggcgaaagtttcaaaagtgacggcgactttaagtgatcagggccactgtattttaaacatcattcatgaaattcggcacgacaacaaaagtgagacgggaaacatctctgtaaggttagaaaaaaaaaatacggagaacaaaatttggtaaaataaagtcgaataaactatgctaggattatttttcacatgaac

SEQ ID NO: 834 - DNA, 2607 bp, Aedes aegypti
cgattgtgttgtctaactggaatcgggcgtttgtctaccgcgctggcggtcttagtgcaacgtcgccgtaaactgctaagctacgtagaatgaattaatacgctgatttcgcaataatcctatgcagtgatcgtgtgttgtttacaggccaccgtgaaagtgaagacaggttcaagtcgacaaacaatacgctgctttgctgttttgacggccatcgaggcgaacgatcatacggctgccagaagtttctaccgatgtgtagtgtttggttgtttactgcgaagagttgagaagttttttggttttgttttgctgtctgctggaacgaattcatatcgtttttcatcccggcaacctcagcaagccacgctccattcgacgaacaaaccagtgcctactgtttttcgatcgaatgaatggatttcgccgacatgcttggaaccaatcatagcagtggcgtcggctattatcaacgcaatattgccaaaatcgtcatcagtggaataccgcagcacgccaaattcgatgacatcgagccactgctaaagccgtacggcaaggtcgaacactgcgacgccgtcaccagcaaggacccgaccacgcaaaccgtccatatcacgttcgagaatcacgatcaagcacagagagcggtcgcgggtctgaacgggatcgaattcgagggatcaaacctgctggtggagctgttcgataacaaagctaaccgccgaggcgcccgcagccgtccacagtacgccggcatgccaggaggcggcggcccgggacgtcagaccgacttcccgctgcggttgctggtggccagcgaaatggtcggcgccatcatcggtcgccagggcagcacgatacgacagatcacccagaacagtcgggcccgcgtcgacgtccaccggaaggataatgtgggctccctcgagaaggccatcaccatctacggcaatccggaaaattgtaccagcgcatgcaagagaatactggaagttatgcagcaggaggccaacaacacaaacaaaggagaaatttgcctgaagattctcgcccacaataacctgatcggtcgcatcatcggaaagagcgggaacacaatcaagcggataatgcaggacaccgacacaaagatcactgtcagttcgataaacgacatcaacagcttcaacctggagcgcatcatcaccgttaagggttcgatcgacaacatgtcccggggcgaaagtcagatcagcgccaaactgcgccagagctacgaaaacgacctccaggcgctggccccgcagagcataatgttccctgggttgcacccaatggcaatgatgtctacggcgggcaacgggatgggcttcaccggtcgtaccggaatgtacccgggaaccagctatccaatgtaccagccgccgacagtgcctggcgccccgcccggatccagcgacgtccaggaaaccacctacctgtatattccaaataatgccgtcggtgctatcatcggaaccaaaggatcgcatattcgtaatattataagattttccggtgcttcggtaaagatcgctccgctggaggcggacaaacccctagagcagcaaaccgagcgtaaagttaccatcgtcggcacgccggaagctcagtggaaggcccagtatctgatcttcgagaagatgcgggaggagggcttcgtctccggcacggacgatgtgagattaacggtggaaatcctggtcccgagtgcacaggttggacgtatcattggcaagggtggccagaacgtacgggaattgcagcgagtaaccggtagcataatcaaactgcccgaacacactaccaacacgccagtggacgaagaaaccacggtacacatcatcggtccattcttcagtgttcagtccgcccaacgacgcatccgaacgatgatgctggcaacgaaccccccaccggccaccaaccggcagaaagcccagaaggccaaggagcaatcgtcgacctcgtcaacgcccgctgcctccgcacagccgccgtcgtctagtacaagcgtataatcaaaatctgcaatcgtcgctgtcatagtcgctgatggccgtcagctgcaattatcagtgctgccatcgtcgtcgccaccactaccaccatcaacaacaacaacaacactaacacaacagcttctatcgcaccaacaacaacaactactactaccactatcaatcgttccgcacgagcagcaaaaacagcaggtatccctatcagtaacagcaacggcaaggtcggacaaaaatcacatcaaatccgaatctggaaggtaggaaatccctgcaaccagccgcgatcgcgaaaacaaacccaaaaaaaaaacagtctgctatgttccggattagaatatcaaattttggttccagcacaggaacgaagccctctcggatccgatcggcgccaaaacaaaaccagaaattgtgtacaccagaatcagtctctatcgtgaaacatctctcgagctaagcaaaaaaaagtttatttttcgtatttaggcacaaaaacacttcacttttgacattcccatcaaagtttattcgccagcaaaagcagcaccataaaaggaaatgcatttac

SEQ ID NO: 835 - DNA, 606 bp, Aedes aegypti
atggactggaaaaacgattattggtatggctcactagatgagttgggactcttcaactactggaagtctctgaaggataagtctgaaggtttgatgttcacagaacctcttcagcaatttcaaagtattactctggagttaacgattggagaggatggctcttgcacacctattgtgcaacaaaatgctgtagaagatgaaataaacgatccacaacctgttcaacccaatgacgacatgagccaagatgaagaagctgcatcaaatgatccgtttgaaggaattttcatttggccaaaggtcaacgagcgaaatggaaatgacaaacagaggagaaaggaacatgtaccatcagtcgcaaccagcaatagatggcgaaaatggtatgataaaaaggacgaagaacgaaaacaagaagaggaagcaaaagtagcaaggattgaaaagcggaaactggctcgaattcagaaggaggaagaacaaagcatcagaaagaagaaaagagatgagaaaaagttacagaaggaaaaacaacagcaagaaaaggaaaacaaccctcctcggcagaagaagaaaaagaggacattgatgcctaaatcgggctaa

SEQ ID NO: 836 - DNA, 1412 bp, Aedes aegypti
tgacattttgggatttgttttggttacgttgttcgtaatagttcatgctactttagcttgatgattttttcatgcaaatcagaataattggaattattccagtagttatttaattaaattactttttgcgaataattttcaaactatccataaacaaatatatttaatttagtgtttgaagcatgcgcaaacggcagatcgatactttgaaaatattcaatttgaatgttcaacaagtgaaggaaaatgaagaatatctagtcaatttcgagtccggtggacgagagctggtcatcaatataatcctgggagcggactttccaaacgtgaaaccgaagctgatagtgagccccattctgaatcacccttgggtaaacgccagcacgggtgaaatcgaaaatgctcccggaattctgaattacaccatacattccgacctggggcgagtcgttcaagcaatcagtcgggaatttgaaaggcatcctccccagctattgaatgagacttccggaaccccacagcattgccgtaatggcaacagtcaggagcccaaggcaccggatcgtcgaattgtggcctctccggtagcagtagagcaagacgtctttggattacaggcgctcagtttagaagacctaaaccgattgaaggtcgatgaggattacctggaaaatttcatcgagaagataggctttgtccagaatcaaagcaatgaaatgaacaatttgctggaccaaattgagcaaactgcaacggaaaaccttgccaagaaacagcacatcgaaggacagaaggccaaactggacgaaatgtacgaggaattcaaagagctcggcgaaagatacgaagctctgaatcaaaagtatcagaagaaatcggaagatttctccccacagcacatcaaagagcttctgcagattgccgtatctgcggcggacactcgaagcgacgaggaggcacacaaatttcttgccggcgacagtgatgtgggaacgttccttggtaattttattgaatcccgaaagagctacacaatgcgaaaggccaaagaggaccgattggtgcaacaactgaccgcactggagcgggctgcattttgatgggggcttcgttttacctaccttcgaaaggatatggtcgatgtgatacttttatatgttcgtatataaatcaattttttttttgttgtaaaaaataaaggacttaattcatgaaaagctgtgtgattaaaagaaaagttaatttatatcagggctgaacaataaaaattcatagaaagctagttgttgtgatgtgctttacaaggggaaacttatcacgacacacactctttgtttctaaccaaaatggttactaaactcactattttcctctacttgcagtgcatgctttttcttcttctttctggcgtt

SEQ ID NO: 837 - DNA, 1967 bp, Aedes aegypti
cgcgtttggtgtcgagagtcgagttgcgtgcgtgttgtgtgtgtgttttctcggttttctcagaggaaaataatttcgctgcgaaatttgttcaacgttttaagttctcgattgattcggttttggattgtgaacccgtagaggattccggcaattgcgtgctccatccaggaattatcattgagagttcctcttgaaaagaaagtggaagtctgaaagagagagagagagaaatggatcaccatagtggaactggcggttggcagaatccggcggaaacgtctctgggcgcaatgagatctcccaaagccaaagaaattccaggtgttccgcttccaggcacttcagctgcggcgctttcggcgaacgcaaaggagttcgttccgactaaactatcctccccgccacagccgcagcagacacatcaatatggccaccaatccaatcgctaccgaggggacaacaacggaatcggtggcggaggcggtggaggtggtgggacctacaatgcgcacccttcacactacccgcctctggacaacggtgccatagtgaacggaaccggtgtcagcgaacggctaaacatcaaccagcatagcaaaccgcagatgggaggacacaacaactatagtgataaaaaagatctacgcagctcctcgcactataaccatcaccagcagcatcagaaccaacactatcctcaacattctcaacaacagcgtctacagcaacaccaccttcaccaccagcagcaatcgcatcatgggctgcatcaaaacgtcggtggtccggcctatccgttctttggatgttcatcaacggcgctgaacaatcatctgcaccatccaatgctcggtggaatggcggcagtagcacaacaggccagcggatccggcgggggaggcatgatgccccagcatgacaataggaacaagaacaacaatggcctgaaggcgcggttacacaatgcgcagaactctccaatgcagtcacatcaccatcaatcgcagcatcaccatcagcagcatcatcaacagcaacatcaccacatgcaccagcagcaacaacatcacgggatgctcggaggacacaacgatttcggagctgacgccgattccgatcagatttcggaaaatgaaaccttcgcgctggactatctaaccgaggtgattgccgagctgtacgacaatcctggcatgttcgatagcattcaacgaaagctcaagggtacctttgccgagttccggaacaatcactttgtgttgagtaacgccgtggagttgatctttgaacagtcaatcaaagagcaaaacttccgctacatgggagcccgcttgtgcaagctgctggacagtttggacggggatccggccggtgtgctgtggcagctgctgagcatgaagatgtcccatcaacagtcggagcttcacggcttcatgaccaaccagcagatcaaggtgcgcggcacgacactcttcctggccgaactgtacatgcagctgagaaaaccgagtgatatgaaccgaaatggcgaaatcgcaatgcggatcatcgaagctgccaaagtcttgctaagtaaagaaggtcccgaaaacatcaaatgcgtctgccaatgcttaaagttgtgcggttacgagctggaacgagatcgccgtgatgagttgttggacatcctgcacacgttagggcagctggaaaactccaccgacaactcgactggacgcttcattcgctcggtgctagatctgcagcagaagtcctggggtcgcaatgaggaaatcggttagtatcgttgaacgaaggctgcttgaagctgatttaacaaggtttttttttataatcagaaaattattttcctcatctttctgtacaaagtgtcaattctatgtttcaaattttgtttctaaacaaaactattaacgatattactagaactcaaattttaccaaatacagtttgatgcaatt

SEQ ID NO: 838 - DNA, 1838 bp, Aedes aegypti
atgttcaacaattacggcaacgtgatgatgaccgaccagttccggaaggtggaacagtactcacccaaatcgtccccgagggcgggcggggcagggggacggtccccggttgtggcccgccaggactcgtccggaacgctcaagacgacgatccagctcgggaagaatccctcgatcgtgcacagtgggcctttctatctgatgaaggaaccaccaggcgaaggcgaactcaccggtgcgaccaacttgatggcccactatggccttgaacattcgtatagtaaatttagcggtaagaaagtaaaggagcaactttcatcgttcctgccgaacctgccgggcgtcatcgacggaccaggacatctcgacaacagttcactcagaagcgtcatcgaaaaaccaccaatcggcggcaaagatctacttcccctcacaagcgtacaattggccggattccgtctgcaccctggacccctcccggaacagtacaagcacctgaagtcggtccccactaggaagcataagaataagcataagaaacacaaatacaaggagggcgttgcgcccctatcggaacagtcggcactggaagcgtccggcctcgatacccacgaaaagaagcacaaaaagcaaaaacgccacgaagacgacaaggagcgaaaaaagcggaaaaaagagaagaagcgcaaaaaacagcgccacagtccggaacatcctggtagcggggctgcctcgatgccaccgcaaacgcaagtcttctaagaattaaaaaaacaaaattttgtataatcaaaaaacagaaaccctggatgtggatagaactgcaacaacacaacaaacaaacaacaaccactaacgtcgcttagtgctagttaataagtatggtaaagattaaattttaagtctaccctttgttttcggtcgaatcgtgtggagttctgggcttttttcataagtgccagacaccagactccccacgggagaaaatgtgaatatccccttcctcttcctttcgctagcgaatggcatacaatactaacagtatattacattatgcaaaaccagaaaacgcaaccttgttcttaaacatcaataggtacacacaagaacacccatccggtagttgtatgtaattctacagagatacagaaagaagcaccgacctcgttttctctgtttttgttaataggtttaatcaaatccaaccgttttgcatacataagtgattccttaccacaacattaatacttattataaatgattgattgatgataagttgaaaagtgtgcaatcgagcatcgattgaaaacatgaaaaatgccaattttcgatagtaggagtgtgtcaaaagaatatcttcaattagaacaaaaaaaacactatttaaatattaagcaacagaagccttgtttttctcattgcagaaaaagaaaacaaaaattcacaaaaaaagaaacataaaaagcccaatatagaggtataacatgtaaggtgaattatacgattaagatcttaacgattttccttggtcaaatcttcccgttttgggaccgcccctttcggtgcggttccgttctaatttcattgtctctgtttttgtacagcagtaaacgatgggttcttggacgttagcaaaagacgggattggacgatcgagtcgaagaactgcgcttgccttttagcagccggtgaggcgattctcacttcagaacgagccattcgctcccacgaagcatggtttattattttagtaaactgtatttatatgccctattgaaatgagttattatttaattttattttgatttagcaatacatttgaagcaagtgaaaatgat

SEQ ID NO: 839 - DNA, 4263 bp, Aedes aegypti
aacaaacgaacaaacacaaacgaaatgaaattccccggtggaaatcagttgctattttgcgagcaggtgggtaccgtgacatcgttcttcgagcagtggaacgactgcgagcgaacggttgtcctctatgctctactgaaacgtgtcccatttgccaatttaaagttcctgcagctatcgatcgattacaaccttgcccagaactacagctcgcaaagcaagctgcagctactggaaacgcatgccaacaatgccaacttcctgaataagctcgtccaacggtatcaaactagcaccagcaccggtgccacaaccacttcctccccgtaccaccaccaccaccagagcagcaaggtctccagcaataacaataataataataataacaacaataataacaaaactaaaccagtcgaatcgaagaaggacattctgaacgacatgttaacatacctgccgctgctaaaaccgggcaacgacgacgtgaagagtgtgtacatgtcgttgataccggccgcggtcgaagacgcctgccagcagaccgtgcccaccgaactggtgcagcacatattgtcctacctgctgatacatccggccgttaacaatgacgatagaagatctctaagctactggctgcgccatctggaggaacacatcgccacctcctacattccgacaacggcagcaactgccaacaataataacaacaacaacaacaaaaacccaacaaagatggtcaacagcaatagcacctatttcatccatcctcctgcttcacaacagcagcaactcgttggtggatccaaccagaatctggcctgcaaaacaagcagtcaacaatcgctacatttcctcgcaacaggcccatggcagcaaattcattcgcaaccggcgcaacatcatcatcatcatagtcacaattctcaccaccacaacaacaacggatgcagcaccaattccggaagctgcaaccaacttccgcaacatcagcaacagtcatcgatttgcatttcgagctcgtcgctgttgtccaagtcacagcagagtctcaaccaagttgccagcagcagttccagctctagttcctgtcttgatagcacttcctcgcagctgctaaagaccaccaacctgctagccaatctggattggtgctcggacgtggtgaaaaagcaggaggatggcggcggtgggagtgggccatccttgatcggtgatggcaatggcaatcccggcagtgccgtccggggcatcggtagcgttgagaacgtttcgatgaaggactttgtaccggtcacattcaattactcaactccgcagggaaacaataaatccatcgtgaatagcagtggtgccagcagtgctggtaccaccaccaatcaagccagcaagcaccatcacctaattgcgtcttctagtcaagcctccggtgtgctgctgggtagcagtgctaatggcagcagtttaaatcttaacggtagcaccggtttaggagctcacacggtggtactctcggatctggactcgagcgacgataatcatctgagctttagtaaaaatggaacggaaatattcgactacgattgtgattacgataacgaagaagaattcaattatttggcccgagcagccgccgctgttgccgcaggaggaacatcgtccaacgctgccaattcttgtaaatctggtgggacgaatgcggctggatccgctgcagttccgccatctgtttcgggatcctgtggaccgaccaataccagcagtggaagcagcaatagcagtagcaacaaaaatcgagtttcgtttgatgctaacattagtgattacctacgagtccctcctattggacttggggaattcgatttggatggtagcggcctgttgaaaaccagaagatctaacagtcttaccacaacggtaagtagtgcatgtgggctttcggttgggcaactgcatcagcagaagcagaacaacgaatgtttatcggcggaaaatctgagcaatctacaactactgcagaacaaaccgaggagtttctcgttaaccatggacagcccacggtcgtcgttaacctccagtggatcagaaactcggctggacgatttcaagcagcaccagttgatgaaaatatatggatctccgaatgttggcatgtctagcatagctcactggctgaagagtttgcggttacacaagtacgtatggttgttctccaatctgacgtatgaacagatgatggaaatgactgaagagtacttggccaatttgggtgttaccaaaggagctagacataagctggtattgtgcattcataagctaaaagaacggtacagtgtactgttacggttagagaaggacatactgaatgctgggggctctagggcccaacttagtccagtatttgatgaacttacgaatatcgtgttgactccgatgaaacctatcggactggatcagaaagaggatattgccgggttgtttgttaaattgttggacttgattgcttcgtttacattgacacggccgctctgtggcccacaagaagaggaatgcatgaatgttttcatttgggtgttggagcgggcgcttcataacgacgcttttgcggcccatactactcagataaaggagtacaagtacaaagcgaataaactgaagatggcttatgctcccaaaagccactacgctaagaataacagcattaacggaaatatgaataagccacgatggtctacaactatcaaacacaaacccaatagtgcagctgatggccaaaaaacgccccaccgcaagagctccctgcagtatttcactccaccaatgcaacaatcgcaatcatcacagcaacaatcgcaacaaactcaacaacaatcccaacagcaaaactcttcctcttctcacacacatcttcaagcaattccacaccaatactacggccatggaggtcataatcctaatgcaggcacgggccacaacaataattacaacaagagttcgtcttatccgaactttgcttcgaacttatccagcagtagtggctctggaagcaacaacaccatcaaacatcacgtacagcatttacagcaaagtcaaagccagcatccgctcccacagcaacagcaatcacaaccaccacagcaatcgcaccatgcccaacagcaacaacaatcgcatgtccctccacatggtaattttatgtaccatcgacattcgttgaacaacatttccgctcatcaacaccagcagcaattcttgcagcaattgcaaaaccaacatcagcaacaacagcagcagcaactgccagtgctgccttcgattttcctaactgcaatgggaggcggtggatgtcctccaacaaacaatggaaaatcccaatcgtcagaaacctcctgtcccaatcccaaaaactcgaccatgccgacgaagtccagtccagtggatctgctgggaagcaaaagccagaacaacagcatcggcgatataaatagtcggctagagtttctttgtttgcagatgaccgaacaggccatcaactagagcaccttgttggacagacaagaaaaactagtgagtagtggtagtaattgttaaataggattgcgttgattaatttaggaatcggtcgcgaaacgatgcatgcctctttctgcggaggcacgtagggatagacgacgatagaaattgtagatttttttttcaattcttgacgctcttcaagtctataagcttaaaactaaaaacaatggaagtaagcaaatcttataagcagataaagggattcctgtattttcaataactctatatataaactactcatctcattctctctttctctgatatacgcgcggaatgaggacgcaaaattaacgcaaaaaggtggaaactcttacgttgttgtagatttcttctcttggagacagaaattgattgttttatctatttgtatctgtttttaacatctaactttctgacgctagcggtctagataaggacgtcaaacaaaacaaaacgaacgatgtgaaaattgtgctgagaagtgtttcaatctacaataatcgataggagagcaaatgagtgctagggaatttttaattcagcaaaagcgggtacatttgaaagtggtagtattctctgttttactatttgtgtagcctttttttctgtcctatgaaattctctatgattttactatttatacaaatcgaaaagcctgttcagacataattttatacaaattgagtaaaataaaacttactggaaactgtg

SEQ ID NO: 840 - DNA, 1001 bp, Aedes aegypti
atgtcgaattttctcgtttcatccatcgttccagcggaaggtgcttttaaaaaactaaaacccgaaccaaacagtggactttcgtcggtgtccggtagcatctcgtcacccggaagtggtatctcgtccctgcctcagcacgccggccacacgcccacgacggcatcctgtccgactccggcccgaaggcggcatcggacaacattcactcaggaacagttagcagaactagaagcggcctttgcaaaatcccactaccccgatatctactgtagagaggaactagcgcgaacaactaaactaaacgaagcaaggatacaggtctggtttcagaaccggcgggccaaatatcgcaagcaagaaaagcaattacagaaagcgctcgccccctcggtgataccgtcctgcaatgggatgatgcgaaacatacaaggctacagcgtgtcccgaggttatcaaccgtatccccatccaaactcaatcaatcgatatccgcaggatctcttccagatgagtggctcttcgtatccaggaatgacgcagccattctcgatgtcgcacagttccggcatgagctcagtaggcgtccgtcaggattcaatgggaatgtccgcggaagacgaatggtacaacaagagtctgtcggccctccggatgaacagctctcaccacccgaacctgtcggccccgatgctgcaataccagacataattaatgtaggatcaagcataacctttcccataaactgttggaacatcaaatctccgacaagcttgaaatccagttggaggaggacgattgctgttcaaacagtttagcttagcagatgtagaagataagagtcagaatcaaatctagtcagcacgcaaaataacaactttccgaagacaaaataactcatcgccgtctgcgatcgaagcaagcattggtggaattcgggattaaatgcaaatcgacgcgtatcgatgggcaacgcaacagcacacaataaatcgttgaaa

SEQ ID NO: 841 - DNA, 2168 bp, Aedes aegypti
gaatgaccgggtgtcggtactccaacgtttgccagtgccgggtcaagacgtgttttcccgtaattatttcgttgttgtcgtcgtcgtcgttgtcgcttttttatatcgacagagacaatcgcgttcgaaccgacagatccggaggggacaattccgagaggaattgattagtcgaatcagaaggatatttatttttcctgagctcggtgaatgaatgccgcagtgattgaattggaattttgaggagcatcagacttcggagtggtagctgtttttttttttcgctgacggtttaccgggcgacccggagaaatggatatcaaggcgaatctcatcgaatggatggaacttttgaatgacatgattcaattcctggatgcaaccgcatcggcagaaatgtgcaactctccgaggaaagccattgcaacgaacggtcgagaacgacacccacaatgtgcctctgctgcttctgctgacgtgctgaaatgtgaggaaaaatgcgactggagtcccctggacccaaaagagagtgccgagtacatgaatattgtcaataaaatagatgaatctcatcgccttacgttgatacacaaatgcaatgcggtgcttggaaagctgcacgagtggctgttggcagccatgctagaatcgtcactacagccactgctgaagaaggaattagatggagcgaaagatgacaaggacgaggaaaactcatatctggagatgggtggtgtgggacataaaaatgatattaatttaactcaaccgacagataagattgactcttgtgaaatttccgaaaaggatgatgctgttggtggtttcctggaagtagactcagctggcaagaacgaagcagaactcaacttggaagaaaattgttatgattttacaaccgatagaagcctgtacgatgattgctcttccgacatgaaattgaataatgtagcgtgcgtaatcccagtggatgaagacgatagcaagtgtccctttagtggtttaccagcagctcatctacgcatcaagcagtcccccaagagtggaactcttttcaggcatgagaaacgactgttttttgatcagacgaagaagttttatgtagggttgttagatcgttggcttctcttgtataataacagtaacgaactcaaaccagctcagtgtattcatgttaaagactttaaattagatctcaatcttaatgaccagttcaacgaaaaacaccaattccatataattactcaaagcgattcgaaggtttgctttctgtcaccaagcttcaaggagatgaatgagtggattgtggcactagagcaaagtattctagtaaaaaccgagaatacggccacaaacagttccaggaaattgccacttcctcctacaccggacgatgaacccgataataactgtctggcaagtaacaaccacgtggatcataccgacagtatctacgaagagccccaacttttacacaaacaacatgaactggtagaacagagccaacaacacggttacgacactccgaagccatccattgtcgatgtttgtcaccacaaccaccaaagtcaacagcactcgaaaacaagtccaactaaaataattaatgacgttctgatttctcccacgacaactcccagagcaaacaagtgtgaaccaattagccatacggtagtgccaactgttgcgacgaactcctcctcaaccccaacgacgcctacttcgacgacgccagtcaaaagttggctctttaatcgtttccataaatcagcctcctctgatggcaacggagcgccgtcctctttggagcattctacgaagcacactcgcaaggcgcactcttccaagaagctctcctttcaacaggagcacatagtaccagatgtgattgcaaaaccgccacccggtagtccggccaaaactactggtaatgccagcaatagtacccgtacggttccttcgacggccggaaaaggaacgaaaataaatatgataattagtcaactggaggccaacggtcaattgagcctgctgtcgaaaagtttaaacgacccgaccaagcggaacacgttgtgcgtggacgactagcctaggttaaatatgtgtatatgattgtacagaattttgaatgagtgtgattttccggctaataaatccaacaatggtgc

SEQ ID NO: 842 - DNA, 1944 bp, Aedes aegypti
atgggactgataggaaggcggagatcatcgttcttgaagattatcgcgttgttggctgtggtgtggtttatggtggtgtttgtgctgtactcggacgatggcagcggaggaagcaatagtagagtaggtggtcccagcggaggaggtgaaagtgcatttgaggcccccagaaggttacctttacaaggtattcgagaaaagttcaaccagttcattatcgatgcccgagaggatgccaacaaggacgacttgggtcaggatggagtggatttagatgtggataataatattgaacgagatggagatgtaaagtacaagacggtggaagctaagcgaaaaattccacccaaaagtaggaaacgaaacgagaacgcaccagaattcgaaggagtgattgcaccacctcacgaggacagcccggattcgccgggtgccatgggtaaaccagtcgtactgccaaaggacatgtctccggagatgaagaaagccgtcgatgacggttggtccaagaatgcgttcaaccagtatgcagctgatctgatctcaattcggcgaagccttccagatccacgggatccctggtgcaaggaaccgggacgctacgggaccgatcttccggccacatctgtgatcatctgcttccacaatgaggcctggtcggtactgctgcgaaccgttcactcggttctcgatcgctcgcccgaacatctagtcaaagaggtgatcctggtcgatgacttctccgatatgccacatacacaaaaacaactggaagactactttgaggcgtacccgagggtaaagatcattcgggcacccaagcgagagggactgattcgagcacggttgctaggcgcccgctacgccaccgctccggttcttacctacttggattcgcattgcgagtgtactactggatggctggaaccgttgttggatcgcattgcgcgaaactccacgaccgttgtctgtccggttatcgatgtcatcgatgacaacacgatggagtaccattatcgagactcgggtggtgtcaatgtaggcggtttcgattggaatctgcagttcaattggcatgctgtgccggatcgagagaagaaaaggcacaagagcacagccgaacccgtgttctctcctacgatggccggtgggttgttctcgattgataaggagttcttcgaacggctcggaacgtacgattccgggttcgacatctggggtggtgagaatttggagctttcgttcaaaacgtggatgtgcggtggtacgctggaaatcgtaccgtgctcgcacgtgggtcacatcttccgaaagcgttcgccttacaagtggcgaacgggagtcaatgtgatcaagcgtaactctgtgcgattggccgaggtgtggttggacgaatacgccaagtattactaccagcggatcggcaacgataagggagactacggagacgtgtccgagcggaaacagcttcgcgagaacttgggctgcaaacccttccggtggtatctggataacatcttcccggagctgttcattcctggcgaggcggttgcttcgggagaggtaagaaacatgggatacggaaatcgtacgtgtttggatgctcctggaggcaaaaagaacctgcggaagccggtgggactctacccgtgccacaatcaaggcggaaatcaatactggatgctgagcaaaacgggtgaaatccgtcgagacgaagcctgcttggattacgcaggacaggacgtgatactttatccctgccacggctccaagggcaaccagtattggaactactcgccggattcgcacctgctacggcacggatcttcggacaaatgtctggccatcaacgagagcaagcagaaactcatcatggccgactgcgattctacggtcgacgcgcaaaaatggcagttccagaactacgatcgcagtaagctgtga

SEQ ID NO: 843 - DNA, 3747 bp, Aedes aegypti
atgcaggcttcgtcctttgtcagattattagtttttgatttctaattcttaatctgtagtataaaatcctacagttgacaactaataattgtatttaaaattcatgacattttattttaccatcaaacttccatgccaaatatagtcaactaatttatgattttgcctttaccgtataagtcgactgtcatggccgcccaatcgctccgtcgaattgagtgcccgcaacgcaaactattgcgtttcgcgcaagtcaaaatactatagtgaccatactgccatcgcttctggacgacggtcggtttggccaagagttgattaccagtagtagcagcaggaggataaagagagagaaaacaaaacaatcaagtgaagtctcacaatttgtacagtccctttcggagagaggttcgttgtctccgttcgtttttttttttcagagcttgtccaaagactgaggcacagaaatttccacttcgtcttgcgctgaatcttgtgtgttgctgtttgggctaaaagtgctttgttgcttttgccgaaattgctcaaattttgccgaccgttggctgtgctttgtgggttgctgcgatcgacactaggcttgttgttgcggatgattggttgtcgaaattgcttcagatcaaatcattcagttcgatcgtccaagtgaaaggcagagaaaagaaaattttccttcgctgcagctcacaaaagaatagaaaagaagcaagcaagacaaggaaagtctcgatcgaagcgcaagaaagagaaaagatcacgatctttcggtcaaagtggacagtgtgtagagcgaaagaaaaaaaaaagaaacaaggcagtgtttgtgtgtgctggtacttggtgcagaaggaagaagaagatttcattttgacattttgatttatcttttgcttctctcgcatgttgtgagacatttgctgcgctgcttgaaaagcagtttttatgttggttttggagtttatcgtggcgagttctggtttgattagttgctgaaaagtgaaactagtttgtggtttcgccggtggaagtgttagaaatcaaggttcttactacagttggctgctacggtaaccgaaaacgactcggctactgcgtgacagctcggcacgtacaacacttctatgagcagtggtgaccgcgggaggcggggagtatctctttttctggcaactcggtaccccaaaggcagcaacactgaagaagttagtgcaaacacgtctcaatatgatccgagatccgggtgccggtcctcacgaaagtccagaaccgcaaccgtcgatcaaatatgaacggattgtatatgacacgcaccgaccgcaaatgcctgtggcagtacatccggtcactccaatggaactggatccggaaaccccgctggacatgaccgtgcgccggaagaactcgtcggatcgacagcccgaggtgaacaccaccggatcgcccgcggcagctgaccaacagcacagctccaacgctggcggcggaaatggcggtgatgcgccaatcaatctaaacacacgtcccagtgtgataacgaaagcgcctccgccgccaatcaagaagcgcatcagcagtatgcatagcaatggtgaaatagtgataaaaagcgctgtgggtgataatctttctccggtcaactgtgacgttttcatcgaggaacacttccggagatcgctaggtaatacttatgcttccatctatggaaacaacaataataatcagcagaaaagcagtggcagtgataccagaaacagtagtactagcagcagtagcagtattagcagtagttcaagcaatagtagcagcaacagtgtcggcttaagcactaacagtagctccagtggaatcagcagtgttgccagtatggttcccatcggtaccagcagcagtgccggcagtctcattggaaacagcgttaacttcaacgttaacagccaccttgtaagcgtaagtcctattgttagacacaataacgtaatcccaccggcagttgagatctcaccgttgcttaaggtaaaagccgaaccggggttagttcagccactcgttcgaccagagcttaaggtcaaagctgaactaggcaccgtgcagcacgttaggcccgactctgaggaagaggtcgacgatcattttgctaaggctcttggaaatgacacatggaaaatgatacaagagaagaagaggaacctttgagcaatggaaaacccagctttctttagactcatacaatgttggttggtaatatatttaggcaatattaaggttcactctaagaaacccggtgtggaagcctgaaaagtaatatgcaacaacaacaacaatcgtgcgctcttttttattagtgaaagtatcagattaacgttagaatgtacacagtaaaaaaaaaactacaagcaacattggtggtgcctcgaaaactcgccgagattacacacagagagagtccaagactagacttttttgcgagacacgcgtgcgttccgtcgtgtccggtcggagagagcggtcaattgttaacacatttataccatttttaagagaatcaaaacaaccactcgtactatatttactaatgctgatgtctgtgttaggaacgcttctctttttattattatcattttttttttaatataaatagtcacttgtttaaaacgagcgcatttactaattccttgttgtttgttgtaaatgatattttttgttcctgatataggtgttttccgatcctttcgtttagtgaattccttcctttttagatggttggtggttcttgtagtgggaagagagatcaaataagggctttctttagttgacaatcagttgaaaatttacacctcttcattaaggagatagaagtatcaatcatttcgacagtacataatccagaaaatctcagtcggaatgatttttagtggtttgattagagcatgaataaacctaaaggcaattactacttccagagccatgcacgaccgcattttcgtagccaagtgcaggttcaatcggctttaagaagacgagaagctacatcgaatttgaatgtaactgatcacgaaaccgagctaaacagtagatttacagaaatctactgtccatagagatgtttgatgtagaactattatagaaacattgacatttggatctacttcatcggtgaatcagaataaaactggagggcgtcgttgtgaagagtcctgttgtcgttatcgatggtcaagaatcttgtaagaatctctcgaacgacccaatcacttgtttggaatagcttctggagctatatccgctctcttaatataaggtggcagctttccaaggttccaagctgtgcctcaacctgcgaaatcttcctcgttatcttcaaggccagcagagcaatcgagagctttcaacaggcttgagaacccagaattgaataatttctgctctcatctcatgtaccgaatgtagagagatcttcggacatcagtagccacaacttgaaggacttgccatcgattcttgatacgatgctcagcctggagtccacattgaaataatgctaagaacacaatacgatttatcaagggaattcttctagcagagggttatctcgaaaaatttctctacgcatacctccatggagtcgtagaagagatgtttgcaagtacctatctgccagagtattttggaaattcctctaataatttaaatcaagatttctagaaaaatgtttcaaatttcttacaa

SEQ ID NO: 844 - DNA, 303 bp, Aedes aegypti
atggaaatcggtttgctggtgtggaacggaaatggtgccaacgggaaggacaacatccagaagtacttccaggaactgccccgcttcgaacacattatgaacaccctggtcgctcagccgatcattggcgacgctgtgtcctcgcagctgacgttcatcatcaaggtttcgagaacggtcatctaccaggactattctaccaaacccttccagaagacattcacggttacagcccagggcgacaagtggaagattgcgagtgattgcagcgctgcttccggttgctggatgctatctttttag

SEQ ID NO: 845 - DNA, 2486 bp, Aedes aegypti
atgacagctaccaaagaatatctagcggagagtgaactccagaagcccaccgggcgcttcggcacgcggcactatgtcgtgttcatgctgttcctcggaatggccaacgcctacgtcatgcgaaccaacatgtcggtggccatcgtggccatggtgaaccaaaccgcgatcgagcacgaagccgaagtgttcgacgacgagtgtcccgacacggactacggcgagccggaagatccagcggaccgtaaggatggcgaattcctgtggagtaccagcttacaggggtacattctgtcgtcgttcttctacggatacgtgatcacgcagattccgttcggcttgttggccaagcggtacggcgccatgaagttcctcgggtggggaatgttgatcaactcggtgttcgcgttcttggtcccgatcgccgctcgccaaggcggtgctccgtggttgattgtcattcggtttatccaaggtctgggcgagggtcccattgtaccgtgcacgcacgccatgctggccaaatggatcccgcccaatgagcgatcgcgagtcggatcgattgtgtactcaggtgcccagttcggaacggtcatttcgatgccgctgtccggcttgctagccgatcacgggttcgacggtggttggccgtcgattttctacgtgttcggtatcatcggtacggtgtggtccgttgcattcctgtggacctgccacgaggacccgattacgcatccgacgatcaacgaggacgaacgcaaatacatccagcagtcgctgtggggcaaggccggcgtaaacattcctcccattccgtggaagtccatctcgcgatcgttgccgttctacgcgatcctgttggcgcatctgggtcagaactacggctacgaaacgctgatgaccgagctgcccacgtacatgaagcaggttctgcgattctcgatcaaggcgaacggaaccctctcggccctgccctacctggccatgtggatcttctcgatcggagtcggctgggtggccgattggatgctgacctcgggtcgcttcacgcacaccctcacccgcaagatctcgaacagcatcggtcagtatgggccggcgattgcgctcatcatcgcttcctacaccggctgtaaccgggcgctgacggtggccattctgaccgtcggtgtcggcttcaacggtggcatctacgccggtttcaaaatcaaccatctggacctgacgccccggtatgcaggtatcctgatggccttcaccaactgttccgctaatctagctggtctattagctccgattgcagctggtaacatcatcgaaggcaagcccaccattgctcagtggcgaatcgtgttcgtgattgcagcgtgcgtgtacatcttcaccgcgacgttctacaacatcttcgcgtccggcacgcggcaaccgtgggacaatccggataacgacgaacctcaaaagcccgtctcaatcgaagctccggcctacgagaacggtcacagtaatattgccaacggcacgacgacgacgaatggcacgaatggcacgacgacgacgtaccgagcgaataacgcagccgaacagaggcagtaaccttccttacggaacgtcccattgtacgttccgctctgattctaggctgttgtaggataggaattccctcggtttaagaaagacactaggcaataacgttttcgatacagtaactcactcctagaagaaaaagaagaagtaaaaactcacgatcacgattactcctgcctatccaccactatcacccactatttcaccttcttactatccttattcgatgctttactctaaattaacccctaaattaggttactctgttttgatattcttgtacatttacttgttatcataattagcgagtgattttctagataaggtcattaacacgattacccggttttgattgattgttgagtgatgatgggtctgcctggagcagtgactgggccgaaccgagcagaagaaaagacttgtactaggaaaatattcgaagaagaagaagaagaagccaactgccctccatttccggagggcggacacgtttttagaaagcacgtcagatgttttaaatctttgaaaaagaattagattacatagatcgtcgttgaccattcaattccacgcagtgccacgtagcgaaagaaggttgtgccatgtcccccaaaaagcatggaatcgaaaactggtgatttattttttgtcgttataacacaaaacacaactagcaaagcatatacaatttactgtatagtcaaatatattattagagaggaaaaaatgaaagcgaaacaaaacatcatatatttttctactttgtacatatttaagcgaatgtcagcgagcgcaatccaacatccgtcattcgttctcttttcgagatgataataaaaacgataataatcaaacaaatactggtcgagatacacctcgtgaagccagctttgagaaacaaa

SEQ ID NO: 846 - DNA, 1901 bp, Aedes aegypti
ttcacgtgttttcattcggtttatcgcaaagttcttcgatttattttatcgttcgttagtttgaaaagcgttaaaaatgagtgagtttattgaaaaacgtcgcgagttatccatccaggagtatgagttcatgaagcacctgaaactcctcacggacgacgaaattcatggaataaaaatgaagcgctttcagcacgagcacaaagtggaacgcagagccaaggagctgccggatttcatcaactacatcgtttacgagaacaatgtgctggaactgttggccgaacggcgcaagaagctccgggttttcagcggaaggcacaacctggaaagttgcatcttcaaccggatcagaacactgtataagagagctatggatcggttcccggccgagtatcgtctgtggacccactatctgaggcactgcgagaagcacaagctggaaacggagggatcccggacgttggacaaaatgctgaactaccatggagataagccgaaggcgtggattaccgcggcaaactgggagtacaaacagatgaacagtatggacagggcaaagcattttatgttccggggtctgcagcggcatccggaatgtagagagctctacttgaacttcatccagctgcaattgcaggaggttgacaaaattttggaatcgacaggggaggaagatctcgcaacgctgatggaaaaagacgactctccgctgaagcgaaccctggagtgcctgacgcttgtgtatgaccactataaggccaaggaccaggatctggaatttttcgttgaggttttggacagcttgaagcaaaacgacgcgacgaagagtttcgggttgactgttttggaggacatgaaatgtgtgtttgcccagaaggaactcatgtggcacactttggccatgttggcactgcgcggatcacatttggttaaggcatcgagcacagaagaaatgaaatccgagaattcctacagagaaaatcttgaagcttgtgttcgagtgtacgaaaccgcggtagaagcacttcccaccaaagcaatgtggtcttactacatcgacaatatgctgaaagttaacgaagatatgtcgtctcatcagaaacttcgacgaaaagttctgggagttgccttcaaaaacgctttcgaaactggctatcttcacgaagataaatacgttcagtacctgaagctgttaatccacaccgataaaccgcaggatgcgttcataaatgatgtcttgagtaaggctctggaagcatatccgggttccgtcaagctttgggaactacgacttgtctatctggctcgtaagcaagattctttacaagaatttgaaaccgtatttaaacaatctttggccaaatgcagtgaggacgtattgccgctttggattgcgcgttttcaatattatcacacgcatgcggatctatccgaccgaatggagcatatcttcaaagaagccatccatcaacccccagtcatttccaagcatttccaaccactctacttggactatctgacaataacggaagacatcaatgtcgctcgtaagcaatatcgccaaatgcaacgagattgctgtccgtgtctggagcttcacagcaaaatgtcccagctggagtccatacaagcacaatcgaacactgaccaatggcgattgtgtcacgaaaacgccacgcaatactttggcgcgacaaacccttccgcttggatcgattacatccggttcgaaaaggagatgggcaatcccaagaacatgcctatcgtttttgaacgagcgaaatcacgcctggatgccgatttggttgcagaatttatcactcaatacgaactgctgaggaacccgctagtttagaacctcacaatttcaacgtttatctaataaagtttatttcaca

SEQ ID NO: 847 - DNA, 1118 bp, Aedes aegypti
atcggaccagatcggacgatccggagccagagatcactgaagccatgctcgatttcctgattccttttctttgccagcatgtgtttatgagaaatatattcgatttgaaatgtaatatggagcagctgaagagcatagatccgaactacggtgttacgtggatgtttctgcccgacgatcagggtgtgccacatgtagtggacttaacagtgcccaatgatacctcttcggatgggaaaaacttctggagcgatgtcaacgatgaagtgacgttctatttctacagacaaaaaaccaaaggaagcccaattgccttcaagttcaaaaatgacccgtccgtccctctgaaattcccgaccaattatgaccctcaattacctacgaaggtcgtaatccacggttggcgtaattctgtcagcagtcccgtttgccagcagattaaggatgcctacctgcaacgcgaagatatgaacgttcttgtggttgattggggtcccctggcacaggataccctctacttcagatcggcaactgcaacaaaagatgtaggtcgtcacgtaggatcgctcattgatcgaatggtagccgagcgaagtaccagtttgaactcggtgcacatcattggccacagtttgggagcgcatacttcgggattcgctggacgagcagttcggtcagggaacgtttcgcgtattacaggccttgacccggcccttcccggattcgtagacatgcaaccggacaagctcctggatccgactgatgcacggttcgtggatgtcattcacacttgctccggaatgttgggacataacaaaaaccttggccatgtcgatttctggcccaatggaggcactgtgacacaacctggatgtaacggtatggaggactttacgggagcctgtagtcatggacgatcgtacatttattacgcggagtcggtgaacagacggaatgccttcatggctctgccgtgtgaaaatatgaatgactataaaaacaatcagtgtagaaccaatccggttccaatgggtgatgctgttccattaactgccaaaggttctcattacttggaaacaaacgcagaacccgcttatggaaggggcttcaggaggtga

SEQ ID NO: 848 - DNA, 1880 bp, Aedes aegypti
cttttgccgattgcaatgaccaacacgcaccgatgagcgacgataggggtggccctccgcagtgctttggagtggccaaacgctgtgaccggtaatggcagttcaactggacgcgcatacttcagtttagcagttgcgattctaggcaatcgaagcatgaagtggacttctcccggcgtaaaaagtggaaagtgaactttaggaatagtgcaagtgaattttcgacaatatagagagttgaatttaaatagtgtgatataatatgtgatactgggatacaaattagagttattttcaagaggaagttgacgcgatccaaacagaggaaactcttatcactattattcgaatgatacgtaattgcgcgaaatgttctactgctaaatggcacatggtactattacagagatgattgatagcgttagtgaatatacatcaaaaagactgataatacttatcgcagccgctttacactttgcccacatcacccatgccggtccggtgataatacgccagccgcgaagtgatttcaccgttggcacgtgcacatgggtagtcgaacggccatgccccgatcaagacataaagttctatctgttcacacggtccaacccggaagatcgccagtacgtccacatcgacgaaacgttggagaaatcgaatctcagcacatcgtacttcaacccgtcgctccccacgaaagtaatcatccacggatacaatggggacatgttccttgaaccactgatcaaaatgaaaggagagtatctcaaccgaggaagctacaatcttttctacgtggattggagtgttcttggaccgggtccttgctacccttctgcagtacacaatacaaaacacgttggaacctgcattgctcaactagttcaacgaatactggacactggtacagacaatgtccacctaataggattctctctaggagcccaagtaaccaactatgcggcagtaaaactgcgtccattcaaactaaggcgaataagtggtctggatccagcgatgcccttgttcatcacagcagacaaagatgacaaactagacgagtcggatgcaaactttgtagatgttatccatacaaatgcgttggtgcagggtaaaatcgaacgttgtggtcatgtcgacttttatatgaatggaggaatcattcagcctggatgttgggctggtggacaaaatcccatggcttgcagtcatcacagggcaccggactattttgcggaatccatcagaagtcttaccggtttctggggctggaagtgtgagagctatgtctactatctgcttggattttgtccgcacaataacttccaagtggtggctggcgaagactgcaatcaggcaaccgaaggaatgttcatgatcactacaaatgcagattcaccatttgctatcggccgatggacagattccatgggtttgctgaaaactcccaatccacttaataaattcagccttaagcgtgatccattcatcagtgatatcgatcaatggggtaaactggaaggaaatttcaacaacgtagagcaatttcctacaccatactcccaggatccgaatggagatgattggccctattttaatcatattggaacaaacaaactcaccaaagattacattaagaaaatattggaacaggataaggacaggtacgatgagaccaccgaagacagtgctgaagcgcacttgaatctgttgaagcacgctggtatgagtaatgccatcaatcaaaaggagggactgagtgacttgagaagacggcttcaactgaaagaagccagtgtagtggaacagtactcgttgccaatgtacactccatactaggaccgttgttaacacgttacaataaacttgttaaaatg

SEQ ID NO: 849 - DNA, 1357 bp, Aedes aegypti
gagtccagcgctcagtaagaagggctcgatggagaatattccccggtcggttgatcgggagcgacggagcgtaagcaagtcacgctctccaacgccagctccaataatggctccgccggaacctccgagtgctcctccgccattgcaactgacgccgcaaatcaagctgggacccaacggggagatgatcctggacgaggcaagtctggtggttgaaaacgagcgggagaaggccataagggatagcctggccaaggcggagattgtctacatggacgaattcagcggaaattccggctactacagtcgctacaagaggacgagggattggcccccggaggagacaatccgtttctacaggtgcttgcatacaattgggactgacttttccatgatgatccagctgtttccgaatcgaacccggagggatttgaaattgaagttcaaaaaagaggagcgtctcaatcttaaattggtcaacaaagcgttactctatccgaaagagttcaacatagaagagctgagacagcagttcgaggaagaggatgaggaaatcgaacgacaacgagagcaggaacggcaactgaaccaaagcaaaaaccgaaaccccaagaaacgacccaggcgaaagaggcgaaaggtgactcggaatgaatcggctgcggatccagtagtcgaacgtaagagaagctcaaccgcagccgtttctaaaccactttccgaagcggaggaagttgaagatgacgttttcgacggcaacaacgtttcagacagcgagccaactggcgacacatcaaacagggaagatcgggtaccgcaggtcgagagcattccatacattccgaacggagagcttgacgagacgggtgtgacttcggttacggaatcctcacagtccataacaagtcaagcgaacgcggaagttgaatccagcgattcacgactgaacatcgaggccatggatattgaggtgaacaatccgtccccggttatggtgcttccggacgagacaactccatcttccgattcgcttcaaatgaagccggagatggaatcgactgaatcgcccacggaggattccaccgattggcaggagtcggaatattctggagatcaaacggaacaaccggtgtacgatcaggaagcggacgaggaagaaccacgcgggctgggaccgcttgaggacattgacatcaactcgctggtgttggtagaaagccaagacacaaatgatcccacgaaaaccatctatgaaatctacgtgacggatccggagacgggcaaactgagtgagaagcctttggacgtgccgtatgatgtgatcgagaacatccgatcgattctcgagggtggcgag

SEQ ID NO: 850 - DNA, 483 bp, Aedes aegypti
atggtcactgccactcattcatcaaacttcttttttactttggagaggattttaatcgttttgctttcgattcatactcaaattgttcctccatgccctcttcctcgcccatttctgcatcctcctcatcatcatctggttccaccttctgtccatgctgttgattggtcacttccaaattatgaacctttcttttgtgggcagttagctcccagttctgatagaatcgttcatcttcgcacatatcgcacgcaaagggacgctcaccggtatggatacgacgaatgtgaacctgcagtttcgtattgcgctgataaatcttatcgcaatagctgcatttgtatggatggattccctcgtgagccagctggtggaacttgcgcgccgagtatgttccgaaggctttgtcacacttgttacatttgtatggcttctctttggtatgaaccttaccgtggtgcactaagtgagctttcgacttga

SEQ ID NO: 851 - DNA, 1053 bp, Aedes aegypti
attatggattgctgccgggtttgcttggtagacgaagctgacgtatttctgtcgctattttccaagtccgaccaaatctcgatctcggaaatgatcaatgagctgaccggattgaagattttgaaaggcgacggtcttcctcggttcatttgcaaggagtgttcggaagacattaagaaatgctacaaggtaaggctcaagtgcttggaatccgaccaacagctacgcatatctcaggacgatgaggatgtcaatgaagaagtagtagaagaagaagaggaagaggaagaaagaaactcgtacattgaggaagaaacattggaggaaaatcactcagcagatgagcatgaaaaaatgagactgaagcgtagtgcaaaaccgtttgagtgcaacatatgtttcaaacgatttctcagcgaggctcgattgattctccatcagtcttatgtatatcgggagaaaaatcacatttgcgacaagtgtagctctcgtttcacgtgtcgcggctcgttactaaaccatatgaaaacacatgctgatcggacttacttttgtgaagattgtgataaatctttccacacaagtagcacattgaagtctcatcgtctgctgcactctgagtcgaagcagttcaaatgtcctgcagaagattgcgataaaagtttcctcagaaaatctgacctgcatatccatctcgtatcacattccgacgaacgccccttcgaatgtgaaatatgttctagccgtttcaagtcgaaagctcacttagtgcaccacggtaaggttcataccaaagagaagccatacaaatgtaacaagtgtgacaaagccttcggaacatactcggcgcgcaagttccaccagctggctcacgagggaatccatccatacaaatgcagctattgcgataagatttatcagcgcaatacgaaactgcaggttcacattcgtcgtatccataccggtgagcgtccctttgcgtgcgatatgtgcgaagatgaacgattctatcagaactgggagctaactgcccacaaaagaaaggttcataat

SEQ ID NO: 852 - DNA, 2889 bp, Aedes aegypti
caaactttcgcgcgcaaatgtacgagttgcctgctgtaatttgtggtgtttgaacgtgttttctattgtacacaaaagtttgcagaaataaaatctaattttacaaggatattttgcgttgacaataatcagaactacttaacaagatgtctgacaatcctagctctccgccaccgaacaccccgagcgacattgatcgccggaatatgcgggccgcaatgacctctccggtgggtgattttgaaccgtttgaaaatgaggaggaaattttgggcgacaccaccgttcgggaggacaattacgacgaagatgaggaagatggggaggagctgttcggagataacatggaaaatgattatcgtccggttccgcatctggatcgctatgacatggaccagcttgaccaagaaatatacagcgatatatcgcaaggcgatcgtgctgccgcagaagcggaaatgcgccgaagagatcgcgccgcagggattcatcgtgacgatcgagagctgttctacgagcgtagcgacgatgaagacgacattccaagggctaagagacgtgccgctgaaaaagcggccgaaggtgaggttgaggacactgagatgatcgagtctattgaaaacttggaggacaccaaggggcacagtatcaaagaatgggtgtcaatgttgggccctcgcacggaaattgccaatcgattcaacagcttcttgcgaacgttcgtcgatgataagggacagtacgtttaccgggatcgcatccgtcgaatgtgcgagcagaacaaatccagctttgtcgtatcttacacggatgtggccaataatcaacatgtgttggcctacttcttgccggaagcgccattccaaatgctcgaaattatggataaagtggccaaggaaatggttctgagcatttaccctacttatgaacgagtgacgaatgagatccacgttcgcatctccgatttaccgttggttgaagagctgcgtactttccgaaagcttcacttgaaccaattggttcgaacgcttggagttgtaacggcaacaactggagtcctgccgcaattgtccattgttaagtacgattgtgttaagtgcggttacatcctgggaccattcgtccagagccagaacacagaagttaagccaggttcctgtcctgagtgtcaaagcgcaggaccgttctcgatcaacatggaacagaccttgtacagaaactatcaaaagattaccttgcaagagtcaccgggacgaattccggccggacgtatccctcgaagcaaagattgtatcttgttgtccgatctttgcgatcaatgcaagccaggagatgaaattgaggtgaccggcatctacaccaataattacgacggatctcttaacaccgaacagggcttccctgtatttgcaacggtcctgattgccaatcatctggtagtgaaggatagcaaacaggtcgttgcttccctcaccgacgaggacatttccacgattcaaaagctgagcaaagatccccgcatcagcgagcgcattattcaaagcatggcaccttctatttacggccacgattacatcaaacgaagcttggccctgaccttgtttggcggagaagctaaaaatcacggagagaagcataaacttcgaggcgatatcaatatcttgatctgcggcgatcccggaacggcaaaatcgcagtttctcaagtattcggaaaagattgctccacgtgccgtgttcactaccggacagggagcctcggctgttggtttaacggcttacgtgcgtagaaatccggccacgcgtgagtggaccctggaggctggggcactcgtcctcgcggatcagggtgtctgcttgatcgacgagtttgacaaaatgaacgaccaagaccggacctcaatccacgaagccatggaacagcagtcgatttccatttccaaggccggcatcatcacttccctgcaggcacggtgcgccgtaattgccgcagccaatccaatcggcggtcggtacgatcccagtttgaccttttccgagaacgtcaacctgtccgagccgattctgtcgcgtttcgatatcctttgcgtggtgaaggacgagtacgacccgatgcaggatcagcatctggcgcggttcgttgtcggttcgcacatcaaaaatcatcccacgatggacgacgtcgtgccggagtcgcaacccaccgacagcctgcagatcccgcaggatttgctgaagaagtacatcgtttacgccaaggagaacgtccatcccaagctgacgaacatggaccaggacaaaatagcgaaaatgtactcccagctgcgtcaggagtccctgtccaccggatccctggccatcacggttcgacacattgaaagcgttatccgtatgtcggaggcacacgcccgcatgcatctgcgcgacacggtgcaggacgtggacgtcaacatggccatccgtatgatgctggagagtttcatcgaggctcagaagttcagcgtcatgaagaagatgcgctccaccttccagaagtacctatcgttccagaaggatcactccgagctgctgtacttctatctgcgtcagctgacggtcgatcagttggcgtacattcgcagcaaagaaggacctcgggcgactcgggtggaaattatggaaaaggatctcatcgaacgtgccaagactgtcgacatccacaatttgaagccattctacgacagtgagatcttcaaaaagaatggtttcgcttatgatcctaagcgtaaaaccattttgcagattgtgcctgaagctggggaggcgtagttttaatgtttttttgtctattttaattgcccaccatattgtacaactgctttttttaatataaggtttttttttattcaaa

SEQ ID NO: 853 - DNA, 876 bp, Aedes aegypti
ggcagttccagtactcttgtgttttgttgtgtgaatttacagaaaagtttttacaaaagtaaaatgccgaaaaagggccatcggaaaaactccaagaagatgaagcaccagaaccaggagaacgaagcgcgctctgccgaaaaaaagcaactcaaagagatgctaatagaacgtgatctgttccgtcccggcatgaagatccgggaaatgcgagagctctgcaccgccatcgaggagtcaatgctggaccatgaattgctccaaagaagcaatcagttcaacggaagcttcagggatgaggacttgaaccagcgcattctgcgggacttcgcccttctggagaacccggcgtcctcggaaaagctaaactttattagcgatccagccactccaccgacgaatgcgtcccctccgaagttcaccggccgtcgtccatcacctaacatgtccgaatttcctccactgacatcaccgattgcaggaaaagccccctcgggaccatgttccaaaccatccgactctgacagtgatggcgactattactcgcccgaatttccgtccgtgctgccgtatctcccatgtcgtccaagtcgaagtccacccggagccacgagcctatgattgcaacggtgacgacgataaacagctacgctggattgcttcgccggggattaaatcatcgccaaggctggtaaagccgtcagccaaagcgtgggacgccattgacgaagtgccctgaatcatacccgaaagctatcagttatcatttcaccgccacaggtaagttttttcgaacaatgaacgttgcgtagtcagagttgtgtgcttgcactgaagttcaatataatatattcagatttctatgttcgttcgttg

SEQ ID NO: 854 - DNA, 2192 bp, Aedes aegypti
gcgacgccggtaaagcgctcgctctccagcttgaccaatacggttagcgacgtttcgcgccttcagcggtacgcgcctataggtagctagagaggatcgcgctcggtctggtcgagccttaaaatggttcgattcgccggtttcgagcttcagtacacggttcagttcctgctgcgttgtgctgtccggtcaattagaatagtgtaagagccaggcgaggaagcaatactagcaagctacataagcagagtacaacacgctgctgagtcctgccttggacaaagtcgtcgcttgatcattgtcacgatcagtcacaaagcgcaaagcaggaaaataccctctgcctccgagagatcaggaaaaattttacgcgagtgaaggcgggtaaggtgatcgagcaacggagaaacactgttttttgtcgggtcaagaagggtgctgttgctgaatcgtgttgtgtagaagacagtcgtgaaggaagtgtcgaccggtgaacgtcgttgaagtgttccttagaggggcaagtgtttgagaaataaattaaaaatattacgacaagcgagtggcggaaccgcagactgaagatcgtgtgggtgcgttaccgaaagttagtgaggcggggaaaatagtgatctgtctgttgttatggttgatgcgccaattgaaagtgacgacgttgagtaagagaattcggccatccagctcttctacgcggcggaggcctgtcctcattcgtcgagcagcgatcgtttaggcaggacctacaacgaccttctggcaattgcgtcttatccgtgtggccaatataatagtcagtgtctgaaaaacagtgccaactttttgttttctgtttgtgtgtttcgtcttgtgaagaagcccgggccaattactagccaaaacactttcgttcgacttggttcaaaaagaagcgttgcatccaacgtagaccagaggcaaccgatcatcagccatcgtcgtcagaacacgccatcatgaacaagcagtttccaaaacgccaagaaccgccccaggcctcggtggcggtcaagctgctgacagccggaacggccgcgtgctgggccgatttcatcacattcccgcttgacaccgccaaagtgcgattgcaagtccagggcgaacaaccggctcgcacagcccccctgacgcagacggccaccgccagaggcgccacagcctaccaggcattcaaattgaacccatcggccatccaggccattcccggagcgcagcatgtccagtaccgtggtctagtgggaaccatcacaaccatcacccggcaggagggcttccgcacactgtacaatggcttgtcggcgggactgcagcgacagatgtgcttctcgtcgatcagactgggcttgtatgatacggttaaggaattctacggaactatcttcaaagaaaacgaagcgggtcttcaaatcatcactcgaatctgtgccggcctgacgaccggtggcctagcggtagcgctagcccatccgaccgacgtggtcaaggtgcgcttccaggcggcctcccgctcgaacagcaaccgtcggtatacttccacgctgcaagcataccggacgatacaccgcgaggaaggtgttcgagggctgtggaagggcgcgataccgaacattggacgcaatgccatcgttaatgtgtcggagatcgtgtgctacgacgtggtcaaggattgcctccagcggtacgcaaacatcccgaacgacattcggttacactttagttcggcggtggtggccggatttgccgccactgtggttgcctcccctgtcgatgtggtcaagactcggtacatgaactcgcccaagggtcagtaccggggagcgctcgactgtgccatcaagatgggccgccaggagggagcggccgcgttctacaaaggttttgtgccatcgtttgctcggcttgtctcgtggaacgttgtcatgtggataacgtacgagcagttgaagatgattgtgtttaaatcttaatggggtggaacgctgctttaaggatattataagttatttttacacttttttaacatagactggacacttagagagtcgtatattttttatattttatgactatgaagaatattgtgatgtatcaaaagagaaaaaaaacgaatattgtaaacgtgaataatttctataaagagtatattttgacaaacg

SEQ ID NO: 855 - DNA, 1266 bp, Aedes aegypti
atggcagaggaagatgaaatcaaagaataccgctgggaaaccggctacgagaaaacttgggaggcaatcaaggaggacgacgatggcctggtggaaggttcggtggccgacatcatccagaaggccaaacggaaacgccaagccatgaagaagggcttcagcaagttgggcatgatgcgtcatttgtatgtgctgctcgattgttcggaagcaatgaccgttccggatttgaaaccgacgcgattcttgtgcacgctgaagctattggagatcttcatagaagagtttttcgatcagaatccgatctcgcagttgggagtaatagccatgaaggccaagcgggcggaaaagatttccgaacttgggggaagctgccggaagcacgtgaaagctgtggccggtctgagcaagctcaatttgaccggtgaaccctcgctacagaacgggctggatttggctctgaagacgttgaaaatggtccctgcgcacgcgagccgggaagtcctggtggtgatgggcagcttgaccacttgtgatcccacagatattcacatcacgattgaggcgctgaaagcggagggaatccgctgttcggtggtcagcctatcggcggaaatccgcgtttgcaagtttttgtgtacggaaacagggggcgtctacggggcagtgctagatgacgcccatttcaaagatcagctgctgcagcatatcgatccaccgcaggccggaaatcagcaggaattttcgttgataaagatgggatttccgcatgggaaaactgaagaaggtaaagatccgccgctgacgatgtgcatgtgccacatcgacagcaccgatgagccctcgaagctgacgtccggcggatatcactgtccgcagtgttacagcaagtattgtgacctgccggtggaatgcgcggcgtgtggcttaacattagcatcggcaccgcatctagcccgatcttatcatcatctgtttcctgtgcctcacttccaggagctttcattcgagcatcaggccagcatttgctacgggtgtcagaagccattcaccgaaagcacggacaagacggtataccagtgtggaacctgccaacaggtgttctgcatagattgtgacatttttatacatgaaacgatgcattcgtgtgtcgggtgtacgacaattccgtcctctgtgcaggctttgcacgcacgaaaacccgttgctccaccagttccgttatagatagggcgttgcgcttgagaaataaaaggttataaaccg

SEQ ID NO: 856 - DNA, 807 bp, Aedes aegypti
atgggagatgtcagccgccgttcggatcggattgcgccacccgccattatcacatcccgcgaattcggagtagaattccccaccaccaggatggagcaagttcccattgcggtacggatagagaaggaagaatccggtttggctgaccgtatcagagttgacaaagcaaaacgggcggaagaagcttttggaggcctagcttcgtggaccgacaaagatttaaatgattttttgactatttgtaaagatgataaagacaccgatgatgctaattctgaagacctttcggacaccgtaaaaggagttcagttgcttttgaatgacggccacgaagttgaagacgttatccttcttcgagatcaagaacaagaagctcgtgatggtaaattcaacaacttttggaaagctgttgaagctgtgatatccgagaacgatttagctgttgctcaggaaaggcgacatgggaccactagttggatatctcctctttgtgtctccctacgcgatctgatggaaaaaagtgaagagaaaatgaatcaactttttccagaatcgttgatgaacaatgtaccctcaatggaattcttccgtcttcaattctctcccagaaactcacgtaccaactcggctaaacgatactacagcagatttgacataaaatatggactacaaatacgtactttgcgaaaatcacatccggatcagcattatggagcaaagcagttccaatacatgaaaattatggcagagcttgttgctcgctactcgaaaaatgatcttgaaagaccaatgctgttcattggataa

SEQ ID NO: 857 - DNA, 1601 bp, Aedes aegypti
gtgctgaaagtcaaagcggaaaatcgcggcgccggcagaaagcccgaaaagttgatccgcctggacgagtggtaccagaacacccttccgaagctgatccagaagcgcggcaaagatgcccacctgctgcacgaggagctggtccagctgatggagtggaagcaaacccgggggaagtcctacccccagttgacccatctgatcaagatcaacacgccgcgggccgtcatgatggagacgaagaaagccttccgcaaactgcccaatctggagcaggctctgaatgcgctatccaatctgaaaggagtcggaacgacgatggcatctgcactgttggcagcagcctgcccagaaactgcacccttcatggcagacgagtgcctcatggcgatcccggaattcgagagcatcgactacaccgtcaaggagtacctcaagttcaacaatggcaccgaggagaacggagctccccaggaaccacccaagccgaagaaatggaccgcccacaaagttgagatggcactttgggcgcactatgtggcctcggacttgcagccggatctcctgaagggcatgcctgaaagcaacggagtcgccagcacaggttcagccgtgacagtttcggtggccaatggtagtgcagcggttccagaactggacaacgaagacgacagctctcagaatggagtcccaccgtcggacgagagcaacctggacagtgagagtgcctccaaggatgcgtccgtccttaccaacggtacagccttaatgaatacggacagcatggatgggtcggagaatggaaacccagctccggcggaagcagaagctacggaaaccaccgccacgagcctccccgccgacagtctagacgattgtaccaaatcgggcgacagcctggatgaggctccggccgtggaagcaacggcagctgccgtggccaccctttgcactgccgacggcgaggactctcagagcagcaacagccagaaacgtccgctctactgtgacgaaaactccgaggaacaaccggaactcagcgctcccaagttgataaagctgtaagccgcgaggtgtggtcggtgcgatcgagatagcgaaagagaaagagcgagagtatccgagcgagcgattgatgagcgtgagttttttttctttggacatgaagcagtagtaaacagtggaaacactggaaatcttctcagaatcttctggattcagcggcacggatggaggcggcccggtaagggtcgccccttatcctctcaaccaaccaaccaattaaatggaccgaccgaccaactacttgctccaaactacatcttaatttttctacaatttttgtattttattcgtaattattttatttacaaaccagcattaatcggattagcggtagtttgtagggccagacagaccaaccaacagggacaggtaatgcgcagcaaaccttctaaagacttttccgaattcaaattgacctgaaccgagaggaaattgagtttaagtgtagcagcgaaaagcgaggcacagttttttttccgtatgcaaaacaaaagataagaaataaagtaaggaaatccgttttggtctcattttaa

SEQ ID NO: 858 - DNA, 4342 bp, Aedes aegypti
atgaatctcggtctatggggatgcttggtgccctgtggactgcaatactggtgcgagagtaaaagcgatacatgcattacggagatgggggcgacggcatcaactgattgtcccggtgccggaggtcccggcggaattccgggcctgaccggtgctatcacgactgcggctggtgctacgactacgactcctctcacagccggtggcattggtggctcaggtgctgggatgctgggagcgtacggacccgttggtggaccacccgttatcgtacgggagcggcggaagaaggtcaccgggtttgccacactgaagaagaaacttattcgacggagacgatcgtcgaaagcatgcgatcatggccgggtgctgcgggaattcgtgtccagctggagtccgatggaactgtcggcactgttggaagagtacgaatcgctggcagcactgaaggacctttcggttcaggctgagctggcacggccaccggcaaccacgttcaaacaggatctcgccagtttgtacgactacaaacattgcaccgactgtgatctagtgttccggggaaccgtcttcccggttcaccgtgcactactatccgcacgttgtccgtacttccgggacctgctagccggctgcccgggctacggtgcccgaatctgtttggaattacgctcctcgccggtggacgttccaatgttttcgtcgctgctaagatatctgtatacaggagatttatgtacacacgatccgaccatagatgtaagtctgctacgtagattaggagaagattttggcacaccgaatccgctagaaaatgacctgcgctacctgctcgaaaccggggactacgcagatgccgccatagtgttcacctccgagggtggcgactaccatcggcccgattctggcagctcggagtacggttttcgaccgaagctagaactaccttgccataaggcgatcctcagtgcacgatcaccattcttcaagaatatgatccagcgacggacccgtaacattaacgaagaacaccaacttcatggcacagaccgatcgttacatgttccgacacgcatcgtgctggatgaaaccgtaattccgaaacgttacgctcgtgttctactgcacgcgatctacctggacaccgtggatctatcgttgatcttacgcggaaatggatgcggcaacggagcaggaagtctcggagaggtgcaagctcttacccacacagggagaaccaggccgtcacctttggaagaagccatggagctgtatcaaatcggacgcttcctcgaactggacattctggcacaaggctgtgaagatctgatccttgaatggctaactttggatacgctagctacggttttacgatggggtgggcaaccacacgggtctgcctgggtttatcgccaagcttgccactacttgcgcgaagagttctcggctattgtcggatctccggtgctcttccagcttgataaatctcagctgatagaagcacttcaaaacaacttccttcaggcatcagagctggaggtgctgcaggctgttttgaagtggggcgagcaggagctgatccgacggatggaagatcgggagccaaatttgcttagtcacactgcacactcggttacccggaagggaatcaaaaagcgtgatttgagcgacgtagagttgagggaaattctatcggagttactgccgcatgttcgaatggaccacgtactgccaccgagcaacgagatattgaaccaagcaatccgacggggtttggttagcactccaccatcgcacatgatcggagacgatcgtgagagtctgaggatcaatgcgtggattcgcggtggaaagaaccatggtttgtttgtacgacctcggctgttcatgccgtactatgaggaggttaaggtgctgcttgaggatcacattgcgtcgcaacagatcgaaatgttgcgcatgcgacgatcgcgccacatgccggacattccggacacgttgtacatggtgtctcgacttaatagtaacactagtgggaacatgggtggcggaggcacgtcaggtgtggatgttgttgcggcagcggccgcttcgattccagcaccagatccaagcgccatggaagctatgcaaaagagggaacaaaagcttaggcaagcacctagctgtcaacgagcgttgacgcttccgctgtcaagccggaacgaaatcaatcgtcagatcaggttgcgggttgttcgggaattcaattttccggatgaggtggcagagttgttggagaactccaattgctactgcctggacgcagatggctccacaccgaaagctcagggcgacgatatccatgcgagcaatcattcattggacgatgacacaactccgcccccttcgccggcactgccaagtgatattattccacaaaacgttgcctgctttgggcgcaacatgacattcccccggcaacaacctcaaccaccaccacaagtgatcgcgcatggggctggaggaggaggaggagatatgggaggtggagttggaggacgactacatcatccctcgggtggtatgttaggaccgagttcaagtattataggtacccatcgacgccaagaactgccatcgttgatccccggaggggatgtagttgcttataggctgtcagcaccggccggagatcattccggggaggccggagcctgttcggagggacatctttcggatataatgccggacgtggccatggcgacggcatctatgggacagttgcaacttggagacatgcccgagagtcttcatctagatctgggcgatggaccaagtcacatgatcggagcagcaggatctctaggattacataatcttccgcatcatcgaatagcgacaccttcgccgagcaatttccatcactacatgacccggagccatcctccgtccggttcactgagtagtagtggtgtcggtggcggccacggggaaggcgcagcggaacgtggcatgatgggtggtggaaggctacccagttccctcggtggatcctcccagtcgggtcagccgggagtatcagctgcttcggcggcagcagccgggtcttcgtcgtcatactcgcagcgttccaactcaccgtacaccttacaccgagcgagtccgggcctgccgcatagctcatatcacaccggcccccgattatagagacggctgcaagtatttcccgacaaacgtcagctgttcagtatgcctttctgaaaggaacacactgaggagaatgaggagcggatgtgtgtgcgtgagactgtctgtaagggtgtgtgacggagaggaatggagtgcgacccggggcgtagaggtttagttaaacgaattaactaaattaaaacacaagtagcagaaaaaagaagcaaaaacaaatacaaactactacacagtaaaaaaggaaggtaattaattgcaacaaatacatagatatttgaattaagagttaagtatttcattaataaactcaagaagaagaacaacactacaatggcaaggatataaaagtaataatagtactaaaataaacacaaaacaaagcagtaagaataataatcgaagacttttatatttaacaaactacaaaacaaacataggagcaaacccacagaatacaagtcgacggtgtaaacgagaagcgaattgatagcaaagaggaatgaggcataaaacacacaaacaccaggagagcgacgaaccgcggtttgtgtggaggtagcagtagtgtgtaatcgagtttttgagttcgcttcttcggcgtacgaagcgaagcgagataaagcaatcgttcacacatacgaatgaatgaccaagcgatcgcgtgcgtaaatcaacccgaatatatgaacacacacacacaaacaatcgtacggatttttccttggtttagaaactaggccgtgcctttaatttattctcttttacattttttagcaaactttagcgccccttcctttcggatccctcaaactctcgagggacagtatgataatcagatgtgttttttaatatgagatgaagttttaacgctatttatttatctttttttcgcgatctgttttttttttacactaggttatgtaggacattttttctcaattgggaaacaaggcaaaccaataaaacaaatgttattacgattgtgtttagatttgcccttggtttccgcgttatacggcaacggtagaagtagtaaaggaaattcgagtgaatgagtgagaatgcgagataaatgaagcaaaaaacaatttcatgttttcgaataatcgtaacatcaagaagaagcaaacaaaaatgcatcgttcgtgtatgt

SEQ ID NO: 859 - DNA, 1994 bp, Aedes aegypti
ttctggttgatcctgccagtagttatatgcttgtctcaaagattaagccatgcatgtctaagtacacacgaattaaaagtgaaaccgcaaaaggctcattatatcagttatggttccttagatcgttaacagttacttggataactgtggtaattctagagctaatacatgcaattaaaacacggaccttctgggacgtgtgcttttattagactaaaaccaagcgatcaattgatcgttatattggttgaactctagataacatgcagatcgtatggtcttgtaccgacgacagatctttcaaatgtctgccctatcaacttttgatggtagtatctaggactaccatggttgcaacgggtaacggggaatcagggttcgattccggagagggagcctgagaaacggctaccacatctaaggaaggcagcaggcgcgtaaattacccactcccagctcggggaggtagtgacgaaaaataacaatacaggactcatatccgaggccctgtaattggaatgagtacactttaaatcctttaacaaggaccaattggagggcaagtctggtgccagcagccgcggtaattccagctccaatagcgtatattaaagttgttgcggttaaaacgttcgtagttgaacttgtgcttcatacgggtagtacaacatacatttgtagttagtactatacctttatgtatgtaagcgtattatcggtggagttcttatatgtaattaagtacttgtacttttttatatattcctcctatttaaaaacctacattagtgctcttaatcgagtgtttttgtgggccggtacaattactttgaacaaattagagtgcttaaagcaggcttcaaatgcctgaatattctgtgcatgggataatgaaataagacctctgttctgctttcattggttttcagatcaagaggtaatgattaatagaagcagtttgggggcattagtattacgacgcgagaggtgaaattcttggaccgtcgtaagactaacttaagcgaaagcatttgccaaagatgttttcattaatcaagaacgaaagttagaggttcgaaggcgatcagataccgccctagttctaaccataaacgatgccagctagcaattgggtgtagctacttttatggctctctcagtcgcttcccgggaaaccaaagcttttgggctccgggggaagtatggttgcaaagctgaaacttaaaggaattgacggaagggcaccaccaggagtggagcctgcggcttaatttgactcaacacgggaaaacttaccaggtccgaacataagtgtgtaagacagattgatagctctttctcgaatctatgggtggtggtgcatggccgttcttagttcgtggagtgatttgtctggttaattccgataacgaacgagactcaaatatattaaatagatatcttcaggattatggtgttgaagcttatattgccttcattcatggtagcagtaaaatgtttattgtgtttgaatgtgtttatataagtggagccgtacctgttggtttgtcccattataaggacactagcttcttaaatggacaaattgcgtctagcaataatgagattgagcaataacaggtctgtgatgcccttagatgtcctgggctgcacgcgcgctacaatgaaagtatcaacgtgtatttcctagaccgagaggtccgggtaaaccgctgaaccactttcatgcttgggattgtgaactgaaactgttcacatgaacttggaattcctagtaagtgtgagtcattaactcgcattgattacgtccctgccctttgtgcacaccgcccgtcgctactaccgattgaattatttagtgaggtctccggacgtgatcactgtgacgccttgcgtgttacggttgtttcgcaaaagttgaccgaacttgattatttagaggaagtaaaagtcgtaacaaggtttccgtaggtgaacctgcggaaggatcatta

SEQ ID NO: 860 - DNA, 591 bp, Aedes aegypti
atgttcaaaacatctgtggtggcaatcgcccttctgggtgctgctttggcttacgagcatcatggatttgttagtgaagtgaagcatatcccgtacaagtggtatggcggtatgcagggaggaatgggcggcggaatgggaggaggcatggaaatgggtggtggaatgggaggaggaattggaggcggaatggaaggcggatttggcggcggcatgatcggcggtggaatgggaggaggatggaaggaaggtggtgaggactactactcgtatccgaagtacaagttcgaatatggagtgaaagacatccacaccggtgatcacaagagccaatgggagatgcgcgatggagatgtcgtcaagggagagtacactctggatgaagctgatggatcgaagcgaattgttgaatactacgctgacggaaagaacggtttcgaagccaaggttaagaacatcggcggaggtggcatgggaggtggtatgggaggaggaatgggaggaggtatgggaggaggtatgggaggtggattcgaaggtggctaccacggaatgggatacagttacagcaagctgaagaagtacaactaa

SEQ ID NO: 861 - DNA, 591 bp, Aedes aegypti
atgatcaaaacatctgtggtagcaatcgcccttctgggtgctgctttggcttacgagcatcatggattcgtcagtgaagtgaaacatatcccgtacaagtggtatggcggtatgcaaggaggaatgggcggcggaatgggaggaggaatgggtggtggaatgggcggtggtatgggaggtggcatggagatgggaggcggaatgggcggcagcatgatcggcggtggaatgggaggaggatggaaggaaggtggtgaggactactactcgtatccgaagtacaagttcgaatatggagtgaaggacatccacaccggtgatcacaagagccaatgggagatgcgcgatggagatgtcgtcaagggagagtacaccctggatgaagctgatggatcgaagcgaattgttgaatactacgctgacggaaagaacggtttcgaagccaaggtgaaaaatatcggcggaggtggtatgagcggaggaatgggcggaggtatgggaggaggtatgggaggtggaatgggaggtggattcgaaggtggctaccatggagtggggtacagctacagtaagctgaagaagtacaactaa

SEQ ID NO: 862 - DNA, 1249 bp, Aedes aegypti
tacggccagcgtgtaccgacagcagcatcgcccagcaacacaaactccagcagctcatccaacaccggttcccagagtggcacgctgagtacgagtctgagcaataccaacacgaacaacacgatgggccccagtaataccccgcagcagacggagcagctgtccaagacgaacctctacatccggggactgcagcagaacacgaccgacaaggatctgatcaatatgtgtgcacaatacggtactatcatctccacaaaggcaatattagataaaacaacaaacaaatgttacggatttgttgacttcgaatcaccggcgtgcgccgagggtgccgtcaaaggtctccagtcgaagggcatccaagctcagatggccaaagtgggtatctgggtgctacataggccggccgttcaacaagagcaggatccgaccaacttgtacattgctaatctaccacttacctataaggaaacggatgtggagaacttactatccaaatacggccaggtgatctcgaccaggatccttcgtgaccagaacgcgcagtccaagggagtcggcttcgcccggatggaatcgcgggaaaagtgcgaacagatcatccagatgttcaacgggacgcaactgcaaggtgcaaaggaaccgctgctagtgaagttcgccgacgggggttccaagaagaagaaccccttcaagagcccggatccgaacgcgcggacctggcgcgatggtgccgagggcattccggtgacgtacgatccgaacctacagcagaacggaatcggtatgaacgtcggagcccacatcagtatgccgtatggacggttcagcgctcctcaggtgggaagctacgccgtccccggctcccagtgggtaccgagtgggtacatgatgacccaaccgatcgcacaggtcgatgaccagtacgtgcagatgcaggctccacatcttagcgttggcacgccctacaagaccgatgctgttacgaacgtacagccacgtggcgtgtcgatgatcatgtccagtgaaaacccggcggctggtgtccaatacggcatgatgccgcagctcaccacattacagattggatcatcgtacatcagcccgacgtatccgtattacgcgccaacgccgtcgattattcatgcgatgcagatgggtgactcggagcaggtcagcacggcggcttctccggacgaggcgtacaccgcacagtatcaacatggtccgaagtagagtcctgccg

SEQ ID NO: 863 - DNA, 651 bp, Aedes aegypti
atgttcaagacatctgtggtggccatcgccctgctgggtgctgctttggcttacgagcatcatgggttcgtcagtgaagtgaaacatatcccgtacaagtggtatggcggtatgcagggaggaatgggcggcggaatgggaggaggcatggaaatgggaggtggaatgggaggaggtattggaggcggaatggaaggcggatttggcggtggtatgatcggcggtggaatggtaatttttgattcctcgataaattcttcaaagtatctaataagtgaactacattttcagggaggaggatggaaggaaggtggtgaggactactactcgtatccgaagtacaagttcgaatatggagtgaaggacatccacaccggtgatcacaagagccaatgggagatgcgcgatggagatgtcgtcaagggagagtacaccctggatgaagctgatggatcgaagcgaattgttgaatactacgctgacggaaagaacggtttcgaagccaaggtgaagaatatcggcggaggtggaatgggcggaggaatgggtggaggtatggaaggaggtatgggaggaggtatgggaggtggattcgaaggtggctaccacggaataggatacagctacagtaaactgaagaagtacaactaa

SEQ ID NO: 864 - DNA, 1727 bp, Aedes aegypti
tcaattgaacgataactcacaaacccgtaatcatcaactcagataatgatcaagaacccatttgggcagtttgtgcaagtgagctaaacagatgattcatggtactcagtaaataatggaaatgatttcgatatcaccatatagcgtgaatagcaatcctttctaatagttgccactagttttaacattcagttttaaagtcatgttcagtagcataacattttgtagcagaattgaaattttatgagcataatttacaattcataattgcaatcctgttagccaatttgagtgacttaaaactcaatggctgtgtatgatcaatcttgtgtagcaaatttagagtcattagattacaaacaatattgatacaaacttatgatttttttcatcaatatttttatcagaattttatcagggccttgaggtcactcaccgcttcaaaattgaactactatccagagaagaaagttaagttttatattcaagtgacaaagtgacagaaaactaagtgtattcaatagttgttttaaataagtgtgttaataagtgtccaaaatccaaatgcctgccatcacgaaccagatgactccaattcgtcacgttctggatttgtccaaggaggagaaacgacagtttttagattcgttcgacaccatcatgtcggactgtgatggtgttgtgtgggactttatcggccccattcccggcgttgacaaagccctaccgctgcttaagaagaagggcaagaagctcgccttcatctccaacaatggaatgcgcaccatggaggagtacaagcagaaattcctcaagttggggattccatcacatgagctggacattgtccatccggctctgaccacagtacgttatctgaaagcgatcaacatgacggatgcggtctattgcgttgctaccgaggtgttcaaagactatctccgaaacgagcagtacacggtcctagatgggcctgacgatcgtttcgctgacgaaagagcggccgattcggttcgcgtgttcacggatttcttcacggaatcggacagcccccgggttggtgcggtcgttttggatattgacgtgaacatctcgctggcgcatttgatgaaagtcaagtgctatctggaacggaatccggactgcatcctgattgcgggtgccaccgactatatcgttcccctgggcgatcgaatggacgtgatcggaccgggctacttcatcgacatcctggaacgggccactggccgtgaagcgttgattctcggcaaaccgggtcaagctttggccgactttgttctggaacagttcaacgtaaagcgacccaagcgagtgctgttcatcggtgacatgctgccgcaggacatgggcttcgcatcgttatgcgggttccagaagctcctgatgctcagcggaggcaccaccctggacatggtccgggcgcaaaaggtgcctgcacagctgcccgacttttacatgaacagcttcgccgattttatccagctgtacaaggatgtacaataatggttaaacgatttctattagttttgaatgaatctattccacgttgcagctggattgcaacttcacttcttcgggagtgttagtgcgcaccgcctagtaagtgttactgtgtaaccactggcctatgactttgcatattttgtaagggtgtacacatcgatgtgatatttttacaataaaatgtgatatgattgtaagtgtaa

SEQ ID NO: 865 - DNA, 1453 bp, Aedes aegypti
actgtttcggcgaacgacatccgcgcctgaaaatgagtgaaaaatcgagaatttctagcggtgttgtcaatcaagttttttcggttttcacgattaacatcatcaactttgctcatggcgctacactcgggtggctttctccgttcctaccgttgctccagtcggaagattcgcctctcgaaacaggaccagttacagtcgaacaaggctcatggataggatctatactttgtttgggaggtctggctggtgcaatcatctatggaagtcttaccaacagacttggtgtaaaacgatgtatatcgtgcataattattccaaacatgagcttttgggtgattgtgtactttgggacatcggtatatcacctatacattgcacgatttctggctggggcaacgggaggtggtatcatggtaacgtttccacttttcatagcagatatttccgataacagaattcgtggtattttgggatcgtgtttggctttctttggaaactctggtattctagtaatatacatcgttggtgatttgctatcatataggacagttcccatcgtgatgatgtcagcacccattttattcggaatcatcatgtgctttataccggaaaccccacaaacattactcagaaaacgaagagtagaagaagcagcaaaatcccttaaatttttcaaaggaattaccactggtacaaaagacatgaccgggtttgaacgtgacttcgaagctatgcaaaattttgttctaaacagcaaatctcaaaacagcaaactacagctcagcgatttcacttcatctcaagcaaagaaaggaatattcattgggatatttttgatgtttctgaatcaattcgctggaatttttgctatcctcacgtacgcagtttcaatctttcaagagtccggttccgatttaagtcccggatcatcagctatcatcattgcgtcgatccagattttcggcacgatagcttcctttattttcatagatttgaccggaaggagagtgctgctgctgttttcaacatttggcaccggcgttggcctgagctgtcttggaacgttttcgtggttgaaagagcatcaattcgatttaacaggatatggctggattcctgtcgtgagtctgtcgattacggtgtttctcttctgtgtcggattgtgtagcattccgtttttcatattaccggagatacttccagcaaagatttgcaatattggaaatacgatcagcatgatttcgattacaatattttcattcgttgtactcaagattttaccgattatgctggaggagattaaactatacggtgcaactgcagtatttactgcaacatgttttattggtgttataattattgctgtagtcattccagagacaaaaggaaaaaatctgatagcacctgagaatgtatgaatactcatttttgagatgaggagttgtggcat

SEQ ID NO: 866 - DNA, 1164 bp, Aedes aegypti
catgttagcgtcgtttttttacaatcttccctacggataacatgtcgttgctacggtatctggcatctggtggtctacagaggcatttggcgtcgtgctacagagttagcaaacagcatatggggtcaatcattgatcaagtttgtgatgctatttgtcgtgccctgagtgcttatgtcgcagatccatgccaagaatcatttttggaagtagccaatggttttaattcccgttggaatttcccaaactgtattggtgcgatcgatggaaaacatgtgtccataaaagctcccccaaatgctggcagcattttttataactacaaaggttttcattcgttggcgctaatggctatttgcgatgcttcttatcgattcacctacctggatgtaggtgcttatggaagcgaaggagactgcaatattttcaaagaatccaaatttggaactgatgtgctgcacgatcgacttgattttccagaaaacgccacggtcaatggtgttaaattacctttcttctatgtagccgacgatgcctttcccttatgtaagaggatcatcaaaccgtatagtaagaaaaacctatcagcagaggagcgcatttttaattatcgcttaagtagagcaaggcgttgtattgaaaacgcatttggactgttgtgctcaaaatgggcatgtctgaaaaagactttatactgcagtcccgatcgtgcgcagaaaatcatatctgcatgctgcatgctgcataactttttgattacgcataagtctactgcgtattgccctccaggatacatggacaagtttgatgacgaaaacgttattacagaaggagaatggcgcaagagaatttcatcggactcattataccatacgacattttcggcgagtgcaggcaggccttcggactacggcaaatatattagaaacgtgctgaaacagtacgtaaattcaaatatcggtgaactgccatggcagcggcgagcggcgtttgtcgaatgatgaaatcctatgtattatcagataagttatgtgattagacaaacagatgtaaaaaatccaacaagaaacgtgaacaatgcgtacactttggctgatcaaccatctacaatcagatttaaaaattgtcactaaattataataaaccttatgcattaataacgtt

SEQ ID NO: 867 - DNA, 2021 bp, Aedes aegypti
agaaattccacccatcagaaacccttgtttcgagcatttacgtagcaaacctcccacacaaaagcggaaagtttacatcgaagtaattgcccatgagcaagaaacatatgcagcaacatccatgtgaataataaaacaattcagcgaaaattaacgctcagtgtccaatgaaaaaaaaatatgttgtgaaaattatgaacattgaacaaatttgccatacctgctacaatatgagcaaatcgaaaacaaccgcggacacaagcaggatggtgcgatagcaattgttgataattaaaggaacaaattatggaagtgcaaaataaaaataagaggaagaaataaatttcctgggctggaactgcagtatttgatacccagcggctacgtggatgatatattgagatggaacacccaaaactagagataaccctatcggtggacgaagaaaacgctctcaccttgtacgaagaacttgagcggacagatatcaacactctgaacctgaacgtggactgctgttgcgggctgctacgaacatctccctttcaccagccgaagtccaagtcgaactcccgggaacggttacgtgccgactccggagtgtccagcgacgatgaggtatacgccgacagttgttcacagacctcagagcacaatagtgagtgtcgcgaagtggaaagcgaccacaaccacagccatcatatctttcaccttcggccgaacaacgacaaccgttgcggacatcgcagtaaatccagcctagatcgacggaacgagcgataccaaagcttcggtctgctggaatccaacatcttgaactcgtttcaactacacaattatcgacggaaaaatgcgggtggttacgattcgggcagtttttccgggcaaactagttatagttctacgacgtccagtatgattgaggacatttccgataaaatagaggagattggcaagttggacaccaacatccactcgctcatgtataaatcggttgaggtgcataacgatattttgtcactggaggcaaccaccaatcgccttttggcggataccaagaaactctccgatgaccttgacgacgtccgctatttggatgaactgataacgatactgaacggcgacattgggcctgttattcatcgtgagtggccgtatcaaattctgttcgatacaccgatagaggaaggcactccggttacgtgaagcgtgaaaccgattaccacgaatcggtaaaattctgcatgtgttagacaattgattctacctaatcgatgcattgcagtgggagttattagatagcgttgcagtgctttttcaatcaggagaaagatagttgttttatgataagcgtttataacgaaagcagttaccattatcgaggtggtgcgactaatcttcggtcagaatccgctatcgagatacgcaaacgagtatgctagccaaagattgtatatgcaaaaacatgtatgagcaacagaacaaaactgtaatagaaaaccatttttacctaaatagatataaattaacgtccggttcctaattggattgttttctttcttcaattacatccacgtagtttgggttttatgcattgcaagtagagatttcattcctacaggtgctggatcgagcatgaaaagggaaacacgactaacgtcgcgacgtgcgacaccttcacacctgacttcacattatgttttctactcgatacttaatagtactgaacattgtgattggtggaacacccaagacaacatgcttgttacgtgaatggtggactgtttgaaaaatccgcactacatgagagcacatgctagatagcttagcctgcggatacaaatatgtactctgtcgatgaaaaaacataaataagatatccaaaagcagggacacatttgctttgagagccttgctcttaaaatttcatcgattggtcatgatgatcattattcaatagtcaacaaattaccaatcgatctagttttcaaacaaatgtccggttcttcagatttgtgcac

SEQ ID NO: 868 - DNA, 1717 bp, Aedes aegypti
gttgtgatcagacttttctgagccgaccagaaaaagtcctctctctcgcggccaatcgattttcaaagaaaagtacctactaaaagaataagaagaaaaagaggctaaagtgatttttctgccgaaaaggcatcgaagaaaaaagcaaattccctgtgcactgtctgcgcgttccttttcgttttattggtcccagttttccgctatatttcgtgtgcgtttgagccattttcgggtcggatttggttccggtcaaaaatcgcggatgaaaaatttgcaatctccgtctggctgaaaattttccaaggtgcttgctgcgataagtagaaattttattccggaagtcgttttattttttctactttgattcttgattgctattggcgatccttcccgagaccggttttattttttttctgttccaatcttcctgctggtgggataccaaatttctcttgtaaggcggaaccgcgtaccggaagaacactggaagaatggcggagaacgaagatttaagtaatagtagtagtagtagtagtagcagcagggaggacatgcacttttttgagggagtcgagaagctgttggagatctggtttgaaccgaatccatccaacaaaaatgctgatctaaggaaaattcccagagccatgtgggatgcactgttgaaaacagtgcgatgcgagatcatcagtttcaccaggaacgagcaaatcgatgcttatgtgcttagcgaaagcagcatgttcgtatcgaagcgccgttggattctgaagacgtgcggcacgacgacgccgctgcagtgtttggaaccgctgctacgtctcgcatcggagattgccggctacggcgagatagaggatctgttctactcgcgcaagaacttcaagcggccggaaatgcaggtctccccccatcgtggtttcgaggaggaagtcgccttcctggattcatttttcgaagatggacgcgcctacagcctgggcgcgcttaatcgcgactgctggcatctctacacattgagccgcgggggagggggctccgccaacaaacaaatgctgaacaacattaccaacaacaacaacaacaaccaccatcatcatctgcataacatgagcaacggccatgctcagctgcaaacgcagtcggccaagatgaatctgattgaatctctgcagttacctgatccggatcagaccatcgagatactgatgaccgatctggacccgaaagtgatggctgtcttcaccaaagatgtgtgcaacacggccttggaggcaacgcagaaatcgggcatccacaagcttattcccggtatggtaatcgacgattacttgttcgatccgtgcggatattctatgaatggagtctccaaaagtggatgctacatgacgatccacatcactccggagcccgatttttcgtacgttagctttgagagcaatgtcgcatcctctagctatggggatttgattgcacgcgtgattgatacgttccaaccgggaaagttcatcgtgaccgttttcgcaaacaagacttcgccggcagcgaacgtgtcccgtgagcttgaacacctgggcaccatcgatcaatggaagcgtcgcgatattcagttctcgcggttcccgacctacgatctgacctacgcccagtactgcaaatacccaagctgaggtttaccgtgcctagccctcgaaggggctaaccctacttcccc

SEQ ID NO: 869 - DNA, 1928 bp, Aedes aegypti
gttatactttcaacaaatgaacgataagaatgatgatcatttggtgaaactctgcggacagttgaagaaactgttggacctaccgtctgtccttttctctatcatactgatccagttgatatcattcgtgcttgtattgaacattgaagaatgctcgccgctagttttattctcctggtggcgcaacaagatatcctgaaattgactaccacgcggcaaacgagcggcaagcttatgcttccttccgttctgatgcctttctcgatttccacaattaccgttattattatcgctttgataatgataaattaccgatcatcgcacgtttctgtttcgctctacgactgtggagcaaagcttttctagatgatttcttcagtcgatactgtggcgacgatgtttggtccgtggccaatcacccggttgctggccaactgttagtaaccatcactataatcgttgcagtgactgtattcgatatgcgttcacaatctctatcagcttttgttccgattaatatcagtaacatctttagcgtagccaaccacggcgaacagaatgctaagaaagagatcacagtgaagaaatacaaagaattacaagcaatttacagcaacagccggtggtggaacatgttctctctggatcagtttatctacaatcaacaacagcataaacagctagatgtagtagtcgttcaatgtaaccagcaccaccgagagatccaccaccaaggtagcacacgttttaaaatcctatacaaaacaatcgctattgaaggcaaccagttaatcaatgttgtagatttcaattttatcaacaattgcaatactccaattgtgcagattaaaaagattctcgttgaaagtataatattcgcttatctaatatcattggatttgtattcgtagcacaagtgaacaattcagattcaaaatcagcacatgaaattacaaacattacacaaacattaaaaacatatactacggatatttgaacaacaaagaatacaaagtattttaacaaaaacaaccagatttatctgtaattgagcagaactttcaactgtaatagtattttatatcccaatttccttactgtcaaacatcccaaatgaaaacgtctcaccaagtcccctaatatgaacaaaaaaaaatgatgatataaaacaagcgtcccaaatgacgttaaaacattatgactcatgatgaacttttcaagacacattaaatataaccagaataaagcaagaagctgaaaagccaattaaatataaaaagtttaataataaaaataatacaaattacataaactagcaattacgacaaaacagcagaggaatgtaataagatggttctaaacaaaactacaatgtcaagaatgatgaaacgataaaaaaatactagagaaggttttaccattgaatgaatattatgaagctcattgatatttccttacacagtaatactgagaaaacaacagataaaacaaggttaactatatggttgaaatagtaccagaatactgtttctgatttagcggtaggttaaaaaggttctaaaacctaaattaggctatgagtttttgagagatgcgcgcaaagcgttgactacacagaaggctctgtacctatatttttcgatggcaattaggttggaggagaaaacccggcttactggaacaatagttaggatgggaataaaactgaaaataaatggctaggcatatgcattatcaatgagttttgttgtcatttccgcacaaatttggaagaagtttttcgttttactttctaattccgttaggataatgttttttatgtctactaatttcaattagttttaaacattgaactttatactttctagctgtactacatttgcaaaatagattaacttagacttccattagtggtatctgggaaatcg

SEQ ID NO: 870 - DNA, 679 bp, Aedes aegypti
gatggccggcgtggcagaagttcgcgatcgcgatttattcttacgcgatttttcgttgctaaaactccgggaaaactcttaaagtatagtgaaaagaaatgcttttacatccgacgagttcaatagctgtgcaattgatgtggcaaaacaataatgtttcgaattcaagtggaacaaacccccccaagaaaatttgcaatttctggccgtaacaggagagtcctaccgaggtgataagtatgcgatgatttgcccagcctccgcttggaatggagtgtcgtttcttcggtgccgtgagcatacttcgaatggtactggagatagccaattcatcctgctgccgggtggaaaaatcctcaactcctgcattcaccaacttacacgacatgtaaccgatgtaccagatcagccgcaaggtacattgcaacggtgtggagcttcaaaagcgggaacgctctactggcgactacggtgaaacggatcggcacgaaaaagttgaacgagctctgcgatttatttcactgttggctgaaggaaactaatctctacctgaagagcctgcaggcttgaatttaatctctgtccactgcgggttctcggactatcacctgaagcgctccagtcgttatactgcattatttaaacgtttttaattcaataaaaatagaataaataatgt

SEQ ID NO: 871 - DNA, 940 bp, Aedes aegypti
ctccgtaacggttttgtatgagaaattcaacatttttgtaaggaacccattgtagagctagcaaattgttggccgactggtcgctaaaatacacaaaatacgccaaaaggataagcgaaacaaaatgagcaagcccaccaaagctaactacaggaagttcttcctccggaacgtcgaaatccctctggccaccagtaaagcacaggttatgaaagcttcccaaaccgccaacaccaaacagattcctaccgttggagcaaagcgctcatcgctgaatgacaaaccatccagtagcagcgtatcggtaacgaaaccatccggttctgccggcaacaaatataaggaaccggaattacacagcgctctcaatgtccgcaaagagatcgaaaaggttaaatccttgcacacgaaaccaccaaccagcatcggggaactaacgccgaagagtaagaaattcgtccgcgatcaggtcaccaagaagctcaacttccaacacgatgagaatgtctttaaaggattggttccggtgaatgtgaacgattcggtactgatccctaccaccaggaaacctttgaggagttcgtacgttgcgaaggaaaagcgagacccggagccggaattgggcgacttcctgcggcccattgccaagtgtaacgtgccgttggagccgtacttggcaccccaaatggccccaaggcgtcccaacttcaacaattttgaccacatactggaagtgttcgccaaagtcgatgtaggagcttgatgggttggatgtaggttacttctagtttaggttattgttaatgcttatttatatgcgctataataatgaatgttcaatgtgttataagtaattattttgtacagtagttctaaattgttcttcaacatgtttggatctatcgataattaatgaataataaacaaaatcatttcagat

SEQ ID NO: 872 - DNA, 2681 bp, Aedes aegypti
atggtagccaataaggataaagctaccaaacggaagatccccgctgtggatgatgcggtgaaagtcagcacagccaacggaaaacagcaaacgaaactgaaggaaccggtcgacgatgaaagtgccagcgattattatgaatccgatgaggagaatctgtttgcgagtatcgataacggaaacgacgaagacagcacggattccgaaggcgaaggtgaagaatccgacgatgaggaagttcaggaatttgagagtgcggattccgatttcgaagacgaatcagggaaagatgatgaggaagaggcggaagatgaagaagatgatgccgatgaagaggatgctgattctgcggatgatgtgaacagtgatagctctccagaaccagaagaggaggaaagcgatgatgagctggaatttgaggaagatttagaagaaccggagcaacccaaggcgattcagaaagtgattgttgggagacaaaagaagagcgttgaagcaactgcagaagatgaggacgaggaagatgatgaggaaacacgggaccttttggaagcggctcagaaggaagatgagaaactgggtgaaatcgatgcagcattgggaattgctcccgccaaaacgaggggtgtcggaatctttcccccggaagccaaatccagattcaaaggtggcaagaatcaggatgaatacgctgcgggagacacttccgacgaggaagacattagaaacacagtgggaaacattcccatgcattggtacgatgaatacaagcacattggatatgattgggaggggaatcgattgatcaaacctgcaaaaacggatgccattgacgattttctcaagaagatggaagatcccaacttctggcgcacggttaaggatccccagactggtcagaatgtggtgctgacggatgaagacatcggactaatcaagagaatcatggctggcaagaatcctgacgagcagtacagcgattatgagccgtggatcgaatggttcacctcggaggtggaaaagatgccaatccgtaacattccggatcacaagcgatctttcttgcccagtaagtcagagaagcaaaaggttggtcgacttgttcacgctctgaaaatgggttggattaaaactcgtgctgaaactgaaagattagccgcactcagcaaggggcccaagttttacatgatttgggagagcgatcacggaaaggaagaaatgcgaagaattcacgatcacgttgttgctccgaagcgtccactgccgggtcacgccgaatcgtacaatcctcccccggaatacctgtttaacgaacaagaactggcggaatggaatagtcatgaggaagaaccgtggaagaggaagctccattacgttccccagaagttcaactctctccgggaggttccgtattacgataagtacatccgagaacggttcttgcgttgtttggacttgtatctttgccctcgcggtaaacgaaccagagtcacagtggggccggaatatctgattccaaaactgccctcgcctaaggatctgcagcctttcccgactttgcaaaatcttatctacaagggacacactgacatgattcgttcggtgagcatcgagcccaagggagaatatttggttaccggttcggatgatcagaccgttaaaatttgggaagtctcgacggcccgttgcattcgcacaattccgacaggcgatgtggtgcgctcagttgcctggtgtccaaacagcaaaatttcgctcattgccgttgccagcggaaaacgtgttctgctcatcaatccccaggtgggagacagcctgctggtaaagaagacggacgaccttctcgcggaagctcccaaatccgaaaccgtggacaatgagcgaattactacggctgtccagtgggtggatttcaccgaagaggaacgcaaatccggcgtacgaattgtgatcaatcacttcaaggaaatcaagcaagttacctggcacggacgaggagattacttcgccaccgtgatgcctgaagccgctaatcgttcggtactgatccatcaactgtcgaagcgccggtcccagtttccattctccaagagcaagggtttgattcaatgtgtgctcttccatccggtgaagccttgtttgttcgttgcgacacaacgccacgtgcgagtgtacgatttggtcaagcaagagttgctgaagaagctgttccccagctgcaaatggatttcgagcatggccatccaccccaagggcgacaatttgctggtggccacctacgaaaagaaaatgatgtggtttgatctggatctgtcgacgcgaccctatcagcagctgaagctgcaccattctgccatccggaacgttgccttccatctgcgctatccgctgttcgcttcggccagcgacgaccgcagcgtgattgtgtcccacggaatggtttacaatgacctgctgcagaatccgttgattgttcctctgaggcgacttgaacaccacgaacgtgttaatgattttggcgcattcgatgtggtgttccatccaacgcaaccgtggctcttttcttcgggagcagacaacaccgtgcggctgtacacgtaggtaagcagtaccgaagggtactatttgattatcatttatgttagcataaaacatgcttattttcaattaaagtaatatgt

SEQ ID NO: 873 - DNA, 848 bp, Aedes aegypti
cccgtgagcaggtagcttgccattttagaccttagtcacatattcgtcgttgaagcggaaacttcactttatcatgcatcggaaaacggaaaacgtctttgtggcggcggtcgctattttgtgctgctcggtatattcggccgccttgggggatgaagaacgaaagagtatccttacggtgaacgatgaagatcatcaacagcaaaacttatcgctcctgaagcagcggatacaaacctgcatggatcgactggatggcaatatcgagtccagtcaagtgctgatccatacactgctgcagcagctgaatctgggagaccctcggcggacgtccgttgttgaagatgccgaagctaccgtgcagttggttagaattcaaacgacagatgacagggggatgctaatatggacctcgaatggtttctacatatcgctatcgttcatcttgttcctgcatttaatgatactgatcgtgttcggattgataagcttgtgtttatcgaaaacagctgccagtgtggtaccgagagtaaacgtgtagcaaaacctatccagtggtgttcgtagagcagttccatcgttgttaatcgaagataacaatttacacatgttcttaacgcgttcctgaaaggaatcggatggacagcagtaccgagctggtgccttccatttttgtgtgatatataagttcaaatttttcgtaaagtttatgacagtcataaaagtttgacatggttttatgagtgtcttgttgcaaaagtgttgcataaactggttgttttattgctaacgatgctgaaaaggagtataaataatatttattgtcaaaagttgtggtttgtttggat

SEQ ID NO: 874 - DNA, 1687 bp, Aedes aegypti
tagatgtggtagaagaaggaacatggcttaaaaccaaaacaaggggctcgactttttgacttcgagaccatttcgtcgttacatccttgattgtgttctcaaaacgatgatcatattgacgtaaatccttttacgcatgtattccctagtcatgcctctcaaccatatcaccaaaaatatataactgtcccatgaaactgataagcggtcatacgaatctaccggatgatccaaattgtcttcaacgacacttatttacatattatgatggtgggaagaatcggaatctaattcccaaaaattttggtataggttgtcgaatgcaatgaactggcgctgctcaaacctgttgcaaaatcagtttggctgtagtcgtctggtgaaacggtcgcgctatcgtttactcgttagacagtcgagaagcaaacagtgaaagtgatagttgtctgctcaatacttagatcaggttctacgtggcttgcaatttgtatcagaagcattgtttgactaggatcactcaacagcagaatggcgacaccgattctcatcatgacccagcaaggacccgcctttgactccaactgcatgacgctgacgcgtttcgtgctacaggagcagaagaagtacaaacaagccaccggagatttgtcgcaactgctcaactgcatccagaccgccatcaaagccatcagctctgctgtccgtaaggccggtatcgctaaactccaaggaatctctggggataccaacgttcagggcgaacaggtcaaaaagctagatgtgctgtccaacgaaattttcatcaacatgctgaagtcttcgtactcgacgtgcctgttggtttcggaggagaacgacaacgtcatcgaaatcgagacggaaaagcgaggcaaatatgtggtttcgttcgaccctctggatggttccagcaacatcgattgtctggtttcgattggttccattttcggaataacgagacaagctaacgaagcaacggaaccatctgtcgcagatgcactccagcctggcaataagatggtagccgccggctatgcgctgtacggttcggcaacaatgattgttctcagtctgggagaaggcgttcatggtttcatgtacgatccatcaatcggagagttcgtcctaacagactacaacatgcgcattccggagcggggtaacatctactccatcaacgaaggatatgcctcggcgtgggacccatccgtgtacaactacgtgcaggacaagaaggaccccgccaagggaaaaccatacggagcgcgttacgttggcagcatggtggccgatgtgcaccgaacaatcaaatacggaggaatcttcatctacccggcaacggccgccgccaagaatggaaagctgcgactgctgtacgagtgcaacccaatggcttacatcgtcacgaaagccggaggaaaggccagtgccggtaaggataaggaaatcctagacgtagtgccaacctcgatccaccagcgctgtcccatctatctgggctcgaaattagacgtcgaagaagctcttagttatattaagtgagtctactgtgttcagtgttttactgtgcctgttgttgttatgaacgagattggtttgtcctttgtatatgttggaaaaggtgaaaataaataatgagatattcaagtaaattttcattacctttaaa

SEQ ID NO: 875 - DNA, 1554 bp, Aedes aegypti
aagttcgaacaagccatggaggtgattgcgaaaaatggcggcaagtactcgttggtcacggtcgctcggctgtacctggaccatctactgtcgttgcaacagttcgacgaagcggccaaattatgtctgcgtgccttccagaacgacaaacagctgtgggaggaagaggtgtacaaattcgtcaaagtgaaacagctccgttcggtcagtaactacattccacggtcggctgagtgcaagctgaatccgcacgtgtacgaaatggttctgtatgagtaccttcagctggatcctgaagggtttctgcatctggtcaaagagtggcaaccgggactgtacaacactaaggcggtgatcaatgcaatcaacgatcattttaacaaaaaggacgcaaatatactgctggaagctcttgctatactgtattctcacgataaggagtacgacaaagcgttaacgatgtatttaaaactgcaacacaaggacgtattcgagctaattaaaaaccacaacctctactcggtcatcaaggacacgatagtgcaattaatcgaattagatagtgataaagcaatcgccatgctgatggagaaggacaagattcccgcggaagatgtggtcaaggagttggaaagtcgcgaagactacctgtatcgatatttggatgcgtacgataagacggacaactccggaaaattccactggaaactagtcaccctctacgcaaagtacgatcccagcaaattgctcacgtttctcaaacgatcgaacaactaccccatacaggaagcgttcgacatctgtaagcagaagctgttctatccggagatggtttacttgttggggaggatgggtaatacgagggaagcactatcgatcatcattcacaaactgaaggatattcagatggcgatagatttctgcaaagagcacgacgatatggatctgtggaaagatctgatcaacgaatccgtcgataatccatgcataatgaccaagctgctggatggcattgctgggtttatcaatcctgaaatactggtgaataaaattaagaagggccaggaaattcccgggttgaaaaattccatcataaaaatgttgtgcgggttcagtcttcaggtttcaatacaggacggttgtaatcagattttggttactgactacttcaacatgcacgaacgattggccaaagtgcaacagggagcgcttccggttactggggacaatacgtgcggtttatgtcgaagggatatcatcgtcaaagatccaccacgaaccgaaaccgatgtagtagtgttcaactgtcggcattatttccacgagaattgtttgcccgataaatacaatacggaccattgcacagtatgtaaatcgcgcaaaccgtgagcaaaagggtaaattatttgttggtacgattcgcggtcaatatttagggatcgtccatcttgtatgttatgtaaatcgaactagggaacttattgtagcttttcgctgttttataatttttaaagtatgcttatttatttttatacatgatactcactcaaagag

SEQ ID NO: 876 - DNA, 6005 bp, Aedes aegypti
agataggcgattacctttctgttcgcttaaagcttttcgaattttgtgcaacggtctaatgctatggaacacgttcatagcgaaattttacctccttccgtatctaccttgctgttgatcttttgcttcgcttttcgcgcggagagcggtggtccgccgtcgtccaccagtcactagtctgtcagtcagtttcggtgcagtcacttttcttctctcgtgtcattcgtgtcctaagctttatttgtgtgtcgtcgtctatatcaaaattcgattcggagccaatgttgcatcagtaggtgcgaattgagaaaacctggtgttattgtgcgtgtttttccatgtctatcgggataaatttacgtgtcaccggccacacctcgatcgggggccggaagtatcaggaagatttcttctccgtcgcttaccagcagacggaaaacgaccaaagtttggagtacgcctttttcgggatctacgatggccatggcggagcagaagcgtcactttacgcaagggaacatttgatgaatacgatcgtaagccagaagctgttctggtcggaaaacgacgaagacgtcctgaaagccatccgggacggttacatccagacccattattcgatgtggcgcgaacaagataaatggccaaaaacttcgtccggattgcctagcaccgctggaaccaccgctagtatagcgttcatccgaaggggaaagatctacatcggtcatgttggtgattccggaatcgtacttggataccaaaaggataaagaatcccactcagggaatgaagcctgcacgtggaactcaatgcccctgacggaggaccacaaaccggaagcgtatgccgaaaagatgcgtataatgagctgcggaggaaaggtggtcaccaaatccggcgtaccgcgagtggtttggaatcgaccgcgtattggtcataagggtccagtacgcagaagtactcccatagatgagataccgtttctggcggtggctcgcagtttaggtgacttgtggagttataattctgcggtggacgagttcattgttagtcccaatccggacgtatccgtaatagaaatagatcccaagagataccgatgtttgatatttggaacggatggtttatggaatgtattatctcccaaacacgcagtagagattgtgcatgctgctgaaatggaaaatatacgcatagcgctagagggagggtgcgattggaagaatcccagcaaattattggtgaatgaagctttggaaagatggagcaagagcaatatgaaggcggacaatacgtctgtagtgataataatgttggatccacctgggcctcccaaacgagatgtacttcgatcgatgagaacatcgatacaacacattgatcatcagataaccaatacccaatcattggacaagttgaacgttacattgtatgaccacacaacgagagagttggttgatctgtcccaagttacctgtccagaagtagaacataacactgtacatcatcaacaacagtatatggaatcaactccttctacttctgcctatcatcacgacatggtttacacggatagttttgccgaatcctacaacagttttttgaacaccagcctcagcaatgatcattcgtatacaaatcatacccctactgctcagcattactccctacaacatcatcatcttcatcagcattctcaacaacagcatcatgaggatctccgcaatgaaagcctacaatacgttgcaggacacgaccgaaatcagcacgaagaaacttactcactaacaaaccttcaaactaaatcagaacgattgcagtcggaaatgatgaaagcatctacctcaactggatctgcctcctcgactcgttacgcacatctggaatgcaccggaaatttggctattatcgaaaactttcacgattatcagttaccaaacgtaacaaatcactcagctacgaatcaaccttatggaatgcattatccaatccatgcgtatcaacaggagaatcatcatgaaccgccaacgtatcaaatggaacgttacgattaccatcattctgcacatcatcatgaaccagttagctgtaattacggaagccagcattatacggcacacgatctatcggaacataactaccaaaaggattccttggagtatttatatccggaggatgaaccaggtcctagtaccagtcaacaagtccatgaaactgagaaacttgacgcatgtatagtggagtctacgatagtaactagtttagctaataccgaaacaggtgatgacgcgcggcattctgtgataaactcatcgaagaacgaagccgaggacatccagatcaatgaaatatcatcttcgaacctgggtgcgctatcacctgccctggacacgtccattcaatccgacagtgatagctgcgtaagcgaggacgaggcgaaagcttcatcatctactgcaacgagaggtaaaagagtatctgcccccgatggcactgcgaagggaaaggtacgtaaaactttgaaaaatattgtaaaaatcgtttacgagacgcggagcagtcaacgtccggtccggacgagggggcaacaggaacatgtctcctctattgcgaggagtaaaacgatacgcacgaaattcggcaatattttaccaaagggctccaaggtgaaaaaaatccttagttttaagagacaaagttttaagaataacaaaacgtacagtttattggacagtaacagtagtatggtcagcactatcaataacaataatacttttgaaattacgagtaaaacggcagtaagtgaagtagagaaacccgaggaaaagcgggttttgcgttcggcagatcaaatgaaaacagcaactgttggcattcagcagaaaaagttctcccaaagagcccatcggtcagtggagtccattacgtttattagttccactagccctaagtccagcggcagtattccaaagcaaacgactgcacttccgaagcgaaagatgttgcttcggaaggtaacgctggatgcgaaacgtgtcaagcgtcgctaggttttctctgtttaggcacaatctgggtcactacaaggctgtgaagtaatcttttaagcgtttagattcttctgatacattccggcggttctcaagcagacacgtttcttcttatctcaattgagtcgtggagttttatttagtttgtacctatatttatgtaatggtgaacaaagtttacaatgggaaacgctttatttgattgtgtgttgttagtctgcaaaagtaataagtttgtaaaccctttttctttgcaatgtttagagctgtgaaatgttttacatcaaggacgtcttcatataaaatacaacaaccgttctcgcataagtttgggtgacaaatgtgttctttattcgaaaaaaaactcaactcgcattcaggacacggaacgtatataagggacacacgattttcttatgaaataacaacataagaagcattttgttcaattcaagaatcttataaattcccacacagacttatggaatgatgctcataaacagatataatttgtaatctacgtgagtgtaagttggttgtgtcatcaccaaaatcatccaccttacactttcacggtcacggtctgaaaagtctgaatcttattctctttctccgtctttactctctctctctctcttcttcttcatcaagtatctcttaaccaccatgagaatccctactctgtaacctatcaatgtgaggatcaccaagatactcaaggagaaaactccccagaatgtcaagatgaacggcatatgccatctcaagtctgtgatggattcatcatcagagaattgatattcgattgttgagggtaccacgatgtagttattagttttctgcttgtcttcagtttctataggaaaaatctggtgtgaactaaaatgattaattctctaataatggtcccataaaccaaagttttatacaatatatacaatccattgggcccatctgtcggggacacgaacgacgaaccgtaacttttcgtttgcgaaggatttttttatagactcagtccgtcagttcctgtctcgatctgattttaacacgcgtggtaggatttgggtgaagtgctggggatctatgaatattccgagtttaaagaacttggaatttaggttcggtggaggtggcagaagaacttactaccggagtctgaatttcaaggatagtcaagggttttggaaaggaggtggactttttcctcgttcgagaggccttccgagaaagcctattgaactaaggattctaaccttcgctctcagctaagtagtaatccggtctagtgcaaggtttccaagtgttcgacaggattcaccacttttccgggtttgaaggtctgaatgagaaatcaaggatttatttgatacaaagtttgttataaaaaaccctgcctgctgatgaatctcaattacatccttgattgttttgactgcttgcgttctagtatcaaagctgtcaatataaccgtctgcatagtgctgttttacgactgcattcgctgctcgtggttttgtcgaaatgaactgctcagcattataattttttaccacttgagcgcatgccggagaacaggttgaaccgaacgtcatcatctacctgcattgtgtaaacgtctggcttgcggctggtgtcaaaatcacgataaaggaaaaaataatgccataaaaagccaattcaaaattcatcacaaaaaaaaaatacaggaatactcacggttcataaaaataaaaataaatcacttacatggcttcagaaaatcgtcaaatcatcttggtttttcttctccgtagttcctgaatagtaaaaaaaatgtgtctaaatatccatacttataaattttgtagtgttaatttactccccgttatttagtttcgtctcgttagcaaatgcgccggcgtcgtccacggcgcaaaacttctcgatgaaaatttttcccacgatcgtggtggtattgatctgcctggcctttggtcgtcaatgttgtacgctggatgtttttggattccattcgattatctcctcgatttcctgtctcaggtccatagtgagttcgttatgctctatggcatgtgttgttgcactgtagcggctgctgccattccgaatactgccgttctttaaaccagtcactactgttcgataatgttcacggtggtttagtctatattcatactcttttcacatttttgttcatcacgatttttattggcaggtttgattgtcccctatttttcaacttttacgcttgctttgcacgggcactgaatggttttagtctattctgcgaattatagcgggattgtaacacggctcgcagtgcgctctgccacccgctccgtggtggcggtgacatttttttttcacaaggaccagcccaattttgaaaaatgaaaaaaataatatgaaaatcaatgataaaggaatatttgaaaaataatcatgaatgcgagaaatccttttgagtgataaatctaagagctggttccgtaagaatttctctgagtagggacttatcccatgagagagagatcagcagttgcatgcctctggccaaagatattagatgccaggacaatttatgtggcaatctgaccttggtctgtcaaaatcttaactgcctgacaagcttgtagccgattttcttgtggaacaatactagaaacataggacgccctggcagaaggtaaaaccttattcagaatctcgccatcagacgcacctgccacattacttaagagcttattctcctcaataccgaagcgtgatataatgaaaatgtgtttttctgctaaataattttcatcaaaatttgagattcatattgcagaaatagatcagatgaaatgataagcacgaaggagatgggtcaaatagatatatgataattggttatggttattttctatgaaaattgtatgaaaatcatacaattattgtggcgtgata

SEQ ID NO: 877 - DNA, 3135 bp, Aedes aegypti
atgctaaaggtgctgaagaacaagctggaaatacttctgggccagtgtcaggagcggcaggttgagattgagaagcaaatcgaggattacaaaagtaataagaaaccgctggttgggaagtcgaggacgtcagggtacatttgcgggcagccgtacttcaaggatgaggaattgtacccgggaccgcacaatgatgactatttgctgaggaagaatctgttgaaggagttctttccgctggatctgttcgagacgacagatagcaactggacggtgaaggataaggtgaacattctcaagggcgtgaagggacaaattgtagagtttgtcgagcgagagattcgtctgaagatcaaaaagctcgggaatgggttggaagctgagcggttgcgactggaaatgcagagtctgtcgcgccgggaagtgcacgatttgtgggaaagggttaagcacttcgccaatgagtatcccggtcagaagttcgagatcgactggctgcggatatcgaatgtggacatcggcggaaggcattcggtgtctgcttgcataggactgtggaacaactacatgcttcctggattggttcgcgacacttggaagacagaggaggaatcggttctgttggacgtggtggagaagcatggccgtcaggattgggcacagattgctgcggaagttcccgggagatcagcctatcaatgcttcgttcattatcagacaacgttttcggaactcgcccaaattaagcgcgaacgatggaccgatgaggaagacgccttgctgataaaagctgtggatgataacaggattgggtcgaacattatttggaacaaagttgttgagaggatgcctctgaggaataaaatccaatgttacaaccgatatatgttcacgctgataaggccaacaaagcacactaaattcacacccgaagaagattgcgtaattctggcttacgtacagcaatgtggggacgatttccgattcatcccagctaatctgttgcccggaagaactaatcgacagatttgggcgcgatacaatcataccttgaagtacgttaacaagcatgcaggctggacgattgaagaagatatgcgactcatgaactttatcaaggaaaacctaaccgacgaaggaccgagaaaaatctcttgggcagcctgttccaaagctttgggcaaccactcacgtttgagttgccgcacacggtactatacaatcgagaagttcctggaaaagcacccggatgccacattggatgatgtcccgagaaaagggaagaaactctcatccaccgtgacaaacgacaattggatgaagacgtttatcaatatcagaaatgaatcaaatgatcccaaaccagaggctgcgactcctgaacgggaagaaccgtccacttccggcggagcaaaaacgaaaaagagaagcaaacctcaacggaaagtagttaccgaacccaaaccgcgtcccttctcggacacgatcaaatgtgcgatcaagcaacggttctacgacaaattcaaatactcatttcactatcgattcggcgatcaaaccccagacgtccagaacagtaaggtattctgtttgaaccgggccgcttttcacttactcaactgcactaccagtctggaccacgtcagcacctatttggagagcttcaccccgaacgaagtgatgcttctgcgcagcagtctctccatacgtttcaacccaagcttggtgaactttttggaggatgccaaaatcgaagaaaccacccgactggatgcggaggatgaagccaattaccattacgctttggatacctttcgcgatcgcttccgaatgatgttctactggacgatgctgttggcacaggaaagtccagccgaagctagattcatagaagccgacgagcaacccaagccggaataccgagtggaagaagcattcggtaagcagcaaatcgcacttgaccagctagccgaactgtgcagcaaaagtggacctctgccgcaaggtgatcgttcttccatcccacaccataccccatccatcgaggacacaatcgccagcatggaacagatggaactcgaatcgcctatgaaagccgaaagcaacttccatcactcgtccgccaaggtgcagataattgccatcaagcgaatcaccgacacttccctagaaccggtcgacatcgatcaatttaacgatccgcctccaccggtccaaattgtaacggaaccaccgcctccagccaatcccccttacgaaataacttattctatcgcgccgccggagatgacgagccctttgttccaaaccgtgccatctaataagctcccaccagcagtacaattcatgggacagataaccataatcaacccggaagatttaccagcagcgcagataccggcaactgccctaaccgttgagccttgtcgctcagatgagacgacgatctccacgtcgcaaaacaaccaatcaacggaagagatgtgccctgagccgaatcagttgccgatagatgaaagaggggatgaaacaccgggcgagacgttggatgcgattgacgaggagccatcagcttcggacatccatcatttgatcgatgaggaaatccgcgaccggtccgggacaatggaagcgcttttgaagaagcgaaatgttgcgttcgaacggctgaaacgggaacacgcaggtgcgagacaagtgacacaggaaacaccaaccttcgagataaatgatcggctgcaaaagttggtggaaatgcaggagaatttcgacaaaatccagtgcgaaatcgaagacgcagcaacagaggaggaactgccgtcggtgctgaatgtgcgagaggattacgagaaactgttctacattaccaaaggaatgtttactcgtatgctggaggtagagcggccgagaggatcctactgcggaagtagcgacggtacgtgcattgaaccggatagcggactgaaggaagctgttcgtgtgctattggaaacgcaaagggcgttgttaacaagacaagctgcagcttcaactaccgtggaggagttagctggccagtttctttttcgctataatttcgtcggttttcattcgtcgttggcttcgtccgcttttgcgtgttgctccgtcgattaa

SEQ ID NO: 878 - DNA, 2635 bp, Aedes aegypti
ccccacatcgccctatttagcttgcctcgtgaaaaggcctattgttgttcccgccctcattgaaaatcgttggttatcagggggagtgcccaccaaaaatagtaatcgcatgtttcgttttgctcgccctttcttgcaagctgtcaacgcatcttcgtcctggtttgatcgttcattcgcatgtgtgttttcgtttggtgaagatggtggtcaaagcgacagaagtgaatccacgtgccgccggcaaattcgattattccgaaatgcagcagactacggtaactggcagtaaatatgcccggatacagatggaaacgctttccaaggcggaagaaaagtccatccttgtggctaaagagctgaagttcgtgaaatcgctagccggtaacgatgcgaaattgcgccgcaaagtgatgaaaaatcttaaaatttggttggcaacgcgaagccggagcaccttcgcgttcaccgatacggattttctccggctgtggaaaggactgttctattgtatgtggatgtccgataagccacttgtccaggaaagtctcgcagatgaaattgcctcgctggtgaagtgcttcgaggacatttcggtggcattacaatattttgggacgtttctagaaactatgtgcatcgagtggttcggaatcgatcactggaggatggacaaattcatgatgctcgttcgtcgctgtactcgacagatgctaatagtgctgcacgaagctgaatggccaaaagatcacgtcagcgaattgatgaagcacattgagagaactattctcaacccagacaaatctccctttggtctgacgaaacatttcgacgatctgctgctggaggagattgccaaagttagtgagggcgaaatcgaaccggaaattgtacatattattgtgaacacttatgccattcgtttgatcagtaccaacgatatgcggttaatgaagcacatcacttcgagcatattccacccgttgctgtatcaatcggagttgggtcaagattatcaggaaaagtttgagctctggaagaaaactaactttgttacgggaaatatcgatgacgttgattttgatattcagtacgagcaagatgacgatgcagaaggggagcaggacgatcaggatgaggaggaggaggatgaaagtggtgctcacaccggagagaaagtgtatgatccacgtgctggacaagtagacgtcgaaatccacgagattcggttcgatccgttgaaaattgtcgaaatgtttgagagcaatcgctttaaaccgttcgtcacatcgaagggcaaaaagcagatgaagatgttgatgagacagtacaaaaagttttccgaaggtatttttccacttggtatccagtcgatggaaagcattgccaagaaggactatgccgttgacattgatgagcaagttgctgaactggaacactaccaggaagaagtggtaggcgagaagattcccaagaaaaagaaacgaaaggaattggcaaagttgaagcagcaacagacgacagagaagaatcccaaaatcgatgaattaaatgtttggaccgaaactgacgagaatccagaaaattccgacccgaaacctgctacaaaatccgattccaaaaagaaaacccggaaaaaggtatccaaagcacaaataaaggaagaaaagctgagaaaattgaaagtcaaaagagaatcaaaactagctgccataaaacaacaaaagcaagaatcaaaagtcgttaagaaatcgtcaaaagttgtagcagaaccgaaacaagacttgccgaaaaaggtggaagtagtcacacagagtgcgccaaaggctgagcctaaaaaaacaaaatcgaaagccgcattcgatgtacatgacgagtggtccgaacctttgaaggaaggcgaaacggaatttttcattccgtcgaggaaaactaaactaaaggaagccaacaaacagatcagcgaggaatcttcatccccttcccccagtaaattgaaacagtccctcgtgaagaatccttttgccaccccgaaaaattcatccaaattgaaaaggtcattggcaacaccgcaaacagacggcccttctgagaagaaacgtgttaaaattgcgctgaacaaaaatatcttccaggatctgcatcagcacatccagcaggtgaaaagttcgcccaaggtgccgtacgattccagcaagaaaccgtcgaagggagccttgaaaccgaatctgatgccgagcccgatcaatccgttctaccggaagaagattggattaaaactgaacgatacgctgtaagccaggtgaaggcagaaggcgtaagtacctttgtcatacctacacacatacttgcaaagttcaatgtacagttttcgcatatttgttcgtagtttatgggaggacataaatttaagattttcgatagagatttcgtgttttgtaaaatgcataatctcacagccatggtccggtttgcttttgcaatcttagggtaggtaaacctggggttttcatattattgatcattactgcattagcgaaagttgatgttgcctgataatgagtagtagttagttgatgtaaactcaaataaacaaagggtgggaggtcttcagattcaatgtactgtcatgtct

SEQ ID NO: 879 - DNA, 3240 bp, Aedes aegypti
aaacaaaaggcgcagtagtcgaagcgcagtttcagcgaaaacattgaagagaacacatctgtttagtgaaaaacgctcctttccgataattaaatattttgataagagtgaacaaacagcaaaggctagtgcaaaaatgaaatttcaatacaaggaagaacacccattcgagaagcgaaaggccgagggagataaaatccgacgcaaatatccggagcgagtacccgttattgtcgagaaagctcccaaggctcgcattggtgatttggataagaagaagtatctagtcccgtccgacctaaccgtcggccagttctatttcctaatccgtaagagaatacacctgaggccagaggatgccctgttcttcttcgtcaacaatgtaattccaccaacatcggctacgatgggttcgctctactcggaacaccacgaggaggattacttcctctacattgcttattccgatgagaatgtgtatggaaacaagtaaatgacgagagtgatatggttagaaaaggactgctataaatgtattttctatatatgatatttcctgttcgttttatgaaaactgtttgccgcacgcttttgggtagatattttcagttcaaatatagttcagttaactatctgcgacaccaacatccgttaacgttttcccgcgttacgatgcatttgaaacaaacccaatctctgcctggtgtatgaggaaactgataaaaatagacacctgtcaatttcattgagttatcaattattctctttaaatattttatctggaaaattcgaaagtataaaaacaattcaacaaatcttacattctgtctaataaacagtttatttttcagaaggcttcaaataattcttttatttcccaggcaaaatagatccatttactagagttgatatggtcactttaaaggggaactccaagataatctataaatcagtgtttgaaatatatgtgtaacaagattaagtttcgttaatagcttttttctatcatattgagtcttcaaaaatgtttccttctatacatcgctatgtatggttttcaaaattaaacagctgaagcagttaaggcaaatacatattgggagaagagtaaacataaacctatataaatactgaaactattcatactgttcaaaatattaaaaaaaaacatataaatgcaacaaaatgtgtggaaacacataccaaaaacacatttttaaatttaatttctcgttttagatttattagtaaccacaatctgtattttattcgcttaatttacacagatacatggaataaactttaagtataagtaggtatgcgattcatgtttatttacttcttcgaacactccatgcggcatgtaattcattatgaagaaaaacgctcggttctggctgctagcatgtacttcgtctttgaatcattcgccaccaatacgtctttgcatcctgctttccgcataacaccctctaacgcagtattaaacaagttaatagagcaaacttttaaaaatttctaaaaaaaactagaaatatttggaagatctcatgaaacctactgtaacagtaacaagtggagaaatcggtggaagataagtggaaaaatatgtggagccacgttatagtttgaaagtttctgtgtggcgtttagaattttgcactaggatttactgcaggcagaatcagtgaaaaagtgacattggagactctagactccatagagactttttaaagtcttgatgaactcaaatggctgctttcttatgtatacccttatcacggccagttttttttttttttttttgtaaaatctttattcagttctgtttagttttatataatacagtttacaagagttatgattttataattatttttaaaattaaaatgcctacacttcgctatctagatgaaattttaatgcatttaagtcgatattgatattacaattaataataaatatgacgtagtttataaagtgtttcaataactgcgtttttgttctagattgtattttcatagcaggatacatcaattcatcgacagtaaatgttctgagagtaccgatagttgataatttttgtttcaaaacattccaggcagatgcaactctagagcaatttgctattttatgttgcaggttttcaacactcgcgttacagtgtaggcatattgaggagtctgtcctttgcattttaaacattaattcttgatgatcgattttaccattaactaatagataataacaatgtttttctttgggtgtaagattcctggaatttacattgcgccaaacaagaggccaatcaatgtttggaaaagtattcactaccttaggcttatctaataggtttacaaaataactcgtaattacgttacttgatggattttctctaatttgtactggtaaatacaccatttcttggcaaattgttttgagacacggtgcgtttgttggaactattgataggtttggaggattttctagttgctgaatgaacgacgcatagtaaggagtgcagtgtatttcttgcaaatgacgacttatcaataaagctttagatttcaatgacggtaaatgtaagttttgcataaggcaaggctaattgcgttataggaacacgtattgattggccactccataaaaaagagcccatcaacgatgttatttttgctataaatgctttgttaatggccacaactgatgaaaggtaccaaattttaaatgatatatgcgtgtttaataaaagaactttgtgagcaagcgtcaaatctctcattttgtgaatccataactgttgtgagaatttcgcaattgttgactcccaatttagtttagtcattagtctgatggaattagtgaagataatgcccaatattttgattttatcggcggactgtatccatggtatgatgcagtgatcttgtgctctgtaatggccaacatctattgagaaagttttgtttaggttcaagatcgcacctgagtgttttccgaaacgctcaaatagagtttttattctctcaagtttttcaaaattagtggtaattacagaaatgtcatctgcatatacaactacgacatcatcctgatcgttgcagattaagttcaatctgtgaataagtggttgcaagtaaagcacaaaaaggtgcattgagataggatctccctgccgcactgagcatcctatttcaaacgcaggggacagataacccacagacaaacagacgtaacact

SEQ ID NO: 880 - DNA, 1729 bp, Aedes aegypti
tggctgcatacgtcacacgtcaaacaaaagaaaaactccaaaaaatcgtcgtcggtgtattttctcatcatctttgtacaatctttgcgacgacactttttgcggaccggagtttggaaaaaaatagttattccacttaatttgtgaagtgctcagtgcggtatttgtgattgttcgattcccgcgaggttcaacttggcgaaaaacattataatggaggaaacaccatcctacaattctggaaaattgtccgacgcatctcccgtcggttcggtgagctcggccgaaattgctcatgaattttctggcctgaccctcgaagagcaggaggcgcagcgcgctgaatggagccaggaattggcacgtgtcgaggaagaaatcaccaccttgcggactgtgctgcagtccaagattcgacattcaagcgaactgaagcgcaagctgggcatcaccgtgtggaaggaaatcactgacgatgttagccaaggcctcaagaatgtcaaggagagcaacgtttatcaaacggtcgagaccaaagttggggaaatcacgacagcagtcaccagtgccccaatttatcaaaaaactgaaacggccctcaagacaacggccggtaagactacatccgtcctcggtggaatcaccagcaagatgacgcagaagatatccgagatgaaacaatcggattccttccgatcatttgaagaaagggttggatcggcctacgagaacgtcaagtctaaagtatcctcgcgatcaagctccgtgcaaagcttgtcagatttacagaacgatgaacgtcgtaactcggtaacgactcccacagcaattccggaagagaaaaccgatccttaatcacttatttgtcgggaacaaacacagctgtagtaacagcggtaagtacagatcggaaaacactagagagcatttttcacgtttttggctacagatttgtgaggtaccactggagaaaacctagacatgttattgcaatttatatgttgttcttagggcactctaaagtaacattaagaaaaaaaaagctatacgataaaaaacatgatattttctcacatgcaaggctttggatgtacaccctggacgtggaaacaagaatgactaccaattgaggtgcaaagtgaacaaccataactcgagagtaaaattagatcctctttgttctacaccgccacctcgttggctaattaactttagtttatgatatcacacgagttcgtaggcagcgtagagccgacgccactttatttttctcatcttaaatataaaacaacacaataaaaagtctactgaatgtgcctaaatgtagtgtttttccatcgtggaactcatgaatagcgtttttgatgaattttcataacttctatctctgaaagggtgcgctctacctacacacgtgtgtgtacttaaacataatgtgttattcctgacaattcaaatggccaacaaattcgtcgcttttctttcggtattctgtgcccatctaataagagcctacaaaaatcatataagcgaactatatttttctttaaacctacatcaataagactataatatttaaatctatttagactaaactaaacatataccttactttgaaagtagtggaaggtattactttgtgaggaggaaacgatagtatgtgctcataacggctggagaaggcaagaactgtgcattgcattaatacattctataaaatgatagctgt

SEQ ID NO: 881 - DNA, 1357 bp, Aedes aegypti
atgcggctggtgacgggacaacgggttctgtgggcgggagttgttctgttgagtggactcgcgtcggttaattgtgagatgcgaaagtcatggaaagtgaaaactagcaacacgggagacagtttgccgtcagcggtactaacgcctccggaaccgggtgaattcgagcgagtttcggcaaagatgcctaggtttgaacgggaaccagtagaacaggaggctagaatcgaggaggttgatactgtgacgttggaaaagaaaagtgaagaaccgaaacgggaagagttaaccgaaacggcgacagaggttaaggccgcggcaagaaatgttccagtcaagaacaggttgcgaagtacatatgtggcgaacaggactccatcggtgtacaattcaatcagagaaagtgtcaaagctgctccgtttatagaagatcacgaatccgagattcagattgatgatttttccgcggatgaaattgacgaagatgagtatgatctaggattggaggataatcaggtggaacagaaagacgaaaagggatacgaagaaggatacaaaatgatcgaggacattctggaagaagtcaagagttcagcgtccgatcagaaaccgggtgaagataaagaattgcataacgaggaggaagcctctaaaatggaagaaacgaaaaactatgattttggaccggtgctcaacatgacaattgacgaaccaaacaacatcgtaaacgtaaagttgaacgagaaagtgttgaaggatatcttcacaggtcgtcaacgtggtggtggaggcgggaaaaagctgtggaaatacgccatgcccctcttcattctgccgttcctgatccagtcggcgatcattccgttcatgctgacgacggtgaaactgttcctgtttaaatcgttcatggccggcaagctggccatcttcctgctgctgttgggggcgttcaagaacttcaccaacaaaaaggaccgggaggtgtacgtgaaggatttgcccgagcggaggtacgaaccgtacaacgagtggccttatccataccattcggaggggaagggtcccgggtgggatcactgaaagtggcgaggtagggttcggattggtgatggggcaaggggagaactcatctgatgcgataacaaatgatcgatccaaatgatgatagtttgtaagatatatttattaaaatgtcgattgtataagttaatgcgaatgctaatttattttaaatctaaggaaagtcgaaaaatgtatgtctgaaatacttgagttattttgaatgataaatgcatgtaatagtactataagatattaaatgtattctaatgcgaataataaaataaaataattatat

SEQ ID NO: 882 - DNA, 2077 bp, Aedes aegypti
tgtgtgtgcgcctgtagcctttccgcgtgattggaaagagggcatgtggcacacgatgggtgcacttcccacgttaaattctccgggcttcataaatcttttaaacgtccttcggcaagcatcgattagaacggttatcggttttgaaacgtcgctcagttcgttaaggtccttcgtttgaatcggaagcaacactattctccgttgatagctcaatgtcccattggagaggcatcggtcggttgtgaaatagttgtgactcttagctattacttggaatatggccctacatccgctgtcttacaaggatacggcgaacaaatctccgacggtgctcggtagtgtgacacccggcggcacgatcgcatccaaggtcccattctccattgaggatatactgtttcaaaatggatccgtcactcaaacgaataacaacaataacattagtgctaatttcaatgtgaaatcggccaaacccccagggtctccttctgggtcgcaagtgctcgacagtggtattgggggtagcaatagtagaagcagcagcagtaataatagcaatgcctcggcggactcctgtggaggtccccgcaaagtgccccaattcagaggtggtgatgctaacggaaacagctgcaacaataatagtagtaaatttagtgatagtaacgtgatacgcagtgatagcaatagaaacaataaccatgggccagccgtattgaatggattaagtggatgtgaagaggattaccgaaagccgttgccaacagaaaggtacaacaaacttcctctgaacaatcaaggtggtccccaacaaagtggtccaccagggccccagttcagcaccccaaacccgactgtcatctatccaggaggaccgtatggcgatccaggctatctacaaatggcactcggtgcctatctggctccatcggccagtggctacaaaacagtagatccatactttctttcccaggcgggcctttttgccggatctcctttgttcccgggaggtggttgtccggacatagcacttggcctaggcatgggaatgagcgcactgaggcactgtcggaggcggaaagcacgaaccgttttcagtgacccccagctgaccggactggagaagcgattcgaagctcaacgatatttatcgacccccgagcgagtggagctggcgtcggctttgggtcttagtgagacccaagttaagacgtggtttcaaaatagacgaatgaagcacaaaaagcagctccggcgtcgagaaatcaataatgctgaaccagttgacttctcacggaacgagtctaccaatggtggagcatccggaactggcggtccgaatgcatccaatcaatcaatgtcctccggagttaccgccaaccgactcaactccagcggagccagcgaaaaagcattttcagtctacaatagcaatagcaacggcggcaacagcaacaaccatcttcaccaccacccacacggtggaaaaccgggaaaaccactgggtccggcaccgccacaaatgggaggtatcctaaaaggactgcacgcctcggcaaactcttcgttcagcttggtacggcgagctccgatcaatgagggagatctgctcagtgacgaggacgatgactacggtaatgattccgaagacgattgcagcgacgtggatattgtcggggacgagaaaggctacatgacgtagatgtagaccaatagtcaattcagtatcaaaaatactatcattatctagtccccaatcaaggtttgtttaatagtgttttctcttgaaaaacaatgtacagcgaaacagaatccattttgtacaaaaacgatcgttatttggtgtgatctcagattagccaactttactatttttacgattgtaaatttccaaccagataagagtggtgccattgtataaaatcttctgcatgtaaagagatcagctctgaaattctaaaataaaccagtcacaacttagagcctattcaatacactaattattcattacttggtagcttcgtataattaccgaccacaaaagcggataaattggccaatttattaactctaa

SEQ ID NO: 883 - DNA, 1761 bp, Aedes aegypti
tactcgctcgggatcataacaaaagcggtccagaaaaaaaacgtctgtagaagtgaaattaccccaaaaaggtgacgaaatcttgaaaagtgcaaagttatttcaattagtttttacggttagaagtgcaaactctttttagctagtgatttgaccgaaaagaaaagccagaatcgcctcaaaatgagcgacatacagacttggtacaaacaggtaccgatgtttactcggctgtggctttcggccacggttggaatcagtttactttcccgcttcggaatcctcccgccccagtatttgattctacagtcgtacccgctcttcaagcagctgcagctatggcgaccgatgactgcagtattcttctacccgctgaatccggccaccggatttcattttatgttgaactgcttcttcctgtacaactactcgctccggctggagacggaacagttcaaacagaaacctggggactacttttacatgctgttcttcaattggttcctctgcgtgttgattggtctgttgattgaccttccgatcttgatggatcccatggtgttatctgtgttgtacgtttggtgcaaactgaacaaggacgttatcgtgaatttctggttcggcacccggtttaaggcaatgtacttgccatgggttctgctgggaatgaatttgattctgtcttctggaagcatcttctccatcgttggtatccttgtggggcatgcctactatttcttgaaattcatttatccacaggaactgggaggtcccagcctgatcgagacgccaatgttcgttaaacgctatttcccggatgtgtccggaggagtgcacggtttcggagttccgccagtgggccaacgagtgaatcaacaacaacagcaaggcaatggtttcggattgcgacatgcatggggccgtggccatgtcttgggtcgcgattaaagggtaagtctgggggcattcgaattttgtaaataaatgccaacaagtagctttctacccatcatcatccaatcgaactatagatttaacgtagcttttctctcgtcggaatgtaggtgttagttatgtattttttatgtgaatcaaagcgatggggttcattctgaatggcatttggtgttgacattgggtatcaagtttatatagggtcatttgatggcacaatggttgttaattttcaactatttgaatgtagtttatagtgtaggaaaaggacctaaatttcatcgtcgattgttttccttagagaaaatcagttataagcaaatcttatcgcatttgttcactttgattcttaaatgaggataatagcctcatgaattaaaaggaaagaaaaaaaacaatcgacgatgttagttaagccttattttcgtatccatattgaagaaaaaacttggtcaaaatagaacgaaaacatttttttgctattttttttggtgtcatatggaatgctcccctaagctacaaaactagagtaactcaggagacgaagacattctggattaatcatctaaagtaaaatcaatgtgcaatccgctgatttttacgagctattcattttatatcacaaggccatgaaacttgatgcaaaagaagggaataataatactctctggtaaatgtagcgcgtgcaggccttggcttcggaagcgttgacgcacgtgtagattgaatactcctggattgggaaaaataagtttgtttttaaaacttgccaaaacaatgtgtttactttgatcaggtttgaaacgt

SEQ ID NO: 884 - DNA, 264 bp, Aedes aegypti
aagggtgtaaaccgttactactttacacggttagcgtcccaaaaccgccatcttgccctaccttcaggattcatcaaggccaatgagtccaacttcgataagccaaccacattctgcacaagcccgatgatgagcggactgatcacccgctcgtcgatacccgtcaagccgttcaaccaccaacacaccagcagttctacaacagcccatcagagcacatccaaaaccgcaagtaaaaccacccaaaatgtgacgtcacaataa

SEQ ID NO: 885 - DNA, 756 bp, Aedes aegypti
ttcgcggcatgacagatccgcgacggaatcacgaatcaaaatcgactgatgtaaacattgaagttttcttgggattttttttcgattagtaataaaattacaacaaaatatccattgaaaacatcgtttttctatcgtgtttagcaaatcaccatcatccactattagctaagcgtaataataattcttccagcccccgattgtaacccaaagcaaaggaatccaaagtggcgcagttcggcgttggaggtaaaatgagacgttcccagggctatgcttaccagccgctggcccagaatccgggtcccagtgggatggccaatggttccagccaccaaagtcacgatgccctggaggaggaaaacgaacggatggccgaagaactgaaggggaaaatcggagctctgaaatcgttgaccatcgacatcggaagcgaggtacgatatcaggacaagttgctgcggggcatcgatgaggacatggaccggacgggtggatttatgtccaacacaatttcgcgagtcgtgaggctagggaaggggggccaccggaactatatgtgttatatgtttctgtttgtgctgttcgtgttttttattttgttcgtgatattgaaagtaagatagtttagagggataatttgggccgagtaggggtggggatacgtatttcatattgtttattattttttacgatggaaatgaacatttaatcgaaatagtgaataattaaatattatctatagttagatacttt

SEQ ID NO: 886 - DNA, 4562 bp, Aedes aegypti
gctggccgcatgtttacaaacaaagcgctgaaacgccgatagggcaccattactgatgacagtttgtgctgaccgcgcgccgcgattcgcacgtgagtttgtttaggttcgcttgtttagaaccgttttccactgttttcaatagttttagctgtgcaatcaatagttttacgctgccacaatggaaatgaaggaagaaatcctcaaacggctcgacaactccgagcaatcgttcgagacgaatctcgcctacggaatcaagctgtggaaatcgaacagcttttactacatgtccaagtacgaggtgatattcgagtttttcgtggaccgtgtggcagaatacaggaagaaactgagcggggttccggtggatgaattcgacgccaagtggcagatagtgaatgagtttctgacgctgccttgcccctcgaatgctcttccgccaaggttaattcccaaattgagagaggctttcggggatgtggaggatagaagcgatagccggatgttgctggaaagctatctgattgttacattcgacgtgaagtacaagcacttctacaagttcgattacatggcctatggggaaactcttctgctgactctggcttactatgagaaattcctaaatgggagctttgcgatggagcaggaggaagttacaatcaagagaatcatggacgatatcaggatttatgtaaaatcggccgggggagacgagaactggcagaatgctttcacactggcactgacgaacgtgtgcaacgtaattctgaccctgaaggcacacggtttggatcgtcaggaagatttgttgaatctgttgaaggaggtctacttcctggaggggcaaagcgggaagtacaatcgagttctggatcagtctaagaagcacttgctaatgggctattttgatccaaagcaattgccaattcatgtggtggctttgctgattgaggggtatctgaaggcctatcgggacatcaagctggacgttttgctgtttctgaagtacattcttttgcacatcttcgtcgatccggagaaatcggtcctttcggatatgcatcaagtttttcagctgataaagtacgttttccatctgctgaagaagtatttcattaagatcgatcagaagttggtgcaggactttgatttcaatggaatttttacgatcaagttgaaagagttcttggaaaagtacgattcctcagaggagcatttgagggatattttctcgcttatctgcacgataaatgattacaatccgttgattctggagacaagtatcatcgacatcattttgaggaccatgttcatcaaaaagggaccggaaacactggagaagttccaggcgatgttggtttcgacgatcggtttgtacgtaagattgaatcggagtgagaatttcctatcggaactcttcatgaaactgggggattatctcgacgatcacgacttgggcgatcggttgaaggagctgagaaaaggatcaaggaaacggaaatcgatggcatcggtgaatgaatcgccagccaagcagaggaaaacagaaaatggacaggaggatagcttggcggatcgatcaaacgatgagttctatttaaagctgctctatccgactgatacgaatattgccacccagaaggttttccgcttgcagctgcaagaccagtggaaatcgatcgcatttgcttggccagatcacaacggccgcctcaatcaagccatgatggattatgttaaggggctgctcacgaagcgtagcttcaactattggtacaagatgcgatcctacattcaggatatactcgaaactctaagcgaagaacagcatagcgagaccgaattgttcaaactggagttcgccacctgttggatgtgctactttttcgctgggaatactctggttgagcaaacgaatctgttctgggaaaagctggggaagttttgcggggcattcgatgatcttctgggaaaattcggacgaatgcttttggatgaaactgttacagatggaaggatgttcgattctttcctaaaactggtctatttctacggaaattatcgactagtcgtgcactactatcgaccagattcgatcgatgaaagcaaccacgatcaaatccatcagttcctcagcgacgaagagtggaagacacttgaagatcgtctcccatcatctgccctcactctaatgaaccgaatccatttgcagaagattcgagtcctgcagttggatgacggatccccacaagaattcgaaggacaatccgaccttgtacagaaaatcctcgccccagaaagcttcgaccagcttcgctgggtcctgttggatcgatcaacgaactgctggttcatccagctgctctcgctggatcaaaaaatcgccgttgtggatcgcctcttggagaaccgctgctacgccgagatcgaattcctcgtcgaacagctctccgacaatcacaatctgatggaagtcgttttgctgtcttgctacaaacgaatcgttgaaacggtatttgcggagtgtaaatcttccgtgtccagaaaactgtcattcgaaggaatttacgaattcgacgaagaaacggccatgaagaaaatccgcaagttgctggacaagaaagcagataagaagggcgaacccatagcattgggtggttctagtgaattgaaggatttgttgcatattttgaactcgattcgaatcgatgagctggccgaaacgcagaaaaccattatcgttgcagtgggaatattggtcttcactgacgtgatggactgtgacgattccgatgtggtcactttgcacggaaacatcatcaacaaacaacttaccttcggaatggttccgaatctgctgaaattcctcaacatcgacacattgatcagaattttcggccaatcatccccagtcatggtggcgttcatccgccaaacggtgacctatctaaccagtgaagctttcgacagtctccggacaactttggctcaattcctggaacaaagcgacgaacgggttgaactggtgctgaccattttcttctatctgcaaaagagcaacgccaaccgactgaagctgataccggcggaacaggtgagcgaccttctggccgagtatgtggacgctatcgagtcgttcattggtggaaagtctgccaaaaaggtgagaaaatcggatgtagcactgttcaaccacctgctgaagggatgttcgctgatcatccactacaaggccgcgaacaaaaaggagctgacggaggaattgcgagaggtgttcctgcaatttgtggaccaggcgctcaaagtcgacagcctatcgtcgagcacgctgctaacgaatgctctccagcacaaaaactttctcaaactggaccctgaacggatcgaactggtggtggaaaatcgctgggccagtttcctgtcccaactgcgagccgaatatgcgccagatttcaattccaccgatgatccggacgtagatgccgcccacatgcaatcgaagaacgttaaagtttttgccagctttctcacgcaccaccaaacgtacgagaaattggccacacgtttcgaacaacttaaaaaggaagctaccgccgatcgaagctatcgcaccaaacagtttgtgctgcgggtttattccatttttgcgaagaacgcttttgcttccggggtgaaccaggacgtagaaaaagtcttcgtgaggtcttttggaaaggtggtggccgaggaggtcgtaccgctgtgcgtgttgaagaagttcttcgacgatcggagctgtctagaggaaatcctgagctgcttcgctgcagtcgtttccaatcctaagctcaccctggtcccatcgattatggaccacatgctagaattcctgagcagtatcaacatcaagaagtacgccgtcaaagacggagaggagaaagcgttctaccagcttcatcggctaatcagcgacgtgctctacttgatgatgatcatccggcccaattacgtggcacatcgcctcccgcagtacttttacgtcttcaacggattgatcgcatcggttatttcctacaaagaggatcgccccatggacaagccattgaacagttttgaaatcctgacgttgtccgatctgttgctgcctctggaaaagataatgagtcacgcggccaagaaggtcgccaaggaccttcgcatcatggcaccgtacgtgctggcgcagatcatcaatttcattatccagagcaaacgaccaacgacgctacacgagaagatcgctcaaaccgtgtacaacgtttgctatgggttgatcgagatgtacgacaagcattcggccagctatctgctgcggacatgtgacgaagcgtccaaaaatgtgtacaccgagatcgtcaaagtgttccggaagtacagatctttcaagggcaagatctagacaggtgagctgttactgattataaatgtagatagattatatgttcttttttcggattatagttctcggtagtagttacttgtgagaaaatcccttcttgtgactataaagtttattcataaaggtagttgtgaagtac

SEQ ID NO: 887 - DNA, 627 bp, Aedes aegypti
atgtctgaagttgccactgaagccgctgccgcagccccggctgcctcgccagccaagaccaagaagccaagggcccccaagggacagggcaagccgaagaagccgtcgacccaccccccagtcaacgacatggttgttgctgccatcaaaaccttgaaggaacgcaacggatcgtccctgcaggccatcaagaagtacatcgccgccaactacaaatgcgatgtcgccaagcttgccccattcctcaagaaggccttgaagaatggcgtcgagaagggcaagttcgtccaaaccaagggcaccggcgcttccggttcgttcaagctgaaggctgaagctaagaaggccgccagtgagaagaaaccgaagaaggccggcgagaagaaggccaagaaggctaccggagagaagaagaaggccaccaagaaaccagctggggagaagaaggctgttaccgttaatatacacagtcacaatgtggatacaaccaaaacatataggggatctaaaacacatgcgacaacactagttccggtagcaatagtacccacaatagtcatcaaggaaaaggaggaggatggtaagggaggaggagagaatagagaacgagagcagacggcagtctag

SEQ ID NO: 888 - DNA, 3355 bp, Aedes aegypti
aatgcatcggtgcaaaactctggtgccgaagaaaactgccgagaaagcttaccagtgcagtaataagtgcattggcagaatgcactttagttggctctaaaccatcctacgcgctagtcacttttcgcgctctactgcgctgttcatattacccaccaacataaattttccgcgcttacgtttctcggtcagttaggagttgtacatttaaacagcaatttccttcgttgtgttctgtgccttgcatgctgactattgcagtgtactatagcttccttttctttccccacttcgttttatgtgaagcaagaaatgattgatgtgcagtgatttatacaatttaatttgaaaagttcttcactacgttctgcgaaaatgccaaaactagtgcttattttattaaaaacaagcttactcatttcatggtgcaacttgttgtgtgcgcaaagcaatgaaagttatgacggtgaaaaccagtcggcaagtgctattacgaaaaacaagtaccagccaataaccaggcctaatgtaagcaaaggcttcgccaccgttggatcgaggcacgttatatcagaatcaaaggatttgaaccaactacattccatcgtgggattggcacagccacatgcagctgcagttaatgtacagagtgatataaatttgcaagatgaagcaaacactggtgcattggtgggtcctgacgaaaaagttgacgaaataaaggttcacactccaatgagcaatacacggaactcgtttcctaaggagctttttcctaccacttcaattgaaatacgtaacatacacgacaacatgaaaccgccaatcgatgacgatagatcgaatgcatacaatcaagttatggtcagtgctgaagaaaaaacaactgatgacagcataggggacgcggatcacgttcaccaagggtcaactaaaaagtattacaagtatattcgtaaagggactaaaaatcatacgatcgagaatctgcctagcgcagcttcagttactagtgatcaggacgtctcttcaaaacacataaattattttcacctttttatgaacctttacgaccatcacatgtgggatttaacgtccattaagcatgaattgagctacgactgtgccgttgacatgggcatttatttgtcacatcttgcagcgtcacacttatgggctatgaaagtttgtgatgcatccggccgttacggtggacaatccttttttggaaacgacttctggctaggatccaaatcgttctgtgaagaaattaatcgcctatacaaaaacgacaacgaaacatcatttgtggaaatgacttttttcgtagccacaattaaagtgaaattggctgaatttgttcctgatgtcaagcctatgcaacttggacaatgtttaccaaaatcttgttcaattagagatatctaccacatattaagggaagatcccatatcgaagaaaatgttagattccaacacttgccaaacgatgaattcaacccacttgaacagtccttcctgtattctactagatgtaacaaaccttcggctagttcctggcagctactcattgttaaacgataatcgtttttatttattaagtttaacactgatagtcctgataactactgttatcttcgcaacatattacgaaaatttcattggaggaacaatagctgatgcaaagaacaacagtaggtcgaagcatacaagcaaatcggaagatgtaaaactctcaggtatggaaaaactagtcgaatcggatgccaaagcactagagcttaatcatttgagccaaaacaataatattgacgacggtccggataaagaggccaccaccactgcacatagtacaaaagtcggaaaacatttgggtctgatatcggaaattcttctatgttttgctgctggatcgaattcaaagaccattctatctgtagaaacggcaaataaggactctcttacatgtattcatgggttaagactctattcattactttggactataatggtgcacacatatttgcagttgtttgccgttggagaaaaccgggttgcaagaaaaatcactgaacgatctttcagctatcaagtggtgggaaacgctacgttttccgtggacacgtttttcttcatcagtggtgtactgatcgttgtgctgtattttcgctctgctaaaaatgaaccgtcaaatgaaaaacacaccacacatctattcaactcaacggcttgttcaaatatatttctatcaatactttaccgcttcattaggctcacacctgcctatttattcgtgatcatattcaacgaactcgccctcaaatggacatatggaagatctgtgttcacaccaggaataattgatcacataacatgtaataagtactggtggcgtaatatattatacatcaacaattggtattcatttagtgaaatgtgtatgatatggtcctggtacttagcaaatgatatgcaattttacgttgttgcaataatcatattaacagtatcgtcaagatacatgaaaacgtcagccttcatattgggcttgttgatggtttgttcatgggcaatatctattttcctttccattcatttcaactatacgtataaggttgcagaaccttttgaatcatttgatgtgctctatgacaagccatggcaaagaatcactccgtacataattggcatgttaactggatatattcttcatttcaagaaaacgccacctaaggtaccaatgttaatcaacatactcctctgggcttgttcgcttctaatactcttcgtattggttttcggagtatgggacggtgtgctttctgtccccatgacggctttgtacgtgagccttggccatacagcgtggggagttgctctcatttggattacattgtcgtgctgctggggatatgctacaccaatcaataatatactatcataccaagcaatttttcctctgagtagactatcttattgtgcatatttgttgcacccagtggtaatgatggctacgtcgttccaaatggaagcacctatgcatttgcagcatgtgattgtggttaccatgtttttcggaaatgctgtactatctttcattctggcgtattttgtttcgttaatatttgaagctcctgttgtgaaattgctgaaactggcgttcaggagataaacaagcttgtaaagaaacgtttacaagacacattagttaccatcacgcgtggcatgaagaagagcatctggtctgatgattattacataggaaggtgatcgtgatagcgtataaaaagactgttattttgttttgaattccagtagtttttttttaataaatgacctatgattaagagtttaaa

SEQ ID NO: 889 - DNA, 3600 bp, Aedes aegypti
atgcaacagagggataacaacggcatcaatcagtgtattagtagctggagcgtcacaaaatgtgattttattttcaacgagtctcatcatcatacagaaatctgtactaaagcacgtgatatgtctaccgataaagaaggaatagtttctcctccatccaaacgaaacgacgtcgcttattcaatcaatagctatgaagacacacggaatgctaatattacgatgtcatacgatcccactgaatatatacaaaaagcacgtgtgaccagagcacaacctcccaaaccggcgtatgatccgctccaatttgtgcaattgaaaccatgcagcttggtaaagaccgcccaagctcagatgcagaaagcagatgaagtgaagaaggtgaaagatgaaaagaaggaagaacctgaagaatggcaatgtaatctagataattggaaatcatcgagaaggaaacgagttgaacacataatagatagggtagtcgaggtgaaaaaattcgaactagaagaacatgatcgtaacagacggaaatccaaaacattcaatgaaatgatggaagaaaggggttcgagacggctaaaatatctgccaatttacacggatgatgataacaacgatttgagtgatcttggaataaatagttctgatgtatccagcaaagaaatcgatgcgaatgtggaaaattcaggggatgaaactatcccggaaagatcagctgaaagggatttgaacgaatatacatacgaaggagcaatcgaaggttataagagtcggatttcccgaacgacaacacatacagctaattatgaaaaccaacggtttgacaataatgcacatcagaaaactcagacgggcactgtgcaagttgtacactcaagcaaagaggcttcactatatactttagaagagaaaaaaccttccgatgtgtcggtagctgatattcccaagattgattttctaaaacgaaaagaactgttcgaaaaggaacaagaacaggcaaatgcaagcgagtccagacgccagtcttcggattttgttaatacattaagcataaaagaacgcctatcagtattacaactaaaccaagcacaagaaacgagcgagtcagaaaaacgtcaacgtactattccagacgtttcgtttacggatttgaaaaatcgcttggaaatttttgagagggaaataagaacacttgcaaatgacaaagatgatctttcaagctcatcgccacccaatacacacgaaagttcggtagagcctatggctcccacgccaaaggatgaaccaaaaccagaagatgatctactagaaaaatcacattactttcctaatgtctacagtaatatattgacgcagaaacaaactctcgatgaaaacgagaatatcgacacagatcgagaagacagtggtattcatactacagacgtttcctgttctgtctctcaagctgatgatcaaaatgaagaagttgaacatcttgcaaacgatgattccaacaataaatcgaatccgattgaagctaaaccacacccatcgaatgctgcagaagattcaaatcaaatggaatatgatgaagcaaacgacataagtatattagacgatgcattggaaatggcattccaagaaattgattgcatggaaacgactgccctgcagccaataaactccagcattcaggagccaatttaccaaaatatcgccgacattgaagacatcgcgtcacagaactcggaagataaaaccaatgccgaaaacgaaccctattaccaggttccaaaatcccaagagccatactatgaagtaccaaagacgaaaccgatcccactatacgaaaatgtggatatgatgcaatcggttgccattatttccgacggtggctcagatactaattttaccgtcagcttgaatcatcaacaaccaccgaaagagaaaccgcctcctcctcccatagaaagtaaaccagatgttggtgtttgcagtgaatttacttgtaatactaatagtgaaaactttaaacgcattaattctaccaaacgtattaaaaaagagctccacaacaagcgatcgagctttcttggaattgatacagactacgtagatgaggatggattttcaaacctttcgatagctattccgccgagggcggcggcgtctatcctacaggaagggaaacggctcgaaaagcaatatcttttgaagaccgggctgtacgatcattcggatgcagctgaaagccgagattcaggagtatcggaaaatcactcccgccaaagcagcgacatatttactacttcttcagatgatccagaggaactcataaaaccaaaaataggagaaccaaaagccctgagctatagagattatgataggaatccgtcaaagaataattgtttcccgcatgctgatgatgaatttgggtttcaaacgagagaaagccagttacttcaacctgaggacttacgattccctattccaccaccaattccaccgacgaagcctttgcgttctccgcaatacttgcacaatcagtacaatgcatacatcgagcatagtaaatctttgtcgaatgtatcaaacttagactacggcgatatgattagcagcacagtatcttcaagcgaatcccaaatagctttccacagcgcatgcaataacattaacacatctaatgaaattttatctatatgtgatcaaacccgcctttacaataaccaccatgtgactgagagtggcttagatttaacaagctgtgtgccgaaaagcaaatcaccaatccactgggaacaataccgagattcgcacgagtctaatgacatcactacggacgaacatccgttacacgacagtatgctaaggcagcggagttatacggaatgctcgccacaatggaacgttaaggcaagtagaccggccaatcgaaacagtgactcatacactcgtcactggttcgtacaggaagctgaacagcgcagaatcgaacaacaacagcaagcagtaaggggcaactatgcgtcaggttactctcaaaacaaaaacagaaaatcccttccagaatcagtcattcagacgataacacagcgagtgcaaaatctgggaataggttccgaccgacgatggcatcccgaaggaccttgtctagcacgcaaagcgactaatgataatgggttaaaacctgaaaaattcaactcacaaagtcatcaacgctcatccgatcaggatgaaaaagttcttagtgtaagcggaaagaagaaatgttctcactgcaatagtgaattagggcgtggagctgcaatggttatcgaaagtttaggtttattatatcacatcgattgcttcaagtgttgtgtttgtcacattcgtctcggcgatggattctccggtacagatgtccgtgttcggaaatataaattacactgtcaaaactgcttttcgagtgaagatggcatcaagtttagttgtgtataaaaagcgttacttgcaattgttgtacatatagtttaatttaaacatcgtcatttccgttaaaaattgttattttatatgtttatgatattttatttataacaataaaaataccaaaaaaatacattacagtcc

SEQ ID NO: 890 - DNA, 2097 bp, Aedes aegypti
caacattgacttgacaagtagagtatagctcaagatgagcttgccgtttggcattgtaccgcgcttccgctcacattgcattgtgcttggggctttagtctcaatgacgcgcacaaattccaccggcctacttcctcgtacattgtgtaactcgaatgtcccaaagaaatgaaaattcaatttataatagaaatatttttgaaaatattttaattggatctagatagcgagaatatcacaaaatttttgtgggacatgtagctttgatgaaatttaatcatgccattcaatacgcgtacattgatggattactgtattgttgatagagccattccaaattgacaccgcaacgaaggaaaataaaaacaatctgatgtggaactagttgtgctggcaaattatcgatgcattgaatgctctgttctgttgtattccgagttccgatgagtaaatacaatgcagccgataccggttttcagtgtcctcctggttgcccgactattgtcagccaaatttttacacattaccgattgcgatgaaacgtacaactattgggagcccttacactatttgctgtttggaaaaggacttcaaacctgggagtacagtcctgaatttgggctccgatcgtacttgtatttgatactgcatgctattccagcatgggtcgcacagaaagtcacaaactgggatgctgttatgctgttctactgcattcgttgcgttctggcggtttgctgtgccatgttggagacaattatgtacagatctatacgtcgacaatttggaccgttgatagcaaagctttggctcgtatttcaaatatttagtccaggaatgttcatatcaagtacagcattgcttccaagctctttttccatgttcttaacaattgcctttgtttctacatggtggcaaaaacagtacaaaatggcaatcttgagcatagttatttcgacgtttgttggttggccgtttgcagcgctcgtcagtttaccatttctttacaacgtgttagttcagaaacggttattccgaatgtttgcatattggagtttcctatttgcagcttctgttgcggttcctttagctatggtcgactcatatttctatggaaagctaacgttcgctcctctgaacattgtgctctacaacattttttcacaacatggaccgaacttgttcggagtggaatccaaatatttctatttcattaatttgttcctaaatttcaacatcgtctggtgctttgcattgttgtgtccatttttcatagcagccaagtatgtgctacaaaaactgacaaaggcaaaagtatcatcaaccgatgtcttctggagactgtcacctctgtacatctggatgatggtgttcttcatacagccacataaagaagaaaggtttatttttccagtttatccgttgatttcgttaagcggtgcattatcattaataagccttctgcaaatcaacgatcagattctacaacgatgtggaaaaaacatcgcacgtcttatccgccgtttgcttatgtatggagttactgcagtgtttatcacgctcagcctttccagattgtacgcgttgtacattaactatcatgcccctatggatattagctccggtgtggatgtatctcctgttgtgaaaaatgtatgcctaggaaaagagtggcataggtttcccggaagctttttcataccgaataactatcgattaagattcgtgccatcgcatttcagaggaattcttccggcttattttgacgagactgaggcaggcactactgtcgtgcataactatttcaacgacatgaatcaacctaatagtcacatgttgttcgatctcgcccgttgtgattatatgatagactttgataatggcgcagattttgcgccaaatgacgatgagccaaattattccaaagatagtgcaacatggaaaatagtgcagagtataccgttcttagatgcgtcatcttcgcatagcttttatagggcattttatgtgccaaacatagggcagcaatatgttaagtttggtaactacaatcttttagctaagaaagaatagagaatacatttgaacacagttcaa

SEQ ID NO: 891 - DNA, 2792 bp, Aedes aegypti
agttcattttgacatgaaaaatctaaatacctaatttaataaatacctttccataaatcgagacataagaaatatcgattatttgaaaacacccataattgggtttaaaccaccaatttgtgtacaacttggcggttacgtcagttcagataaacgtgtacaggctctgctcgctaaccttgctggtcactgtcttgactatgacagatccagtccagtgcaaattttggaatggatggtttgatgtttattggataagaagtcttgtgtaaaatataattgttttatcatttcatgtcctacataatgtatttaagtaaaagtggatccaacagttaaaatgtaacattcgcatagtttttaagtaggattatctggtatgaaggtgacccaatatcagtgaaatattttcgttggaagttttgctcaatttcgcatatgattagattattgcactaatcgagctgctgcacctgtttcgtgaatctattaaactgtataatagtatgtgacgtgacaggaagcaattcctcgtaactcagtcatcaaatatccaatctgcatttgatgaaattggcgaaaatagtgtaataaatcatggcttccaaaatgagcgcggaaggcagagccaacgaaaattcagcgaaggacaaaaaatatatatccgttgccgagttttaccatggtaggagcatcttcataaccggaggcactggtttcatgggcaaggttctcattgaaaagctgctacgttcttgtccaggaataaagaatatttttattctgattcgtccgaaacgaggacaagacatatccgccagattgacggaaattttgaacagtccgctattcgacagaatacggaacgaaaatccgggcaatctgaaaaaggtcattccaataaatggcgatattacgttaaacgagcttggaatatcggaaattgatcagatcacgatatgccaagaggtgtccatagtgttccattctgcagctaccgtgaaatttgatgaaaaaatcaagcaatccgtcacgatcaatatgctaggcacaaaacagttggttgaactgtgtcacagaatgctctgtttggacgctctagtgcatgtttctacagcgtactgtaattgcgataaaaaagaggtaaccgaaattatttacccgccaccgtacaacccagacgatattatccaattggtgcgatggttccccgaggatattttggaaaagttaactccatcactgattggtaacagaccaaacagctatacatttacgaaggccatggcggaacatatgctcctgaaagaagcaaagggcttacctgtgtcgattgttaggccttctattgtcttgtccagcttcaaggaacctgtcagcggttgggtagataatttcaacggtccaaccggaattgtgtctgcagtcagtaaaggactgttcagaaccatcttgtgtgaggaatcctgcgtggcggatcttataccggttgatttggttataaatctcatgattgttacggcttggtatacagcgtctcgtaaaggtgcaaacaatatcacagtctataactgcacaagtggcattgataatcctataacatggggatcttttgttcgaatgtgcatagataatatgagaaaacaccctgtcgagggtgttttgtggtttccaacggggaacctgcgaaccaacaaggctttgaatcttatccatggatttctagtacacttcattcctgcaattttcctagatttagtttccatcgcaactggacgaaaaccaataatgaagatcgttcaaatgaagttgggcaaagccgcgacatgtctgcaatattttaccaatgctcagtggcgcttccgcaatgataacgttaaacatttgctgactcatctcagctccgatgatagaaatacattccaatttgatgtcggtactattgattggcacgagtacatcgaaagatacgtactaggctttcgcgaattcttgttcaaacaaaatcctcagtctctagaaaaatgtagaaataatatgtacaaattgtatattctacatcagtttttcaaactgatattggtcgggtgcatgtggcgatttcttctgaaaaaatcggatcggttacgtactatttggtcgaagcttctaaatgcttttgcgcgagttattaacgtattagctcttttctaatatttcgttcatctagaaaatgagagggggttgcaacatctatttaatttattagtccatatgtatatttattccaaccataaaaatttacccgggcaaaagataacatgcataataaaacaataccaagtgatgtatacgccttttatttctgtattgatgacattctttatgttatattccaacatacaacacaggaagacatatttcatgtttttgattttcttattactattttatttttatgacttttaatctatgaatttcaatctttagaaaatgtacagatcatttaaccgacattgttaacagatgcaaaaatgcagcagagaacacaaaaatacatttgtccagcaatcatagtactggtggtcacgtcaaccttgcaaacatgggcagtggaataccttcaggaattattccagggattcttcaagtgatttctcctcttctaaagcaatatagagattcctacagaaattcttccagagtcttcttcaatgattccaccagataaatctctacagggattcttgcagagctgtctccaaggcttttttcaggcattacgaagttattgtatattgaaataacatttg

SEQ ID NO: 892 - DNA, 474 bp, Aedes aegypti
attccgagcccagtattttcatcaaaaaccatgaagccagaccaaaaatgcatcctacggttcgccaagctcacggatcaagccttcccaccgtccaaaggatccgtcaaggccgccggatttgatctcaaaagtgcgtacgagtacacggttcctgcccggggcaagcagttggtgatgaccgacatccaggtgcaacttccggaagggtgctacggccgagttgctccccgatccggactggccgtcaaaaacttcatcgatgtgggcgccggagttgtggacgaggactaccggggcaacctgggtgtggtcctattcaaccactcggacaacgagttcaaggtggcccggggggatcgcattgcgcagttcatctgcgagcgaatcttctatccggaactggaggaggtcagcagcctgacggaaacggaacggggcagcggcgggttcggatccaccggaacgcaatga

SEQ ID NO: 893 - DNA, 990 bp, Aedes aegypti
aaagtaagacattccaatcatgtgcggtgttctttgttctaatgatggagtattctttggtaattcgatgaacagatgaatgaacttcaattcctataaaatcccacgactagaatcgtctaagcacagtcaagctcacagcgttcttcaactacatccaacatggctagatttctactctgctcgctggcaactttcctggttgcagtaccacttctgtgcttgggcgatgagaatccttgtgccattaatccgttcaacaaaacttgtatcgatgatagtctccgggcaacatacgctgatatcattaacctcccaaaccgacctgacatactgttgatcgatgtgcgtcaaccggaagaactagcctgcactggatcaatcccgaccagcatcaatatacctctggcaacggtttccgatgagttgaaactcgcaccgagtgtatttcagtgcaaatatggccgtgcgaagcccggtttgaatgacccgatcatctttacctgtcaatccggaaaccgagctgcaaaggctgccctcgctgctgttcagttgggtttcagaaatgtgaagaactatgttggatcttggattgaatacgccacctataattgcctgccattggactgttcgggtgctatgccagatcgttgcacgagctaagctacaaggccagtggataaatattacaactacttactagaggtgcacgtaccataacgcattttcggtcttaccttaaatttaagcttacactttgagtcaatagctgcttcatgatgaaaaacttaaatttataccaccggtttttaaaccttctagatatcaacttaatacggtaaatatatccaatttttagaacactgcatcattttttcaacttttacaaaggtactgcaatatataagagtgaatttatcacaaaaacttgaaggaaaaaacttcgaagagacagaatattggcatatataaaaaaagttcaaagagaag

SEQ ID NO: 894 - DNA, 1245 bp, Aedes aegypti
atgcctgtaaacgtcatagtgtcgccggtgttggccgggctggccgttgctattggcgtaccgatcctcctgttctacgtatacggagtagtgctcgtctcgctatgccgtgccggatgcggcgaagggaccaaattcgagtttgacgaagaggaagacaacggttcccgaaatcatggttggtgtattctcgatacggcagcagataaggccagtctaggaagtggccgttcgtttcgaagctcagaacgctcgtttcgggacgatttcgattcgaccagtctgtcgtcttcgcacaacaccgggaacatcacgaccagcggtagccatcacagtcatggtggcgcgataggaaccaaccccagtggaggaggcagtggaacgtctttggcgtccagcaccaaacaccctcggatgaatacattcgggcaacgcattccaaagctaggatcagcggcgctccagcatcggacgctgtccatcgatagcaataccggctcgtacaacatcccggaaaatgtgagtctggagcaggaactggaggaacaggatcagcaggagcaacagtcgttgtcctcgttgacgcagtctcccaaggtgactgtctcaccagtgacgacgacaacggacaagagcacatcaccgagccggacgatggccgacgaaccacccaaatccaggacacacatcctgagaaatctattcttcgcacaaactggctccggcacgacgggatcacgggacaattcgttgggatcgtccccgaagtcgtaaggttcggtgagtgggcgcgattaggttgttgatcggtttgttggactatgccgtgtagagtggtgaaccgtgtgcatttgtagcctgtaccagtggggtagtgatccagaataatcccctcgctgatgatttgaatttggacaggagcttttactaagaaaacagctatttacgattatttgcatttaatttgaattgaaaaacaacgaaccgtgggaactcgcgtaagtacatggacagagtagtagtttacagaaccgatgaatttttcgtgcgagtttcaaaactcaatcataaaacaaattacctatcttctttctgttgaatgttccattattggttattgaattggcgttactttcgattcggataagaaatcctactttttgttaccgcgaaaaggtcataatatttcaaagcattcctgtaaaacatcctacagcaataaattcttggatagtgagcacttct

SEQ ID NO: 895 - DNA, 2504 bp, Aedes aegypti
agtcaccccgtttgacggtaattcttcaaaatataaataaggttttgttagtatgagtgtgtactttcaaaaactgtagatagaattttatttacattttgtgagttgcactgtgtaaataacatatttttcgtatttcgatagagagaagaaatacaaatcgtgaattttagtagaatggtaattactccaaaaaatgctatgagctgaaaattggatcgattaattacctgcaaatttcaaattttccaatgtgaacagttctccatatttgtcctattcaaaaatttcaatgctttctcccatacctatcatgaaaaaacagtctataaatatttagttcacaaatcacctacatgaaatcgttctttcagaatcgcgcaatgacgtccgttcagagccaagaggatctcgaagcacgcatagctcgcatcctgaaacgcaatgaagaaatcgaaaagaagcaccgggaagcggaggccgatcggctgatggccatgaaggagaatgccatggtcgagatcaaaccaccgaaggacgatgactggccacgagagcacaagtacgacaagatagatttcacatacgatcttgatgaagacgctctagcagagctcgaagagaaaaagaaagagaagaacgcattcattcaaaagatcgctaaggactacaaagttttcgccgaaggcgagggtcctccaccagaccccgcttacagtttcctagcggacgtagaaagggatggcgaaaaggcactgccagctcctgttggtagcgttggtgctaagatcaacaaaaataacttcgagcgaaagaaccccaacaatcgaagtggtcgacaagcgggaaatggatcgaacatagccgggggtaatcgtggtggtggtcgcggtggaggaaaaacaggttacaacggtaacctacagaggtcgttatcgaccaacgaacacgatgggcgacgtccacaggagcatgctcgacatggtcccggtgccggtcataaaccgggaggcgatggcaaatggcgtcgggaatgggagcaggacagaagcaaagacgattgctgcatccacaatgcacagaacaatgggttcaagggagaaccgaatctgaccgtctcggtgtcgcaggatggagagttcaagagcgttaaagtgacgtcccctccgatcattggcagtggtcgggttggcccccgccaaccagcgaaaccacagttccagttccaaacatcgggactccatcctggaatggaacatcaccatcacccacatcaccatcagcagcagcatcattcttctcatggccatccagcgcagcaccaaggaagtggcggcaagcaaccacatcacaggaataatgacagctttaatcgcaattcctccggtcgcaaatcggacaaggacgtaaggcgtggtcccaagcaaggtccagggcaatcagccacaagcaataagcagccacaaactggtggcggcagcgtacaggatcgactgaatcgcaataggtcggtcaatatcgataggaacgacaattccatcaaagtcagtaccaacaatggaggcgaatcagtatcttctcaaccgcaaccgaaggcgaacgctacattaaaaaccatttcgaaaattatcgaaaagaatgccgaaatagatgagaagctagcccggcaaatgcaccaggagaacgaaaaaatggccaaccgagtcaaggagctgcgaatgcaggatggggcttaggaaagagtatacaagctgattatttgagcttttgaaaatgatgattcgagtgctgctgcttgtggtagaaacctttaatccagtgcagttttagcgctgcgcacattaaaccataatcgtagtgcgaaagatgtagccagcaaaaagcacgcacgctctttagatatgtatatgcgcaagtgctactaagaaaacttcattactagttgtaatacagtagacgaagagaaggagtttggtttagagaggattaccttacgcaagtgcatagttggcagcttttgaagtataaccgacttcccccgagaagattgataccgcgtaatcaacccgtggatttccgataccctcctagacactagtatagagcagcatctgcagaattctacttccctagtttttttcggcgtgcaggccaacgcaagaaccagttttattagatgctgtccctatttattatttatatacaccttttcgaattttaaaatcctaacggagcaaagttttgcactattaatttatttaattagtaatcatcaaactaagtatgtatgttatcgcaaattacgtttttacattatattttttacacccatacgttgtaaacggatcggaagcatttagagacacaacatttatcactgtttgaggcaagctcaaaaattgtttctaataatctgctttcattttacgattatatattttatacatttagcataacgcattcataaatgttaatgaaatatattggaagtaacatttgatgat

SEQ ID NO: 896 - DNA, 1387 bp, Aedes aegypti
atgaatgttaccatcagtgatacgagtcgatcctacacagtgaattgtcctgaagacacttcgcggcgatattgtcgcatactggacgaggacgacagtagctacgatggatgttcgaagtcatttgacatcacttgggatacggctcggtttcgatgtcgcatactctactggggagatatggatgaaaaggaaactgtagtcaacgtgatagtggaaaagagcatgcgagatgtaacttggtcgatcgaggagaatgacgcacacgttgtgctgaactgccactatcgttcgtctgtgagtccttgtcgggcgatatcggcggccagcaaaagacagatgatgctgctggatggccatttggcggaacggtattctgcgtacaacaccaagatatcgcaaggaatctgtgctctggaaatccgcaaaccattgctcaaggaagactacggagtgtggcgtatctatctgcccataacaccgaccgacaacagtggatgcgtattcaatctgaaagacaagcaacacgatcaggatgatgacggcgacctacacttgatggcgccacaagcaaagctagtggaagtgttccatgatccactctcgtccacgacgtcgacgaccgaactaagctgcaaagcaccgtactcgatcgaatattgctacctgtctgggcctcagggcggaaactatgtccccgaccgattcgatcgacagaaaactttgggcatatgcaacttcaaagtgtcgaacatcaccagcggaatttgggcctgcggtttcaacgatgcgagtgggggtgaggaccggttgaattacttcgatgtgaaagtgtacgacaagccagggaaggcagttacccctgaaatcaaggccagcaagggagacggggataagcggatgctttgtagaacgattttggatctacagattgagatatgccgattcatcagtccaagtggggaggtgcacgccctgtcggagaacttcgttccgagtgatgatagcagattcagataccatggagaaggtctacgtgccggtgaatgcggtgtcgaaatagttgaggtggaacgagaggatttcggccggtggaaatgtgccatcaaggtgcagggaaaggactacgcgattgagatggatctgattgaagaagttataagcaacactgcaatattggccatttcaatcactgcgaccgttttggcgtgcgcaattgggggtttcttcgcctacaagaaacttaacgccagacgacgcgttcaataccaagtcaggctgggcagctcgactgggggactttcgacggcatccaacggagcctaggaggtatgtgttttttcggtgttatttgtttgaaacgttttgtatattgatagtagtcttt

SEQ ID NO: 897 - DNA, 959 bp, Aedes aegypti
ttgtttgtcacagaggagaaccaatctacagccaatatgcagctcctgtcaggattgttcgttctgggcctcgttgccgcggccacttgctacacttgcaaatctaccggtaataccaacgtaaccgccaatggcgaacagacccgaaacggtcaatttccgcatcatgtgctcgtcgtttctacattctccgagggaaagcgttactgcagtggagctttagtgagccggaagcatgtcctgactgtggctcagtgtgtggaaggatctagtaaagtggaagttacgctcggtgcccaatgtctgttggcggatgcttcagataacaagttccgttacactttcactgcattggagtatttcgtcaaagacggttacgacagcgaaacgttcgagaatgatgtggccgttatcaagttcaccgatgaaaacgttcgtttgcccccgtggatcaagccggttgcccttccgacggccgatgagcagtacgtccatgatgaggtctacaccagtggatacggcctgttgaactacaagactacgaatgctgccgactatctggagttcacaaccctgcgggtgcttagctacgaacagtgccagagggagtttgaattcgttacaccggaaactggacgattctgtgcccagcgtgacgaggaggaacccaactgtgtcagcgatgtcggaagtccgttggtgttcaagcaggagggctataaacagtacaccttgttgggactgagcagcttcggacagaagttcgcttgcgaatttggaaatgcgggcgctctgcaggaggtgagggctcatgttgaatgggtgcagtcattcctagaataagagatgcaagtccttataagcataaggaaaaaaagtgtcgttcataaaacttgcgtgtctgttagtttagggatgaacgttaataaatctatgaaatatatcatatgtgtattatt

SEQ ID NO: 898 - DNA, 1796 bp, Aedes aegypti
ttttgccgcttcgagttgacacgcacacaagtgtgaagcgtgtggtgcgccgccagccagccagggagaagaggaaaaagcaccattcgattcgatgctgtggccgatcaagagtaaagacgtgaagaaagaatagtagtgtagtgtgtgataggaaagacatatttttcctacaacagagcacaagcagcaccacacagttttagtttttcggtttctttataatttttgtagtaattctacacaacgtttcgcgaattgctcgtaaatcgattgggtgtccaattgcggtggcatttactgcgtttatttccggaaaacattcagctttttagtgtcggcttagttttgtaaggtggatttttaattcaaaataatgttttatcctctgcaaccaactttcgaggatggagagatcgaactcgctcgtacggagatgctggctcaggatccgatggtggacaacaaacatgccctcgcagtgtcactagcgcgttcagagatgctggtccaggatcccatgacagaccacaagcaagctctcgcaatgtcactggcgcgctcggagatactcgttcaggatcccatgacagaacacaagcatcccctggcagtgtcactttcgctaggaaatacattaatcaatctgaacaagatcaaatgccctcagtgcagaaagcgtttcgatacgatggaagagatgcaacagcatcgcaccaaacatctgactgaaaacaagtttaagtgcgagatctgtggcaaagaattccccagccatagttcaatgtggaagcacaccaaggcccacactggcgaccgtccatttgtatgccagatttgtaataagggttttacacagttggctaatctgcagcggcacgatctggtgcataacggattgaaaccattcaaatgtccaatttgtgaaaagtgcttcacacagcaggcaaatatgttaaagcatcaactattgcataccgggcttaaaccttacaaatgtcccgtttgtcagaaagcattttcgcagcacgccaacatgatcaaacatcagatgctacacacaggtttgaagccttataagtgtccagtgtgccaaaaggccttcactcaacacgccaacatggttaaacatcagatgcttcataccggcttaaaaccttataaatgtcctgtatgtgacaaagcatttactcaacaagccaatatggttaaacatcagatgcttcatactggagtaaaaccttacaagtgttccacgtgtggcaaggcatttgcacagcaggcaaacatggtcaagcatcagatgcttcataccggtaaatcttagaacgcttaagttgactagattattgcatctcgaagatctcactcttctcacctgtattaaaacaaaaaaccgctgaatgtttcccgcgcggatgagcatccaaattcgccgtatttcaaacgaagaaaagcaaaatacatatttgaattatttaataaacacaacaaaaaagcagtaaaataaaaaccaaaaatccgatttcacttctttatactaacatagtatgctttctacatttcccatttgttagccctttcatttttgtacattttcgtaattctgtttttcttcgttgtatttctccttcttgcgccaaccatccatccttccgaatgaaccgctacgatctgtgtaataacgattaaaaaaacccaaccaaattgcaggagtcaaaccgtacaaatgtccaacctgtggaaaagcttttgcccagcaggcgaacatgatgaagcatcagatgctccatacc

SEQ ID NO: 899 - DNA, 1086 bp, Aedes aegypti
tatcccaagccgggaacgaagaatccaaccgtaacgctgaaagtcgccgatttggcagatcccaagagcatacgaactagagacataacgccaccgccaatcctcgtgaatcaggaacactacttcaccagtgcagcctgggtgtcccagaccgaggtcagtgtcgtttggatgaaccgactgcaaaatctctcggtcgtaacgctgtgcaaaagtccgatgtggtactgtcaagagactcaccgcatcagtggcgacggccgaggatgggtcgacgaaatgtcggttccgttcttcagccaaaacggaagctcctacatagccatttcgccgctcagagatggaacggcaggacacttccgacatctcgttcatcttcacatcggcaaaaagcgaattattccgctgacgcatggccatttcgaggtgaacaaaatactgcactgggaccaaaccaacaatttcgtatattatctgggtattccggagcactcgcctggacagcaacatttgtatcgagcatcatcactgccaccgaaacagggtactccccctcgtctccctcgatgtctgacatgtagccatccgcccagtggccaagatcatgtcagcaaagtgaaagcatccaatcgtgtacagcaacagtggaatgacgactgggaggacgaacatttggacgagatggaagaggatgactacattgatattcctgccacaactccatccccaaagaagaagcgacaatcagaagagccaccaagccctccgatgccctgtcagtactttactgcgaccttcgctccgaacagtaatgaatttgcccttatcgagtgtctgggacccgttataccattcagtgccatctaccgaatccacgtggatcccaccaagagtcccacgcaggttttgtacttcctgcaaaacaatacagccctggcggaaaagatttccagagtggcgctgccacaggtgaaatccttccccgttatgatttccggcggataccacgctcaggtgcgactgttcctgccgccggggctgcgggaagatgaaatcacacggtacccgatggttgtgcatgtgtaa

SEQ ID NO: 900 - DNA, 723 bp, Aedes aegypti
tactcgggcccgggaacgcaactcgtgacggataagtggcgcatcgactggaacacgtatctcgctggcacgaaggactacatcgttacccagatcgacgggcggggctccagcggtcagggatatcaacttctgtatgaggtgtaccgcaggctcggcaccgtggaagtttccgaccagctggaggtcgccgagtatttgcgggacagtttgcactttgttgataaacgacgggtgggcatttggggttggagttacggtggttacacggcggccttggccatggcgagccccacctcgctgttccagtgtggtatcagcgttgcaccagtcactaattggaaactttacgactcgacgtacacggaacgctacatgggtctaccaaacgtgacggacaactacaagggctacgaggatagcgatttatcaaaacacgctgaaaagctgcgtgataagcaatttcttatggttcacggcacggccgacgataatgtgcacttgcagcagacgatggttttctcgaaagagctgtcggcgaaaggggcactgtataagcagctgatctatccggacgagggccataatctgagtggcgtgaaaaagcatctctaccgatcgatgacgatattcctagaggagtgctttcggaagttggttccgcaggaggtgaaagcaggcctcgccaacggtggctcgatttctcagcagcgccgccgttaa

SEQ ID NO: 901 - DNA, 783 bp, Aedes aegypti
gtacttctcacaccaccggatgaaggaccccgggtgaaaggacaaagaatcaagctgcaggatataatcgatggggaatatgctcccaagaagctcaacggaagctggattggaccggatgaattcctataccagaaccactggggagaaataagcttgctcaatatgaacaatctgtcggaacggatactgatgtccaatacaacagtgaaaacactggcaccggccaaattttctatttcggcagatcggaagtttctgctgctggctcaaaacgtgaagaaactttttcgtcactcctttcttgcgcaatacaccatctttgatgtcacgaccagcgaaacgatccagctaacactgaaggcagacagtgacgagtggccgtatctgctgcatgcggagttcacccccaagggccaggcgatagtcctggtgcacatgtacgacatctactacaaaccgtcggcacgagccacccaaacgtatcggctcacgaaaaccgccatcccgggcattatctacaacggcgttccggattggctttatgaggaggaaatcctgcaaagcaacaaggccatttggctttcgaacgacggccacctgatgctgtacagcaccttcaacgattctctggtgcaggagcaacagttctcctggtacggcatgaccgacggcgatatcaatctttatccggagatccgctcgttaagtttgaatgattcgcgatcaacatttgaagcagccttcggagattttaacaggcattccataagaatttttata

SEQ ID NO: 902 - DNA, 1318 bp, Aedes aegypti
tctcaaatgcaagttgcaaaacaaaaagatctctcaacgattgatacacgaatttttatggattacaccttctaataagcaattgattgtttaaattcggaaaagtatgacctccagggaatgccgtatttgcttgcgatatgagcaaaactgtgtttcactgttcgccaaacggcggggaacttcattggcagaaatggttcggttctgtgcccgtgtcgagatatctgagaatgatggacttccaaaagatgcttgtggcagatgtgtggatgaagcattgaatgcgtatctgttcgtcaataaatgtcgaaggtccgatgcagagttgcggacagcacaggccagcctgaaggatgacaacgaagatgctgaaaccgagatcaatgaccaactagcattttgcgcagttgatgttgaaccacagcatgttgaatcattggaagtcgaacaagaggaagatacggcagacagcaatgtcccgatcccagatgtagatatagacattcaacaagttacttcggtttccgaagtgatggacacggccagcaattctgacgaagaatcgattcaatatgctacatctgatagtgagagtgttgaattcgatcatcaacagcaagaagttaagacgtctgataaagcaattcaagaagatgtttcattgggccacatgaagcaagaatcgcttagtcttacaatgcattcaagaagatcgcaattctgtactctttgttcagagacattcgtatcgctaaacgaaaaacgattacacatgcaaaatgttcacggactatcgggaccagtttctgtaaaacaaacaacacgaagaatttgctttcattcgatcaggaaaaatgcagtagatgaaacaagaccgtttcagtgcaacatctgttacaaactattccggacgttcgaaagccttcgaatccatcagcggtttgtctatcgcccgaaaaattttgtttgcgttatatgcggtcgggcctttgatacgcgttctaaactccaaacccatttgttggtacactcggacaagcgcaacttccaatgtgacaagtgctccaagtcgttcaagaaggaaattgatctcaaaagccaccacttcaaggtgcactccaagcagaagccttacccctgcagtttttgtgagcgaagttttgcctactgtagcgaccggaagcgccacgagatgagccacaccggcaactacccattcgagtgtgcttgctcgaaaaagttttcccggaagacgacctacgagaaacacgcgctatactgtcaggatagatcggagaatgaatatcgggactga

SEQ ID NO: 903 - DNA, 1014 bp, Aedes aegypti
gacacgtatcggctacgtttgcttctttcacgacatattcacagtccatccacagcggttccgaaaagctagccaactttctcgtttttctcgtgccacatctcaaccactttgcaataatgtctgaacaaacgagctctggatttaccaaggaggaagagctgcttctgcaggatttcagccggaacgtgagcacgaaatcgaacgctcttttctacggaaatgccttcatgatttccgctgtgccaatttggctgttctggagagtgcaccaaatggaactgcttccgtccttggtgttcttcgccatcgtcactggcctgtgcacctacctaatggccatggcctacaagaacacgaagtttaccctgaagcacaagattgccaacaagcgggaggatgccgtcacccgggaaatgaccgctttgctggccgatgacaagaaaatcagccgtaaggaaaaggacgaacgtatcctctggaagaagaacgacgttgcggaatacgaagcgaccactttctccatcttctacaacaacgctctcttcctggcggtggttatctttgccagcttctaccttctgcgttccttcactcccaccttcaactacattctgtcgatggccggcgctagcggtttgatggcgcttctgtccacaggaaagtctgcgtaacttactccgcgttgacaaaagcgacacgacagtgtccacactgcggtaagaaacaaccagtttttgtgtgtttttcagcgtgtagttattgtctgaagaattcgatactttcgcatttaagtttaagaaggcaggttttttcttcggatagtagttctcacatttgattagagtttaaatatcatcaacgcgaaaacatctttttttttcataagctcagtactgatgaagggaaggtttttgcttcccgtgttagattatttaagataacaaattacaattttcatagcctggattggagatttgaacgtatcacaataaaatgaagggcaagaaaaac

SEQ ID NO: 904 - DNA, 4626 bp, Aedes aegypti
atgcaaatcttcatctctagtatcgaaaatcatacaaagaaattagacgtattagtaacgatccttaatattaagaaagtggacaaatacatcattagtactgctactactaccgctacagtggaatctactattactcctactatttcttcaactattacaaaaactactcaagaatacacaaacaagtctgaatacgcttttaagaaatcacttaatagtctgctaagttcaaacaaaaacgggacaaatttcaagcaagagacaccagtgaaagcgaataagacttaccagctgctctcatccattgaacaggatctaccactgttactacaatcgatcgatgagtctgaacaacaatcagggattgtatctgatattatactaatcgttagtggtaaatcaaacttttgcaacagtgttgcaacatccagcatcgattgcaaaacatctgtagtgttcgaaagagggcagcggcatttggtttggtctccagctaagcaaaattatgcgctgattgagcattggccacaagaagcatcaggtggcaactttactgaaatggaaaccagaaacgggaattcgacacatttcaatcatctgatcagaagcatgatgaatgataatgacactgtgaatatgatatgtgattcaattgattacctgataacagtaaatactaatcatagcatagtgattgatggatgtaggagcttgatctgtaatgaccaaaatctagttcttaaggataaaaatgatgtagccatggcaaacaatgcaaacgatgctaatacttccgaacaagccaaacgaacctcgaaactagtatcaacgtacattaagtttgatgatttactacgtatgtcagaatgggagacacatgtgagcagagcaggcacgaagccacgcatgcggctttgtggcggtggagaagattctattaacaacggtactaatgcatggggagcaccaggcactaataatccaggcagctcgtggggtaatgtaaacccacaacaacctggtgtgtggggtaataatcagcaagttggaggtccagcctcatctggtgccaatttgaaacaacaaccgcctcaacaacccggttctgctggagcggtaagtgcaccaactggactgtctgctgcggaaaacgctgaacctaatgcatgggcaggaggcaatccagtgaatcccaacagtacaaacgcacaaaatcaacctgctagtgttaacaatgcatccaacaatagtaacagtgccaattcgattcaaggccagcagcaacagcagacgtcccagccaccaccaggggaaacaccagcggctcaaccgaatcctaaattagagcgtttgaatacgatgatagaagctcttcatgctttggatggttggggctctgagaatgtcaatcaagattcccggtgggatgtacctgcatctccagaaccaggatcgaaacccgatccaaatagcgctacaagtggccctcatgctggaattcccatgtggaaaacaaatacaggaacagaaatttgggaagctaatctacgtaatggaggacagatgcctcaacaagcacctgtgcagaagacaccatggggcccttccagcaatattggaggaacatggggagaggacgatgacgcgaatgaacctggaagtgtttggaatggagctaccggtatgaatcaacctcctgttactcctcagagtggaccatctcaacagcctccatggaatgctggtaatatgtggggcccaggtggagttgctcctggggctatcaaaaaggacaatgaatggggaggagcagctggtggtcctgctggtggatgggatcaaagaaatcctcctccattgggcgcacctaatgctaacgccggaatggatcccacaaatgttgatttgcgaaacatgcgtattgctggtgcaatggacagtaaccgagaaattcgaggtgatcctagaggtatttcaggccgattgaatggaaatgtaaacctttgggaacaacaccaactacctggcatggccccgaacaaaattcctcaagttacaacaccgagtacgccaactaccggtcctcagtggccagctgggcaaatccctgctcataacaaaatgccatctggttgggatgattcgtctaccccaggagtgcgtagaaatgtcgacgacggaactgcgctttgggggcaaggaaatcttagtcgccagaattctaacgtttcgaactggaaggatggtccggaaggcattcagcgaaattctcaacaaagaaattcaattgttgccggaaacctaccgggcccaactggcaaccgtttaggaaacactggcccaatcaaaccggataacctgtggggtcaaaataacgctggtggtcgtggcggagctggctgggatgaatcttctggcaataattgggacgataaaaattctggatcattgtggaatgaaaatgcatccgctgccggttggaacaaacctaaacaaatggcacccaactggaacgagccaacttcggacatgggctccgaatggggaatgcacaataatgttatgagcaagccacccaacaagattaatccattggaaattatcagaagcagcaaacactaccgaatgctttgtgaaatgggcttcaaaaaagaagaagttgaaacagttcttcgtatttgcaatatgaatcttgaagaatccattgagatgctacaaaggaatggttcttctgctgattggcgacgacaggatgatcacgggcctggttttggtggtcaatttggagatagattctcatccggtggaaattcagctttgccgttccctcaacccaatcagaacccactaagcggttttggtggaaatcctaatatcaattcattcaacaacatgaagtttggtgctggcaatggtggccctaatggggccataaatggtccgttcggacaacctccagcagcgctcaatcagaatgcacaatctcaaccctcgacacaacagcttcgtatgttagtccagcagatacaaatggccgtacaacatggttacttaaatcatcaaattctcaatcagccactggcaccacaaactttattattgttgaaccaaatgttgaatcatatcaagcaattacaagttatgcaaagcaatctaaaccgaagtggtgggggtggtgctaatgctgtacaaatttctcttggaatcaataagctcaaatcgcaaatcggtaatctgcaaaaccagataaccgcccagcaaacgatttatgtcaaacaacaacagcaacaaaataatccgaacgcagttccaggcggtggccatccagcaaatgacttgttccgtacgcctaacgacctctccgggttgccgggcacgttctctgacatgtcgttgaaagataacggcaatccgttcccatcgactggaagcactagtcagcaatctcgattgaaccaatggaagcttccagcgaccccagtagctgataaggactcagatctcaccgatttccctcgagcccctggaacaagctcaaaacctgctggactgggtgtaatggatgacggtacttggtctaatggtcgatcaaataccggtgatggttggccggattctaacactcatgacaaagattgggctggtaatgcggatgcatttactgatttggtgccagaatttgaaccgggtaaaccatggaagggcactcaaacaactcgtattgaagatgatcctaccataacaccaggaagtgttgcacgttctccactctccatagcagctgccaaagaatcgaatttatttgccaatagcaataataacaataatattaacaataacgcaaccaatagcaaatcctcgccgactgaatctatttcgtcctcaacctggagttacaacccaaataacactcatggtggatttggtggttctaaactgtcgaaaaatccttggcctgatagcatagttcctccttcagacttgtgggataatccactaggtaagagtcgcgtaggtccacctggtttgaagacagctggtggtaaattagattccaatggatggtcatcacactcagctggcagtggagcagctggctggaatagtggagctgcaacgtggtcatcaacatggatattgctcaaaaacctatcggcacagatcgatggtccaacgctacgaaccttgtgcatacagcacggtccattactagccttccacttgtatctcaatcatggcattgccttgtgtaaatactcgacacgtgaagaagcgaataaggcacaaatggcgctgaacaattgcatgctgggcagcactacaatctgcgcagaaacaccaactgaaagtgacgtgcaaaacattttacaacacctgggaccacccaatggtactaacggcctcaccggcagtcaatccggtggccaaaactggcgtctcggagcagcagcccaatcacagtccgtgcgcaccccagctgctgatgcctggggttcggcttggcccactactggagctggatcaaatctgtggggcccgctggaaggtccatccgatcgagcgacacctgctaatttaaattcctacttacccgagagcttacttggcaccgatttgaactaa

SEQ ID NO: 905 - DNA, 2336 bp, Aedes aegypti
gttgtttacgcttgccgtcgtgtttgctttcttacgatcgttcagtttttgtatgtttaaaagtgttcttgttccagtgaaattgatctctgttttcctgaatgagtcgccgcaaatctacgcacgttcccctgctggatccggacctcgatccgctgaagctcagttccggagatgaatcgtcctcgaggtcaacacggagccgacgaaaaagttcagcctcgtcaaccgggaagcaatcgatgctggtcaaagaaaataccatcgaagaatcctcggaagcggaggaaatgatggaggaggagtatgtggcggcacacgaacacgcagctcccccgagacgctcgcttcggcatcgatcccccaataagcggtacaccgaagggttcgttaacaccccctcgagagccggtcgtcgaagagcggaaccggaatcggaggaagccgagagtgagcaggaccagtcggaaggcgagtggcaaatggacgagttggtagggaaggtcaaagccactacactcttcgaggatcgactggacgtggaagggcagaagattttcggctttcggacgccacggaagcgaggctcgatgaatgtgctggccgcatcgagtgttcagcggacgcccacagttgggacacctactaccaccgggaggaaaagcgtcagcaagctggcggtggctacgccgaaaactcccaaaactccgacggcggccggacggaggaaaagcaaggtggacctggccaaaacgccacatcgggagcggaccaagctgaagaaaaatatcaaaaaaatcgtacaagacgaatccggttcggattttacggctagcgacagcgaatacgttccgtcgtccgaggaagatgaagacgacgagcatgaagatgacgacaaggaagaaaaagaagaagacgatgaggacgtggaagaagcggaagaggccaaaccaaagcgaccagtcatccggaaccagttgggatcgatcgatatcgctccggagaaagttggaccttctactccagtaccgtctggtcagcgtgtcagcagtcgtatccaaagtcgccggaaggccaatctggactacgttctgcagagcgatgactactttacatcacatggttcgtccaaagttgtcacatcggattcgactttggaccgactgaagactcctcgattgcctcacgatcagctgttccggttacttaaggaacttcagggttctaaggaacatcagaacgctattaaaaagttgcacgaggagtacgacagctacttcaccaagtggctcttgctgatgaacgaaggctacaacatcctcctgtacggattgggatccaagcgaaatctcctgcaatccttccacagcaaaatgcttgccgacaaacccgtcattgtggtcaatggcttcttccccaccctcaccatcaaagacatcctagaggccattaccggcgacatattggatctcaatgtccacagtgccaactttcacgagctggtggacatcatcgaggaggagttcagctacctgccggacacgcacctgttcctgatcgttcacaatctggacggaaccatgctgcggaacaacaaggcccagaacattctggcgcggttggccaagatcgacaacatccatctgctggcttcgatcgatcacatcaatactccgctcatctgggactcatcgaagctgagctactacaacttctcctggtgggacgtcacgacgatgctcccctactcggacgaaactgccttcgagaactcgctgctggtgcagaactccggtgccctggccctatcctccatgaagaacgtgttccaatcgttgacgtccaactcgcgcggaatattcttggccatcgtgcgctaccagctggccaacaagggcaacccgcactatccgggcatgctgttcaaggatctgtactcgagctgccgggaggcattcctggttagttcggatctggcgctgcgagcgcagctgacggagttcatcgaccacaagctggttcggatgaagcgaaccgttgacggggcggagaatctgctcattccgatcgagcacggactgctgcagcagtttgtggaggagaacgaggagtcgtagccttttgctggaaggtaagtggtaacagttataagacctgtttggctatatttattgcttagaagtacaatcctgggagggctgataacattattaaatcgaattttgttaagtaacagaagatgaaaatcattacaggaaagaacttagccctttaaattattttagtgaagcgaaacctggtgttacatcagttagtttgataaaacctcgttaaag

SEQ ID NO: 906 - DNA, 548 bp, Aedes aegypti
atcactgtgcatcggtgcccacaccgaagcctcatccgcaggggcccgtacagaaaaaggccatttgtgatgtttgcgggaaatttacggaatcacatctgatggagcaacatcgaaacaagcacctcgggattcggccttacgtttgcacccaggaaggctgcggcaagggatatttcagtcgccgggtattggccgcccatatacgagtggtgcatttggacgacccgctagagtgccccgtttgtcagcgtaagctgaagggaaaggcgctgctcaggcggcacatgctggtccacaacgagggccagcagaagaatccccgaaagtcggcctgccaggtttgcgggaaaatgttctacaagttttacctgaaggaccacatggccgttcacacggggatactggcctatccctgtggtatctgtgatcgacgctttgcagcgatgaataaccggctgacgcactggaaaaaggttcatccggatgtggagcatattcttgggaagacgccccaggacagtgggtcattaaatgatgattgaaaa

SEQ ID NO: 907 - DNA, 1167 bp, Aedes aegypti
atggattctacgcagcgaaaacccgtacccaaccgcatacccaccctgaaaccggccaaggtgaagctgagcttcaagaagaacgaaatccgccaatgtcgactctgtctgcgggtgcttcccaaggcggaaaccatgccgacgagaaccggagcgcaacccgaccttcgccgcaagattctggacgccgtcggggttcggattacgtcgatgtgcaaaatccagtgcgtgtgcgtcaactgcttgctgatcgtggacataatttatcaatttcgggcagcctgtcggcaggcggacaccctacacggaacgcaccttctaatgatgcaccccggtaaatggctgggggaggaaaataagaggatactggacgactgccggaaacttgtgcaacggaaccgggccgagatgcaaggactgttcaaatgttccggcttggctgggggagatgttcatttgttgaccgaagggaacgaggtcctgatagaggaggcgaaaccagaaccgccaacgacgaatgggaatgaagtgctgctggaggcgaagaaggaggaggaacaccgggaagagtctcagcagatggagcacgacataagcgacagtgatccggaacagaccgaacgctgtgcccaaatgctagatgccccggttatcttccctcgaactaaacagccccgaagaggcatcaaggatcacatgtgcgaactttgcggcaaaacgatgcagaaatcgttcgccgaaactcaccacaacaaaatccacatgcgctcgaatccgtacaaatgtccggaagcggactgcaagaaaaggttcccgtcgaaaatctatctcaacagtcacctgaagaaggcccactcgaatcaagcccaggaagtggaatcgtttgagtgtcccacttgctcgaagtggatcaagcataggaaacagttcaggtaccatctgctgactcacgccgcggatgtccatccgcagaagaaagcgtgtgaggtttgtgggaagtatgtttaccagcgatacctcaaggaccatatgttcgtccacacgggagagctgccgtacagttgcgaattttgcgaccggaagtacgcggcgcgaaccaatttgataattcatcggaagaaaaaacacgcagaccagctgcaagtgttggaggaggactcccaatga

SEQ ID NO: 908 - DNA, 3533 bp, Aedes aegypti
gaagcactagtgggtttagcaggagcaagatgattcacggacatcctcctcagccgccacagcagcaaccgcatccccacatgggtcatcctccaccgccagggcccgccacgcatcagattcctccgccgccgccacatctgacccatcttacgagcgttcctccgccgaatgtacctccgcagcagcagcaaccaccattgccgccaccaccacaacagggccgagaacaccctgggccacgaatcaacaaccgacagcaccatcatccacgtgttccggccggcggggatcatcaccagtcgtcgatgcccggtggtcctcacatgccattgcagagctctaggaaacctccgtcacaacactatggcgccgccaatggcatgggaccgggcagcggaatgggatcgaagcaccagcaccctggtggaatgggcggccacccttcgaaggccctgccgtacggttccagcagtagcagtagcaacagtagccatcaacaccatcaccagcagccacaccaccatcagcagcagcagcagcacaatcaccacagccatcaccactcggggcatcacaacccggcggcgattccggtagtgtcggccgccggtcccggggcgtccaaagctcgcatgattccatcgcatgaacccaaaaacatccacaaccacagcaatacggcaccaataggtaacacagcgaatgcaatagtggtccatcaggcggacccagtccaacagctatcgggaggaatctcctcctcaaccgccactaccacagtcggaagtaccatcgccacccacggaagcaccagcaatacaaccaattcatcagccacgaacagtggtagtcttcctccaatggtaacgggtggtagcggtggcggaggaggaggtgttggaactaccgccatggcagcaaccaatgccaccgtagtggttctgggcagctcttccgatagcgccatcctgaaagattcatctacaacagtacagtcacagtcgctactgctgtcgtctgtaccagaaaccttggcaaacactaaagagaaaacaccaatgtgtttagttaatgaattagcacgttacaacaagatccagcaccagtaccgcctaacctgcgaatcgggcccggcccacaaaaaacgcttcaccgtcacgctcaagctgggcgatgaagaatatacggccgaaggcccgagcatcaagaaggctcaacacagtgctgcccacgaagccatcggagccaccaaatataagcatccaccggccaaaaccaatcgagccaaagcgggcggaaaaaccaacatcggtaacataactccgacggtcgaattgaacgctttggccatgaaacgtggggaaccgacagtctacgaaacggaacaagtagtagcggcaccaaagtataccgttaacagtcaccctcctggggctcccaatgctcctccacagggtggaggtggcggtcacaacttcttctcggctccacctcctcactacggcggatacaatcgtagtaatagcatgtacaatgctcctccaccggggagcgtaagatacggtgctccaccaccaagttccttcaacagacggaacaccatgggtggaaaaccggactaccacagtcggggatattactacaatcagcacgtaccgcctatggccccacccataccggaagtgtacaaagtgaccctccacgtgggagagcggacatttttaggggaaggacacacgctgcaagcggcaagacatgacgcggcggctcgtgccctggaggtactgaaaccgctgacgccggatacggccaatcccgtatcggacagtcacaacacatcgatcgacagcgatgatcccaactccgatctaaaatctccgatctccctcgtgcacgaaatggcactgaaacgcaagctaacggtccagttcgaagttcacggcgaaaaaggtccacctcacatgaaggttttcacgacgctgtgcaaggtgggcagtatcgttaccgaaggcgaaggcaatgggaaaaagctttccaaaaagcgagccgcagaaaagatgctggacgaattgcggaaactcccgccggcttcaccggagaagaacacccgtatgctgctgaagcagaagcgcaaggtaccgctgccgaagaaaaagactcgcaacctcatcaaagagaaaggcgacgaagacccgaccggcatggtcaatccgatcagccgactgatgcagatccaacaagcccgcaaagaaaaagaaccagtctacaccctagtggaggagcgtggcgttgcccggcgtcgggagttcatcatggaggtgtcggccagtggcaaatctgccaccggtataggccccaccaagaagctagccaaaaaagaagcggccgaaaatctgctggtgatgctggggtatggccggtcggttgctggtgcgggatcaccaaacaaggaaaacatgtcgggcagtgcaaacgaagtggtggtgatggagaaaccgccggcacggaagatcgtgttcaatgagtcgggaggcgagcagaggggaaaggctcaacagcatggagcggccgggcggcagattgtgcccggagtgttgcagttgaattcaggcattgcaaacaaatctgccaccggaacgccgccaaaggaacacccccaggaaagcaacgtgtcgatcgactccggcaacgcttcttcgaacgcaaccatatccccaacagccgtcaactcgtctagtacttcaaatgtggcacctagtactgcacagacacctgcacctgctcccaccacccttaagagcagttccattgcggatgtgggtcctatgaaaaagcagctcatgtatctggctcagctgttgaagtttgaagtcatgttctccgactttcccaagggtaatcacggtgagtatctcactttggtaactctatcgacggaaccaccccaactgtgccacggcagtggtgccagcttggaagagtcgcacgacgaggcggctcgcggtgcgttggaaattctcagcaagatcggattggacaatgtaaagccaaagggtagcagttccggcggtaatgcggatgaaagtgagaaacccaatgatatcaattcgaaactggactacagagttagcaagcgcgtgatttcggatgtactcgggatatatcgagaggaaatttccaaaatgaaagacgacagtcgcagactgcaggagagaaacgacaaagttgatcagagtaagaacgaagcacatggttacattagagattccgtggtagacttgctgatggaatgtttgaaagatttagttcttgataagttagaaaaccatcgatgttagttattgtttattagtgtaactctttgaaaagtattaattcgtttttgtttgttatgtgtatcgaattcaatgtttatggtttgtcattttatatgtttgttttataaatatctacatattggtgcatgtcttaaatttgtgtattgatttactcttttctattataaataatgattgaggtaatcaaagttt

SEQ ID NO: 909 - DNA, 2154 bp, Aedes aegypti
atatagtgataaagacgtgctcatacagttcagcaaaattgtgatttttccacccatttcatcccgtgtcttcccgtttcaacattttccctgcaccctgtcggtccaataaaacaaacataattgccgttcttctgtgcttgattagagggagagaagtacacagcactttcaccgatctacatagaagcggcaagttacatgacgcagtaatttttttgttgatgtgtgtccacttgcacgtacctactggacatattgaggtcccctttctggacggaggtagcgatcagttacgatcgagattttgtgacgaacggacgacttttcaaagctttcaaactgaccgccaaaggctcaaagtggagctctcaagagtgacgagtgattttcgctggcaaatgcatacgcaccattgtacttgggtaaagaatcaagccagaagcgttcacaaacgattgcactgggtggaagtgctggacaaggggtaaatttagtggaagaaatcgagaatggcgccaaatcagcgtgacctcgaaacggcctcgctactgactgcaagcaacgataataacaacaatgacaacagcagcagcattcgcagcaacctcaacggcgatcatcgactgaagccatcgcttttggaggttgcgatccgaaacaacatgcgacattacggatctacgcctaatcaatggcagaagataacgcgctatgatccacttcagcaccggaagctggagaaccccacgtccaatctggacactttgattcacatgttgaacgggaatttgggcacgggaatcctggcgatgcccgacgccttcaaaaatgccggattgtacgtcggattgtttggaacaatggctatgggcgttatctgcacccacagtatgcatactttggttaaggtttcccacgaactgtgtcgacggtaccaagtcccatccatgtcattttccgaagtaggccgatacgccctggagtccggtccaagtagcctacagcgattcagtcgcctcataggagtgctcattaactgcttcctcatcatcatgcagctcggattctgttgcgtctacttcctcttcgtagccgtcaatctccatgactttctggagtacatctccatcaaaacggacgttttcaccgttctcttgggcatattgctgccgttgatcgccctgaacatgatccgcagtctaaagctgctcacgcctacttcgatggtagcctcgcttctggctatctccggcatcacgatctcgtccatgttccttctaaaagatcttccgcgcagcacttcggtagcacctgcgtccagttggagcacaattccgctgtacttcgggacggtcatgtatgccttcgagggcatcggtgtgattctaccgttggagaacaacatgagaacgccgaaggacttctgccgctggaatggggtgctcaacaccggaatgaccatcgtagtttgcctgtactcggccgttggtttctacgggtatctcaagtacggggatgcggccgagggaagcatcacgctcaatctgccgagccacttgtttttggcagaactggtacggcttctgatggcggtggccgtattcgcgtcctacgctctccagttctacgttccgatttccatcctgggtccggtcgtcaggcgccagttcggatcgcaccgtgcccaagactacgccgaatacgctctgagggtggcgttggtattgctaacctttactttggcggcgatcattcccaacttgggatcgttcatttcgctggtcggagccgtcagcacatcgacactagccctagtgtttccgccgctgttggagattgttacctattggccgagtcggcagtatgggacgtggaactggattctgtggaaggacctactgatggtggcgtttgggttgagtggattcctgattggaaccagtatgagtgtggttgagattgttacggagtggcagtaagggcctatggacaattaagtaggcaactctattttttataatgacaaaccttttttgttagctattttcgtgattatgtgtgttgacaccggaacaaatgtgttcaatgttttagatatgtttcgttttaaattatttatattattagaaaatatacagtatgctagacaga

SEQ ID NO: 910 - DNA, 3888 bp, Aedes aegypti
atttcgagccatttcgagtgacagttcctctctttgacatttccctttcccgttattttcttttgtttgctgcgccagttcaaagcagtcgatgcacttttgcttgcaagcatcgcgttgtcttttagtgtgcgtgtgtgtgcgcgctgactggtgttcttttcataaataatttcggtcgatccgtcgaaaaaaaaaagtcgcgtaaaagctgcgttttgattgaatttcgcgacctgtgtgttgagtgtgtgacggaattcgtcgtcgtattttcaatcactgaacgacgagtgtggttggtttggtgcgcggagaacattgacagaagagagtcgagtcagtggcagaggacaacagtgcgaagaaagaaaggcccccttttttctgtgacgatttttgcgaggatttatcgaacggttccccggaggaatctactgtcaacgtctggagaaatccgcgcattcgaactaccagctggtttccgacaagaactattttccgatatcatggactccacggcgctcctggatgccgttgccagttcatcgctgtcggtagctggtccctcgtcttcatcgtcgtcactgtcctccacatcaacagtggaatcgccctcggccgcagcaaaggagatctgcaaattcttcaaaatgggcacctgccgctatgggtcggcttgccgtaatgcacatgccgccgctgcagaacaaccggaacccggtccatcgtttgccgccgatccgggaccgagcaccagtgccggtttcaccattgatcctctgaagtggatcaacgcgccggaattcgtgcccaagttcaaacagtggcaaccaactgctggttcggttgatgtgcaagaggcagagcagaacttgcagagatcagaacatctacagccactggaattgccagaagaagaggacgcggcgatggatgaggaagaggtcgtagaaaatggggatcaggaagatgatgtctctgccgctggcggcggaatgtcctacgcggcgatcgtcacaatgaacaacaaccacaacggcttgggaatcattgaggaccatgtcgattcggtgctatgtccgtactttgagaacagtggcgtctgtatgctggacacgtgcccgtatgctcacggggaactgtgcgaactgtgcggcaagttctgtctgaatccgctggacaaggaacagcagcggctgcacaacgtcgagtgcatcaaacagcacgagctggacatggagcactcgtttgccattcagcgatccaaagacaagatctgcggcatatgtctggaggtgatcctggagaagccgagccgcgagcagcggtttggcatcctgccgaactgcagtcacatcttctgtctggagtgcatccgaacgtggcgacaggcgaagaacttcgagaataagatcaaacggggctgtcccacatgtcgcatctcgtcggacttcgtttgtcccagcattgtgtgggtggagagtcgggaggagaaggataggctgatcaacgattacaagaaggcgtgcaacacgactcactgcaagcacttcaagcagggcacgggcaagtgtccgttcggaaacaagtgcttctataagcacgccctgccagacggtacgctggtcgacgtcggcggaccatctcgacagacggacagccgcctgcggatcagccacctgcaggactttttccgcgaggtgctgcaccagcggggacgcctcctgaacgacttcatgtcgtcgatcttctccgacagcgacgactcggagatgtccgaattgtacgatctgtacgacatctagttgctcagccctacagcagtagcagcatcagcagcagcaatagcccgccagtcgcaccagcagcaaacgcaccaggatcagtcgcagccgcagccacagcagcagtcccagaatggccaattgtgtcagcagcagcagcagtaccaacaccaccaatacctttactactactattactatcaaatccttagcggtggcggcagcgagtcccgttttggtagcaccaaccacaacagtaacacccgcggcggcgtcggcagcagcagcagcaacagtaattgtattttcgtctatttagtccatattggaagtggaggagcaactctcgtggccgtcggacctggtggcggagagtaacctagaaaagaacgtgtgtttcagtgtattttccgaccaggtaagacattaatggtaggccatggtaaggcagtaggctccgccaggtggcgtgcactacctttatgtacgattagtgtgggaccttccgggacgtccacatcccagttaagcttggcggcgtgccagaacttggaaatgtgtgtatcgaagccgcccgcagactttggccccgtttgaaaagcgggacggaacccaaagctgattgatgaagtttcatgtttcttttttcgattacttcccatttaaatctgtccacgtccctgtacgttatcgattagttcaactatttattcaaacagcgttgatattcttattttctgtgttgaaaaattcggcagtctgttgatctgtattagttaatgcccagttctttaggtagatcggaaaaactctgtgtgctggcaagggagcgtccttccacacaactgttcatcatcataatcgtcatacactttatttggtacgttgtaatttagtgtgtagtaaacttgatgtagaagccgactcccatcgctatcgagttgttgttaagttaattggaaagccatatatcccacctgcctccccggcgatagttccccgctggatatcgcacttgtcctccggttcagaaggaaagtcgtcgagtatccgcgtgacgatagcaatcgttccaagccggaagattgcattcaaaatttagctcaattttacgtttaggaatcgattcgtatagttttgtacctgaaaaaaagaacatctgattctctactacctctcaccgtctcgctccctccataatgttcactcatttactcatgtagaatgatcgaagtagcccttgctagtgacgccgacaggtgggaaattcaaattcgacaatttgatttcaagcagttgagagatgcatcagagcacgttgccaggcagggcggatgacacaaatacaaacacattatactccggtttttgaaaaaaagtatgtatcaatgaaaaaagtgaaactctaataaacaatatctatttctatattaggaatcgattgattatcaatagaagcgtttatgaagagtaagtccactcagaaccagaagttagatcacaacaatattcaatttgagcgccacagaaagtcataagcgagagccacactgaaaacacacttatccacgctaacataaatagacacgcctactttgtgaaaagtaaaatgagactcatcgtgattacgaaacaaacacaaacacacaatcccacacacacacacacctttaagcgcaagaagatccgctaaatgcctaaacaaacactattataaatgattatcaataatcatcaattatatgtaacgaattattacgattatatatatacctaataaaacttacaataatagttgtttttagcgaaaaaaaaaacatacgaacacagaacactttaacatttaacaaacgttgtcgtcgttgtcgatattaaatctttgaatgaattcgagcaaaaaagagaaaaactgacattggcaaaagcgagctaaacaaagcaaaaacaaacaaaataaaaaacaattgtgaagcgattcctggaatcgaacagctacatgtgttattagattgagaggtaaaaaactgataaacgaatggcagaaacaaaaaaaaatcaatatacatatgataaatatctacttaattcaagcaaacattaa

SEQ ID NO: 911 - DNA, 3010 bp, Aedes aegypti
aaacgttcctgaagggcatcgggcgaaagtgacgtgttttgtggcgaaatcgcgctttgacagctgcggtctgacgtgtttttcactctcctctcggtagattgttctcgggtcgaaatcgatttcgtggccgttttgtggaattcttaccagctaattatgctggttttgtgttaatttacttgtaaggtgtttaaaaagaaaggcctgctaacggaatattgaaaagagtggagcgatgacgacatacgaggagttcatccagcagaacgaagaccgcgatggcatccgctttacgtggaacgtttggccgtcgagtcggatcgatgccagtcggctggtggtcccgttgggttgcctttatcagccgctgaaggagcggccggatttgcctccgattatgtacgatccggtcgtttgcacccggaccacttgccgggccattctgaatccaatgtgtcaggttgattaccgcgccaagctttgggtgtgcaacttctgcttccagaggaatccgttcccaccgcagtatgcggccatttccgagcagcatcaaccggccgagctgattgccggattcagtaccattgagtatacgatcacccgggcaccgtgtcttcctccggtgttcctgttcgtggtcgatacctgcatggacgaagaggagctgaatgcattgaaggactcgcttcagatgtcgctgagtttgcttccggccaatgctctggttgggttgattaccttcggcaagatggtacaggttcatgaacttggcacggatggttgctccaaaagttacgtgttccgaggaacgaaggatttgtctgccaagcagatacaggatatgttgggaattggacgcggtccggggcctaatcagcccggacagcctcagcagcagatgagagtgcctgcaggtccagttcctccggcaaatcgcttcctccagccacttcacaagtgtgacatggcgttgactgatttgctgggagagttgcaacgtgatccatggccagttccacaaggaaaacgttttcttagatctacgggtgctgccctatcgattgctgtggggcttctggaatgcacttaccccaacactggggctcgcattatgatgttcctcggtggcccatgctctcagggacccggtcaggttgtggacgatgaactgaagcatccaatccgttcgcatcatgacatccagaaggacaatgccaagttcatgaagaaggctatcaagcattacgaagccctggcgctcagaactgctacaaatgggcattgtatcgacatttactcctgtgccctggatcaaacgggtctgatggagatgaagcagtgttgcaactcgaccggaggtcacatggttatgggagattcgttcaactcgtccctcttcaaacaaacctaccagagagtattcgccgtggatcagaagggagatctgaagatggccttcaatggcaccctggagattaagtgttcccgcgagctgaaaattgagggtggaatcggatcgtgcgtttcgctcaacgtcaaaaacgcttccgtgtccgattcggagattggaatgggcaacacggcgcagtggaagctctgcacgatgacgcccaacagcacgatggcattcttcttcgaagtggccaatcagcatgcggcgccgattccccaaggcgggcgaggttgccttcagttcatcacacagtatcaacattccagtggacagcggaggattcgagtcaccactgtggcgcgaagttgggccgatgccacctccaatctgcacatgatcagtgccggattcgatcaggaagctgcggcggtcctcatgtctcgaatggtcgtctacagagcggaatccgacgatggcccagacactctccgttgggtcgatcggcagctcatccgtctctgtcagaaattcggcgaatacggcaaagacgatccaaacagcttccgcttggcggagaacttctcgttgttccctcaatttatgtaccatcttcgtcgatcccaattccttcaagttttcaacaattcacccgacgaaacaaccttctatcggcacatgctcatgcgagaagacctcacccaatcgctgatcatgattcagcccattctctattcgtactctttcaacggaccgccggaacccgtactcctggacacgtcctcaatccaaccggatcgcatcctgcttatggacaccttcttccaaattctgatattccacggcgaaaccatcgcccagtggcgtaacctcaagtaccaggacatgcccgagtacgagaacttcaagcagctgctgcaagctccggtggacgacgcccaggaaatcctgcagacgcgcttccccatgccgcggtacatcgatacggagcagggtggatcgcaggctcgcttcttgttgtctaaggtcaacccctcgcagacgcacaacaacatgtacgcctacgggcagacggctgctcccatggcggatggcggtgccccggttctcaccgatgacgtctcgctgcaagtattcatggaacatctcaagaagctggccgtctcatccaccacctaataatcgcaaggcgggttgatcattttgcctggatgatgtgaaattgttagatatcgtgtacccaatacagcatgttgaaagtgtgacagattcagattttaatcaaatatagtgtagagactgctggagaaatcacgatgatatgatattccactcgatacgatgattgtgtgcttgtggacggctgtcgaagataacaagaacctcgtatgcgagacacgacgatgcttttcaattgtaaattgaatgtgtcgcaaccgttaagaggggaacatgagatagagagagacgatcaatttgtgtcaatgactgcgatgaacaacaagtagagggagataattgatggaaatgtttaactagatgatttattcgttgaaaaacgatactacccatataactgcttaagcctaaataaatttagaaacgggacaagagttt

SEQ ID NO: 912 - DNA, 3431 bp, Aedes aegypti
aaacatccacatgttattttcgaggcacgtacaaaatcaaacaagggctgtgctaattccggcaacatggagaactgggcgaggcaccagcgaaaccagcggcagaaccaccattcgggtctggtggccgatcagcaggacgcgaacggcgccgggcgctaccggagggacgtcagcgagacgaccaagtacatcgagacggcgctcgtcatcgaccggtcgatgttccagaagcgcaacgggagcacccgggccgaggtagtgcacgacgccatccaggtggcgaacattgccgatctgtactttcgtacggtcaacacacgcgtatcggttgtatatattgagacgtggcaaggcctgaaccaggcgaagattgatggtggacaggatattagtaaagcaatatctaattttaatgattatacaactagaaatttatataaaatagataaggacacgacgcagctgctaactggcgaaacgttcgccggtggtgaggcgggaatggccgtgccggattccgcctgcacagcaaaagccgtcggtattagtgtagatatcaatacgtacgagccgcatctgctcgcgggaacgatggcgcatatgattggacacaacatcggcatgagtcacgatgttccccgtgacgggtgctcctgccgagactggcacggttgcataatgtcccagacgattgtcggtctggaaaacgttcaaccgtacaaattctccgaatgtagtgaaattgattacaccgttgcgctgcggcacgggaacggcctctgcctattcaacaaaccaaatgaggtcgtgttccgaaagaactgcggcaacggtgtcgtcgaggaggacgaggagtgcgactgcggcaacgcgctggactgcgacaagacggatccgtgctgcgatggcatcacctgcaagctgaaaaaggagtcccagtgcgccactggaccatgctgtgataaatgtattctaaagcctccgggcgtgatttgccgggatgcgcacaacgagtgcgacctgccggagtactgcaacggggaaaccggacagtgcccgcccgatgtacataagaagaacgggaacccgtgcgggatgaacacgtccgggttgactaccggttactgtttcaatgggttgtgtcccacgacggcggcccagtgcgagcggatctggggctacagtggaaccggcgccgatcgcgtatgctacgagcagttcaactcgaagggttccatcaacggacactgcgggaaggacgctagtggcaactacatcaagtgtgaaccggagaacatccaatgtggttcgcttcagtgcaaagacggcgatcggacgccagtggaggactgcagtgaccatcaatacgctaaggcaattatttcaattaagggagtcgagtacgagtgcaagtcgatatccggttcatcgacgggctcggcaacgccaccattcggtctggtgcgcgacgggacaccgtgcggcgataatctgatctgcgtcaaccagagctgtgtcagtatatttccgtacattgaccagaccaagtgtcccagcaatcacaacaatctggagtgctccggaaatggggattgcaccaacacaaacaagtgcttttgcaagttcggctggaccggtccggactgctcgatacaggctcatatcacaacgacgtacgcgtcacccgtaacgtcatctacgcccgagtccctcgccggcgtaatggaaaagaaaaccactcgctacggtaagtgtgccacgtgttccgattttttcgcgccgccttgtcccctacaatatccgcctcaaacacctgtaaaacactcataactcaacctacctctaatcggtctgttgttttcaaatctgaatacacatctacactcacagttctgagatatttgaaaaaaaaccgttgctcgttctagagccattcgttttcatttccacttgatttttttccatttcattcgacaaaattgtgttattttatctgttttcattttccgaccatcatcaaagctctacccggattttattttcctcctactcactaaatctcctcaaacgacataatgcgaacctatggtgaggttcattccacggttctcactttctgaggagatggagaaaaaaaacaaacagtacgttctctatctctcgtttgacgataattttcctctgatacttttttgtttgattttctcatcctgagaacttgtaaaaataaaaagaccacttttacaacctcattacctgatcgcttgctttaactctcttgcaaacttgtttttttttcacgttgtgcttgttcatactgaataattcttttaaagaaaccggctctcgtaagccgatgtcgacaaagggacatctaatcggatctcgctcgcaataataaagtagcaaacaaacaacaaagcaaggagagttacgaaatcgctttgaagaaggatccgcagtggatccaacttgtggaataaaaaaaacaatcgaaaacaatttatgacaatggtaatcgtttccccatccccattttaaacgatatgtagtttgtagaaataacattagttgaagcatttaaaatacccccatctagcagtaaatatccaccataacaatcacagctatactctttctcaactaaaatatactggcaactctgactttctctcgaccactctttcccgtagtaggcctgacagtacgatttccgatccctataaaataacagaagtacaaaaatcagcataccaactaaatctctgaaagctttccatcccttcagaatatattttccccgtcactcgttcaatctagcttaagtatattgtttccatgtatgttttgcttgtttggttgatttttcttcaattttggttgaattaatttcaattttgttgataaaaactgatttgtctttcaacatattttggatttaacaacgacacttgctactccaagaataagcttaagttatttcaaaactcctacaaccaagctttaatttcacgcattctactgtatccgctatgtgtaggtgcgtacactctataagtctattcgtccgccccattctgccatcgacgatacaaactcacgcacatatccgttcgaatcgaataatttctcatcactctattgtttctcgttcatttttattcttcttcacatattccatccctctcgatttcgccatattcaacgcgtgtaccgtgtgcctccaccaaatcaatcaatcgatcaaccaacaaccactaccaccaccaacccacaatcgaatcaaaaaccacaaaccccgaatctcgccgaaaccaacacatacaacatgacgtcgacgaacccgcgaaatcctgaaaaaacgctgaaaattgtccaattgatcgaattttgataccacctatgcccaataaaaatccactaaaaac

SEQ ID NO: 913 - DNA, 615 bp, Aedes aegypti
atggcctatgtagtggctcccaatattgaacccttccgcaagggtcaaacttttgcaacttggatccgtcgtttaacctatcatttccgtgtgaacaaggttcaggataacgataaaaaggatcaaatgttcttgttgggcggtgattacctgttcagcgaggcagaaaaactttatccgacggaggcactgttggatgaagtgtcctatgaggtgctagttcaaaagcttagggagcgtttagacagaaccgattctgtattgcttcaacggtaccattttagttcgaaattacaacaggccggtgagtcggcaagcgattttattttttcccttaaactacaagctgagcattgcgagtttggggaccagaagaacaggttgattttggaccgtcttctggttggtttgtccgatactaagctaaagcatcgcctcctcactgaggacagtgccaagttaacgctagaacaggcggaaaagatcattgcgacatgggaaatggcggcgacccatacaaaagccttggcaaacaatgaggatgttggcttggtagatcatggttggaaacgaggcgacgactaccgctcatccaacccaaatccggctcgttaa

SEQ ID NO: 914 - DNA, 4103 bp, Aedes aegypti
cactcagcactgcgatgacgagaaagtgtcgaaacgaaactgttttgttttgacaggtcgacagtgccagctgcagctgatcgagagggctaagttcgacactttgattatacatattgatatatttaaaaaaaattaaaccctcccaaccactcaactgactcttctccggcgattccccagtctctactacgcagcaagtgaaaaacggcttgtgttgtgcaaagtagcaaacgtcaacgaaacttttattttcaatccgtgctccgcgatcaacaccgaaaagtatagtttttccttggcattggcagtgcgtgaagaaaagtggtgaaaaatcgaatatttcccgaactgcagtttgtgttttccttcgttttccccggttggaaaaccttccggaagctgtcgcattcggtttcggataggtggttgaatgtttgtggtcgcagtgccggagcaataattggtgccaggacccagactcgctatgagcgatgaaaatggaaaatccacggcgaccagtcaatcttcgtcgtcgtcgaatcctgaagcagcagggaagagaagaaaatacaaagtagtcataatcggtgcgggtatggctggattatcctcggcgaatcatttgattaagaatggatgctcggattttgctatccttgaggctcggaatcgggtaggcggaaggatcatcggaatcgagatgggatcgcaaaaggtcgagcttggtgcaaattggattcacggtgtgttgggcaatcctatgtttgaacttgcgatgcaacatggactgataagcatcatcaatattcccaaaccgcacaaagtggtagcggccaccgaggacggcaaacaagtgccttttcaggtgctacaggaaatctatgaagcctacgtttgtttcctgcggcggtgtgaagagtatttcctttgtcagtatcttccgccgccggatattcacagcgttggagagcacattaatctagaagctgagttgtatttaaacaatatagacgactacaaagaaaaacatctgaggaagttgatattcgaatgcttacttaaacgagaaacatgcatcaccggatgccatagcatggacgaaattgatttactagagctaggaagttacacagaactacaaggaggcaacatagtactgccttcgggatatagttccattctgaagccattgtgtgatacgctcccaaaggaaaacattatcctttcgtgtcctgtaaaaacaattcactggaaacgaaaaggccgggctcattcaggcaataataactcagacgccatcattgaagaggatgaagacgatatcgattcggatgattcggacaagacagtaacagaagtgccgatcggagacaatcctagcagtggtgataatagcttaaagcattgcacgtcgaacgttcaaatcgagtgcgaaaacggtactatattcgaagcagatcacgtaatctgttcgatcccgttgggtgtgcttaagaagcatggccaaacgatgttcgagcctagcctaccgcagtacaaactggaatcgatcgattcgctactgtacggcactgtagataaaatcttcctagaatacgataggccttttctcaacgccaaagtcagcgagatcatgttcctatgggagcacatcgacccggatccgaacgccgacgaggaagagtacctgaaatccaactggtacaaaaagatttactcattttccaaagtgtcggacaccctgctgctgggatggatttctggccgtgaggcggaatacatggaaaacatttcgcacgaggtggtcgccgaaaagtgtacggaaatcctccgaaggttcctgaaggacccgttcattccaaagccaaagcgatgcgtgtgcaccagctggagcaagcagccctacagttgtggatcctataccgcaatcgcggtcggtgcctcccaggacgatatcgacaatatcgcacagcccctctactctagtccgcatcaatccaagccatcggtgctatttgctggagaacatacccactccaacttctactcaacggttcacggtgcttaccttagcggtcgaacagccgcacaaatcctcctaacgcctgactcgccgcaggaaattgtgatggaatcggataccagtgatcttagctcttggatccagggcatcgctctggaatagtaagatagacgacaactagtgatttccctgtaatttattataattttagcatttgcggtttgccgttacatttccaccccttgtgcgatcatttatgttggttttcttttttgttaacacttttacgtttcgttccttcctgtattgtgcaaacctacttaatatttagttccgttaaaccaactatcatactaactcgtgggttgcatgtaaatttcagtaccctgttatattgtgtttccttgttttaagcaaacatgttcactagactgatgatttaggtttacacgatagctgcaatggagctacgaacaacgctgcaaaaacctcgacatagaaacttcagtaacgcacatttcaaagtttgtttaaattcccaaaaaccaaaaactctataaaacgaggatattttccgtactgttacattacgcaatgggattgtgctctcttacttacaaactatatttttctgcagatttccataagttcaatctagtccactcgcataatcgaacctgtacctaaacctacgaataccctaccaatacaccttgactaagttatctagttttacttgtctatgttgttgaacgcagaaaacagttaatgtgcatttgtatagcgataccaaatagtagaagcttcagcaatagcaattacacgacgcagtcggatggctgattcacacccgttaatccttagaataagcgtgatgctttcagtatgaaccaataaaatattcacacgcccccacatatacacaaaccgtaaatttataaaactacaaacgcattcacaacaagcattatagcgctgggaacagatccggttgaggaaagttgaaagaatagacagtttgatcataaataaaaaaaaaacacaaaaaagaactgtttaggattggacggtttttctacatagctctatagtattgttttttgattgtagaatttgagggaatttcagggcgagacaacgtatagtattgttagcggattgaaaggaaaattaacgaaattttagaatgattcaaatacacaatcgattcgttgtcagagcaaacgattgcaaagataggttctaagcaagcgacaaaagtattttgctaaaagtaataaattggaaaatatcaagtaaaatcaaacatttcaatcaataggaaattatttatgccgaaatatgtccaatgcgatcgccttgctcgatattgtatttgaattgtcaatggattctaatatggcgtttattatcatcaaatgataaatcaatgagctgcggagttttgtgggttctgctcgtttgatcgagcttttggtattcctcagtactgtatctcctaattggccgctcgacatctatgttttttttctaattctgaaagaattcaatgggatccatgggaaaaatctctccagcaatcaaaatgaaaattttcgtaattattcgtgagacaaacctcacagcacagacaactcacagggaatccagatgtaaatcttataggatccagagatttcaacgcggcttctctgcagcagcacgaagaaatctatggattcctcgaagaagaacttcaggaattattcgagagttttctacttaaatttggtcaggaatacattaagaattattgtgagactccaccataaattcttcgagagattctcccatcaattcttacagggtttcttctagaaattcccaagacaattttgcatagaaatttctccagtatttccttaaggcccttaagttaagggaatccttctgaaatccaacgacatttcctcctgggatttttacagagattgctacaaaattttcctcaggaatttcccgggattccctccggagatttttttttctgttcggaacataagccactgtgaccaatatttgatctattgtagtatat

SEQ ID NO: 915 - DNA, 711 bp, Aedes aegypti
ttagctctctatctaatctgaaccgcattacatacgaggtgtctagcattctaacaagccttacctacataggtaacgtgaatccacgcttcagtatagtaaacaaaacatccgaaataaaaatattgatgctcttgttggggcacctcaagggggagaactttggcttgtttccatttggcgtcagtgtagaactgtgagtcgatcctcattcaaaatattcatattggtgcattgaattctcccaaaggaagattagtgttctgcatttgatggctctgggcagaatgcaaattacaagacagcaatttaagcggtcgaacgatgacgaaaagagcgaagaagagccaagcgtttggcacgatttggagcagctgatcaacctcggtggcacccatctggcctggctggtgtcgattggattgaccttagtgctgttgatctttctggtcaccggattcctgctggcgaccgcaatactaatgacaacattctacttcttcattaacgagcatcatcagcggctgcaacagcagcaattgatgcaccaaaccgattcgctgctgcccggaatggagttcagctgaccgaattctctttctaatatgacgattacgtgtgtgtggcgcgtaattgcatttgtgctttgacgacttttgagcgtgcgtgtgagacaataaaaccatctatagacggacgacccaactcagg

SEQ ID NO: 916 - DNA, 1482 bp, Aedes aegypti
cgcctttttggtttggcgcgcgcgatgttatgcgaaacttgtttttttaacacacgcacacacacacgcatttgtaagccttgcatttgtttacattcttgccgacacggccgatagaagcacgaaaatcggcgacatcgtggtttatttgtcgtaaaaatcaaactttttacgtgtttgcagttattatccgacgtgagcctgcttaatttatacagttactagtgaccatttatcttacccaacgccatggattatcacaagcgactcgacatggtggagatgttcaaagaacccccggaatacaaacctccgggcacggcggaagaactggcctgcagcgttgactatccgaatatgaactccctgcagtatcgcatgacgcgcaaggccactcaaaacgtactgcacccatgtctggagcacgttgcacgtaacggaaacgggcagattatcgttgccggaaatgacctgatgggtcgtcgatggggctccagtttctacggctgggagagcgccgaagaggtgctggatgattccaaagtcagcttcaagcgacagtgtcgatactgcattacggcgctgcagttcaccaaggatccaaatctgtttataattggaaccgataaaggctccgtggaattatggtccacaaggaacgaagctcgcggcgaagggtattccctgtacctagtcgatggtcaatcagagcacatcgaaggagtgtcggcaatggatcttatcgaaggcgaggaaaataaactgatcacaggctcgcatgatgggtgtctcaaagtgtggaactacgcggccgatctccattccaccacgacgatggcgatggctcatactgatgccataacaggtctttcaaccaatcgagaggataacatgatgtttgcctcgtcgtcgttggatcactctgctttgctgtgggatctacgcaagccacggccagcatcggccctattcgatggtcataacttcggtttcacaacggtgtactggactacacggaaggaagccaactgtatagttgctctcggagatgaagccggcaacgttcacttcatcgacatccgacaaccggatgttccgacacattccgtgaaagtgttcaacaaaaagatccacaagatctcattcaatggcactcaatttgttgttctggggaacaccaatcaggcacgattttacgacgagaatcttgccttactacacgagtgtacaccggcgccgaactatcttcgggatgtggtttgggagaacagcgacagcaaggagaaatccagctgctggttggttggatgggatacgtttttccagaaagtggaatactgaatgttcgacagacatcatcactaagatcgatttccctaccctggatgtttggaagaaactctgcaattttttttatatacctacaccctcatacctcaaaaatacgacaaatagagaaaaataatgtatactaaactgaaa

SEQ ID NO: 917 - DNA, 4359 bp, Aedes aegypti
ataaataatcatctaacgaggaaggcaccaccggcctactccgacggcgtttacgtcctagccgggtcaagccgaccttcgcctcggaagctgagtaggctgttcatgcggggcaaagatgggctgccctccatgcacaatcgcactgccatcctggccttcttcggtcaggtcgttaccaacgagattgttatggcctccgagtcaggctgccccattgaaatgcatcgaatcgaaattgagaagtgtgacgaaatgtacgaccgcgagtgccgtggcgatcgatacattccgtttcaccgggcggcctacgatagaaacaccggccagagtcctaatgcacccagggaacaaatcaatcagatgacagcgtggatcgacggtagcttcatctacagtacgtccgaagcgtggttgaatgctatgcgagcgtttcaggacggtttgctgctgaccgataaagacggcacgatgccggtgaaaaacacgatgcgagtgccgctgttcaacaacccggtgccgcatgtgatgcgaatgctgagcccagagagattgtatcttctgggcgatccacgaacgaatcaaaatcccgccttactcacgtttgccattctgcttttgcgttggcataatgtggtcgccaagagggtccgaaagcagcatcgcgattggactgatgaggaaattttccagcgagcccggagagttgtagtagctagtttacagaatgtgataacctacgaatatctgccagcatttttagatgccgaactgccaccttatacgggttacaaggccgatactcacccaggcgtgagtcacatgttccaagctgccgcgtttcgtttcggacattcgttgattccgcccggtttgttccgaaggaatggaaggtgtgacttccgcaaaacgaacatggactatccggcactgagattgtgttccacgtggtggaattcgaatgacgtactggacgacacccccatcgaggagttcctgatgggcatggcgtcacagatcgccgagcgcgaagatccactgctgtgctcagacgtgcgggataaactgttcggtcccatggagttctcccggcgggatctgggagcgctcaacatcatgcgcggcagagacaacggactgcccgattacaatacagctagagttgcatacaaactaccaaagaagaaaacgtggcgcgatatcaatccagaggtgttcgaacgacagccagaactgttgaatttgctaattgaaacatacgaaaaccgattggacaacgtagatgtatacgttggaggaatgttggagtctgatggaaagccaggagaactgttcactgccgtgatcattgatcaattcacacgggtccgagatgccgatcggttttggttcgagaatgaggataacggaattttcactaaagaagaaattgctgaattgcgcaaaatcacaatgtgggacataatcgtcaacagtacggatattgatccggatgagatccagaaggatgtcttccactggagtgaaggtgatccttgtccacaaccagagcagctgaatgctactttgctcgagccatgtaactatctggaggggtacgattacttctccggatcggaactggcgtacatttattcgtgtgtattcctcggatttgtgcccatcctatgtgctggtgctggatactgtgtcatcaagttacagaacagtcgccgtcgcaagttgaagattaagcaagaagcgttgaagaatgctggaaacagcaagcaatctgttgagaagatggtagcccgggaatggctgcacgcgaatcacaaacgcttggtaacggtgaaatttggacccgaagcagcgatctacacggttgatcgcaaaggggagaaactacgaacattcagtttaaaaaatgtggatgtcgttaccgtggagcaatcacaagaaaactacaagaaaaagaaaccatacattttgctcagggtaccaagcgatcatgatcttgtcttggagttggaatcaaattccgctcgtcgaaagtttgtgaagaagttggaagatttcttgcttctgcataagaaggacatgacatttgtggaggtaccgagagacattatgttggcgaaggccgaaacacgtgagcgtcgtcagaagcggctggagcatttcttccgcgaggcatacgcgttgacgttcggattgcggccgggtgaacgtcgtcgaaggtcggacgcatcagtggacggagaagtgatgaccgtcatgagaaccagcctgtcgaagtctgaatttgccgctgctctgggaatgaagcccgatgatatgttcgtcaggaagatgtttaacattgtcgacaaggatcaggatggaagaatttctttccaggaattcttggaaacggtggtgctattttcacgaggtaaaacggatgataagctgagaatcatttttgacatgtgcgacaatgaccgcaacggagtgattgataagggagagctgagtgaaatgatgcgttcgctggtggagattgcacgaacgacgagcgtgacggacactcaagtaaaggagttgattgatggaatgttccaggatgttggattagagcacaagaatcatctcacgtatcaggatttcaagctgatgatgaaagagtacaagggtgactttgttgccatcggtttggactgtaagggagcgaagcagaatttcttggacacttcaacgaatgtggcgcgtatgacttcgttccatattgagccaccttctgatgcccgccgaaattggatgcaggaaaagtgggatagctatacaacgtttctggaggagaaccggcaaaatatcttctatttgtttttgttctacgtgattactattgtgctgtttgtcgagaggttcattcattattctttcatggctgaacacacagatcttagacacatcatgggggttggaatagctatcacccgaggttcagccgcttcattatccttctgttactcattgttattactcacgatgtcaagaaatctcatcaccaagttgaaggaattccccatccaacagtacatcccgctggattcgcatatccagttccacaagattgccgcttgcacggcactgttcttctcgttgttgcacaccgttggtcatatcgttaacttctaccatgtatctacgcagtccatcgagaatctcaaatgtctcaccaaggaagtgcatttcacttccgattaccggccggacattacctactggttgttccaaacagttacaggtgtcactggagtcatgttgtttgttataatgtgtattatattcgcgtttgcgcactccacaatccgaaagaaggcctacaagttcttctggaacgcccattcattgtacatagtattgtacgcgctttgccttattcatggcttggcgcgtctcacaggagcacctcggttctggctgttctttattggacccggcattgtttacactctggataagatcgtttccctacgaacaaagtatatggcgctggacgtcattgaaacggatttgctaccctcggatgtaatcaagataaagttctaccgacctccaaatctaaaatatctttccggccagtgggtccgattgtcctgtacagaaatcaagcccgaggaaatgcacagtttcacgttaacttctgcaccgcacgagaacttcctcagctgtcacattaaagcgcaaggaccatggacgtggaagctgcgaaactatttcgacccgtgcaattacaaccccgatgatcaaccgaagattcggatcgaagggccattcggcggtggtaaccaggattggtacaagtttgaggtggccgtgatggtgggcggtggtattggagttaccccttatgcttcgatcttgaatgatttggtatttggaacgagtaccaataggtactcgggagtggcctgtaagaaggtgtacttcctgtggatttgtccctcacacaaacattttgagtggttcatagacgtcctgcgggacgtggagaagaaggacgttaccaatgtgctggaaattcacatcttcatcacacaattcttccataagttcgatctgcgaacgacaatgctgtatatttgcgaaaaccacttccagcgtctatcgaaaacgtccatgttcacaggtctgaaggccgtgaaccatttcgggcgtcctgatatgtctagtttccttaaattcgtacagaagaagcactcctatgtatctaaaataggtgtgttctcgtgtgggcctcggcccctcaccaagagcgtcatgtcggcgtgtgacgaagtcaacaagggtagaaagttgccatatttcatccaccacttcgaaaactttggctaa

SEQ ID NO: 918 - DNA, 2179 bp, Aedes aegypti
caaaaacttcaagttccaacgctcttcaaaagttaataatttttgtgattattcagtgatttccgcctgaaaacctcgttcaaaatggctctctgggttgaccgttaccgcccgcgtgaactctcgaaactagactaccacaaaacgcaagccacgcacctcacgaacctttgcgcccagggagactttccgcatttgatgttctacggcccgtctggcgcaggaaagaagacccggatcatgtgcctcctgcgggaactgtacggctcgggagtggagcgtctccggaacgaagtgatgaactttaccaccccctcgaatcgcaaggtggaaatcatgaccgtcagcagcaactatcacatcgaagtgaatccatcggatgccggaatctatgatcgggttgtcatcaccgatatgatcaagcagattgcccaaacgcaacagatcgatcccagtgggcagcgcgagttcaaaacgatcgtgctctcggaagtggacgagctgaccaaagacgctcagcacgccctaagaagaaccatggagaaatacgtggccacctgccggttggtgctttgcgtcaattccacttcgcgagtcattccggcggtgaagagtcgttgcttggggattcgagtgtcggctccgaccaacgaggagatcgtcagtattctgaacaacatctgcaaaaaggaaggtcttcacatcccctcggagctggccacaagaatcaccgagaaatcggaacgtaatcttcgtcgggcgattcttatgctggaagcctgcaaggtccaacaatatccgtttacggtcaaccaagaagtgccggaaatcgattggcaggtgttcctccgggaaaccgccaaccagatcgtccaggagcaatcaccccaaaagttggaagccgtccgggagcgtctatatgagcttctttcgcagggcgtcccatccgatatcatcttccgagggttggtggagaatctagtcaaaaattgcgacatgagcctgaagacgcaaacgcttaactttgccggaacttacgaacatcggatgcagcagggaagcaagcacatcttccacctggaagcattcgtggcgcaattcatggcactgtataaaaagttcttgaatcaggcctccgcgatggacatggatgacttctaggctgcccggaaatctcgaaattgcttttctttctttaataaaaactaacttccgtcacttacacaataatgtttattaaactttcaatagttctgataatgtttcacccggaagagcgaaaccacaccctcccggctaccgatggccaagaaaccaccccctggggagaacgctacacgtgttacgcttcccagccccgctttaatcatggggaaattccggaacaccgttccactcttcatgtgtaccaactttaccgcatccggcacttccgctgaagcaatggccaacagctcagaagttacgttgaatgccatcgatcccaccgaagtggtcaaattggacacggttttctccgggctaggatatttctccttgaggaccttttccagcaaatagatgttgacgattccctggcgatttccggtagctaggtaacggttatttgggcaaacggttataaatgatccgtttacacagccctcgtctacgaagacattgacgaaacgacgtttctccaagtggtatatcgaaacttcgttatccgtgctgtgagcaataaggtacttcgaatccggagtaaaacataaagacggacaagcgtttttctgttggatggtggttagaagctccttgctcctagcgtccagcaaatgaatctccccgaaacccccagtgacggccaaatacttgccacagttcgacagctcgaagttcttcatggtccaagcgccatctcctctcaactgcaacgtgtcgctctggccagatatcaaattatacacatgatagaacttccggaaactcccaaacaacacctcgtttccatccggggtcatccgacagcaagcgatcttaaacctcttcagcccaatcgtgtgcagcttttcgttcttcgtgccatccaccgccacaatcgaggctaatccatttaacccagccatgaccgcaaccatcgaagtgggatggaagttaatcgccgtaatttgtccttcgtttttggtttctcgattcagat

SEQ ID NO: 919 - DNA, 929 bp, Aedes aegypti
gtttgttgatccggggtttgtcagtagaattcgatcgttttggggtgatttttggtcggatttgtggatcaactgaatgaagtgaacctcgtataaaacagcatgccatggagaatgcctgccggcatactgttgctacagttgctaatgtccctttcgggcatttcttatggacgcgcactgaactacctaaacaataggcagccgaaggaatgtgtacagttgccggcgccagtactgtccaatatcctagggccggcgtacaattcgcgctacatgagcatcgacaagccccccgttatggacgaagtgccggcccacggcgaaatggacggaaagcgacgtgccggaattgggctgtttcccactttctacgttgaagacgacttttcggaggaactcggaaatagtccggcctgggccgtagaccacgtccaagatacggccaatcaggttctcaaagcgcccttcaacaagcgggaagccttcgactcaattctccacgaaatggacacaaaaacccgttccgctcggaatgctcgccgtggacagaacggtgacggaacttctcgtccgtgggaatgcgacgccaagatacgctggattgacctgggagatgagtactaccctcgcttcctgcgcaccgtggaatgtgccaagactcgctgctggtatggccattaccagtgtacaccgagatccttcacggtcaaaatgctgcgcaaacgtaccggacagtgcgttccggctgaccaattgcacaaggttggcgtcgatggactccccggagagctgagcgaactttgggtctgggaggaacgggccgtcaacttttgctgcgactgctcgccccggttctgatccccccgctaattttaactcgtgaacattgatgacgaaatattttaataaaccatttagaacatgtc

SEQ ID NO: 920 - DNA, 405 bp, Aedes aegypti
atggaaatctttcacgtcggccctatgcaccagaatgggtgcccgggacccataagccaatgtgcctcacaaaactcgaacgttgcgaagcaaattgatgactatcggaagcagtgcgtggagctgagtgatgtcagtgtagattcggccatcaaagtgcactctggacaagtgattgagaatcccgattggtctactaagcgatatgtgcagtgtttcttccagaagatgcaatttatggacgagaatggtgtaatgttgaaagatgctgttgtggagttcttcagtcgaattcaggacgagagccgagccaaagccatggttgaaaattgtgacatccagaaggaaaatccattggacacagcctatgcagtgctggtgtgctatcaagggaataaaaattga

SEQ ID NO: 921 - DNA, 1490 bp, Aedes aegypti
tcttgctgaatagctgcgcgtttaccgctacggctatctgggccccggacttccagactataaatattatttccaaatgtctacttacatccaaaatgtacgcatcacagctccgctcatgcgagcacgccttgtacccgcgtgggtagatccatcccatgacacgactctcatccacagaactccggtccacttcgcgaatcttcgccgggtacatcatccaaaattggttcaccgctccatgctgcaaaatctccataatcctggtgttgaagatcatgaacagcaacgtcccgaacagtttcgattcccgcaggacttgcaccagccggacttgactcttcttcaagatgacctccaacatctgtgtggaatgggcgatattaggcgcagatggggacgcgacaagtaaggcgctattatagtggcactgaggaacccggttgcacccattatccagtagtacttatggcggccgaacatgtgactgtaatggatttaaattcaactgaaacattctaccaaactattgagtattcaactcactagaagcaacagtgcatgctgagtcccatcaccgcaatcagatacgtcttgaaggatatctcactgtagctgagggtgtgatcccaccagtactgacgcgtgtagccaccgcccttcactagcggaggaatctagagaaatcaacgggagtaatccgaatcaatcacaacattttggtcacaaactccaaaggtacgataatcaccgccaacagtgggaagaacagcttgtagctgccgggtagcaaactgcacacattcaccgccagtgccctccaacaggatgcgtactgcgggtggcaaaggtcacggcaggttttgcctgccgtcgcttcgtagaagtacttgctgaggtgagccatgtggtgttaatcgtcgcgcgaatccgatggaactgaacaaacgaattcgcttcttttttgggggtttcgcgtgacgacgttgaattgctgatttgcattcgtttggacgatagaaatttcggatatgatgaaggagtttagaacaagcattaactgaagcgggctttacgccgtcattcccgcttataaactatcacaaccacaaatagttaacaattttgcaacaatcttgaaatgagactctcacctgctcagctgaatcccatggcgacctttcccaggcattcggcagctatttgtgctctgcaatggaagttgacgatgagaaaggatcttactccaaagtttgagcgcagtttctgaaatactcactgtgcaccggaacagatatcggtgaatttcatcgcaaacttcgacatggcgtagggatagtaggcccgagcgtacatattgtagttcatcaggaacacccacacgaccgaactgaacgagattctgttgaactgctggagccactccaccttggagtacttctcaacgataaagttccaagcgttctgaaaatatttcatagaaaaacctt

SEQ ID NO: 922 - DNA, 1103 bp, Aedes aegypti
aatttgcgatttagacaacgcgcgtatctcccaatcagcgtgtaatctctgcaaacgctgtcctgtcagaacctgacgctacaaagcgagctgtctcggcacgataacggtttagatataaaactgcccccagccatctaggaagatatcattcctgaacataccttcattggacacacggaccttgccttctccgctcacacaaaatgaaaaccatcttcttcttcttcgccctcctggcactagccatgggacagtgcgttcgcgacgactccaacggacagccggcctgtaatgccgccgaggtggcccaacgcttctggcgcaacaactgggaccccaccgcctactgggagtgcgttacggccggaactgctgccacggcccgccgctgccccactgagggtatgttcgactcggccacgctgacctgcatccgctgggatcagtggcaaagcccctgtcacctgatactgaagcaagtgtcccctcaggtttgccctctggtaggcgcttctggcagcgaagatcgcccagcggatacaactacgacgattaagccgccgggacccacgaacatcgtaacgccaacaaagagccccattacgtcaactgccattccgacagcggcaactagcagcagtacgtcggcttcggagaagtctgatggggattccatagctcctagcgatggcggcactgattccggcggtggttctgtgggtatcatcttggccgttttgacactgatttcgctggccggcgccggtgggttcatgctgttacgaaaccccgaaaggcgcgaccagctgcggtcactgttccgccgacggaacgtactggtgcagtattcgagggacaatttggcagatgatttttagtttgcttgcgctccatcctgctgctgtttgcacccgtttgttgtatgctggcgtattgcgtgcttcactgtagtccacgtctcaccgccccaatgaacacctgcgtcaaaggtcatatatgatttcttagtataccactcagaactaatcccaacgctaatcgtagatgtaagctgtgcatgttagcggatgggaagcggaccatcagctatgcgaacataa

SEQ ID NO: 923 - DNA, 3663 bp, Aedes aegypti
gaattccttcacacgataaagcacatcgatatgtcacgcacattcatccacaacgtggatgacgagacgttccaggggctgcggctcgaatcgctcaagctagtcgacaacaagatccaggacatttccgagaagagtttcaacttcatgcaacactcgctcgtctcgctggacatctccgacaatcagctgcaaggactgccgttggattcgctgaaaaacgttcatacgctaagccgattagtggcacaaagaaacaacatccaccacctggacggcaactggggcagcctggcggactcgctgcggagtttgcacatctccggtaattcgatttcggagctgtcgctgtttttgcacgaggacaagcgttccaatcacacggtgcccacgttccaggcttcgtcctcgataatcaccgcaaaacactcaccgttggccccgccccttccggcatctcccacgcaacaacagcagaaaccatttgccaagctgaaaaaactcgtctggttggacatcagctccaatcggatagcccacataggtccaaatatttttccgaaatcgctggtgacgattgatttgtcaaaaaacatcctgactgcgtttcctgccgcggtgttggagcatttgcacgatttgcggatcctatcgctgaaggacaatttgatagcgaaactagtcggcgtggacatggcagggtctcgaatcaaattcgaaaagctggacctcagcataaatctgatagaagagctgccctcagggctgttcaatgggacggtacgggtgaaggctatcaatttcgataagaacttcatacgcagcattccgggggacgctttccgagacctgggggtagtgcacatggtgctggcattcaattttattgaatcggtggatgatgaagcttttgccacattggagcaatcgctggagtatttagacttggagcgcaaccggctgttagcttccccgagggccattggcagtttgaacaaattgcggtatctgtacttgacatcgaatgaactgacggggatcgatcagctgccagcgacgctgaaggtactgtcactcagtggcaataattttacctccatccctgtggaagggctggctaattgtactgagctgtcctatttgaacatgggctacaataaaatagcggaaattgcggagaacgattttgtcggatggggtgccaatttgcagacactgctacttaggaacaataaaataactagtctgaattacggcattttcaatggactggacacgataaaggagattagtctgagcttcaacgatattcattacgtacatcctaatgtgtttgataatgtgtccagcacgttgaaaatcctggagctatcgttcggaatctaccgggaggaatatccaatggatgcgcttagtgtgctaaccgagttaatgtggctggggcttgacaataacaacctgaaggtgattcctgacgatgccctttccactctgagccaattgacatacgtgaatttcgcattcaaccgaattacggtgctgccacgtacggtgttccggtcggacattcacaaaaatctcgtcgaaattgatttgtcattcaatcagattgaaactcttcactccggcacgttcgacaatctcgaactgattcaaatcataaatttgtcctcgaacaaaataaaaagcatcgagaaaagctgttttttcgacttgccctacctgacgtacgtagacctgtcattcaatgggatgcaaaacgtgagcgaaactgcgtttagttttctaccggcgttgctcagtgtggacctgatgtacaacgagatgagtacgttctcgctgaaaatgttcaagcacgtttcaaatgccaccacccccatgaggctgaatattagcaacaatgcgatcgataatttcgatggcgacgtgaattcactgctctacgtttattcgctggacgccagccacaatttgctccaggaacccctcgtcttccgtgctctggcctattcccttcggatactgtacctcaattggaacaatttcaccacgcttcaaaatcatgccttcggcgatttacaaatactggaagttctcaatctagcgcacaacaatatatcatcattaagaaggcgcagttttgctggtttggttaacctgcaggaattcgatttgagccataacaagattgaagtgctccaaattgagcaattttctccgctcaaaaaactccgtctgctgaaactgaataacaatcggcttcgggcagttcctcgcgatgcctttctcaacacacgaatcgaatttttggatctatctaacaacctgttcgctgcctggcaggcaaccgctttcgccgatattggatttacacttcgctctatccagtttagcaacaatttactagagtttctcgacgagtacatgtttaccagcacacaatacttgcttgagctcaacctctcctacaatcaaatcaaactcattccagataactcttttgctaatctcaacaacctcaccatactggacctcagttggaacccattcattaccatcaatttcaaagaaattttcctcaatgtgccacgactccacgaactacacctccaacacactggtctctatcgcctgccttctctcatactaccccaactagtaacgatcgacatcagccacaatcacgtccaagaaatcgaatccctagaggagctctactacctccgagaattctacgccaaagacaataaaatcaacaacatcaccaacttacttcgaaaccttccgtcctccattcgagtgctggagatttcgcgaaatccgatccgaaaaatatcgttccatgatttcacccaaaatcgacgattagaagagctctacattgaagacatcaaaatcaccaacccagacatcttcatcaagctgcacaacctgaaaaaacttcgcatcaactcccagcacaacttctccgagctcatctcaaaactccgtggtctccaggaactctacgttacagtctacgaagaccacatcgacgaaaatctcttcacggccaaaatgcacacaatcaccaagctgaacctactggagatcaccggacgccgtctggtgcagatccaccacaaagccttcgtcggcctggcgcgcaaccacgacctcaagctgcggatacgaaacaccctggtgaacgaccttccgccggggatattctacgcgctcaagtacatcccccggttgagcatcgatctgtcggataacatgctggcggcgctggcgcccgatagtttctatccgaacgcgagctcgtgggacgccgtggggacccggagtgtcatcgggggactggacatcagcaacaacccgatgcagtgcgattgcgggctggtgtggctggggcactggctgaggcgatggcttcgggagactacgcaggtcaacccgatccagaaggacgagatgcggaagatgatccggagggcgaagcgaagtacctgcacggatccgctgaccggtcggcgattacccttcctggagatgttcccggaggatttgctgtgccacgcgagtgccctcagcagtttggcgctcaagttgcgcatccggtttatggtcatctgtctgaacgtgctgctaatactcgtacataaatctaggattctgata

SEQ ID NO: 924 - DNA, 5453 bp, Aedes aegypti
tatttcaatttgccgatgatttcactgttataatagctgataacctgcaactagccacagaaaagatgaacctttttttgtctaaaattgctgagaaacttaacaacctaggtatgataatcaattcagataaatgtgcaactataatttttactaataagttccatcctaacacaaatatctcaattaacaataatcctatcgaagtaaaggctttccataaatttttaggtatccagattgatcataaactaaactataaaacacacattgacgccactgtagttaaagctaaaaagaagataaacattttgaaaatggtaggaaaaagaaaaaatggagcacatccagaaacaatgttaaaagtagctaaagctatagtacaaccacatttggattacggactatcgataattgctaaagcatcaaaaacagtttttgctaaactagaaacagtacaacacttatacataagaacctgtatgagatttctgaaatcgactcccaaccatgtgatactagcagaaagtggcatattacccttgaaggagagggcagaatacttaacgttaaaagaaataattaaaacattatactatcaaaactctccattgactaaattcataaaatctttcattacatcagaagatttaccaactcaatgttcttatttagaaaggatagcatcaatcaacaactaccatttaattcaactaggacctaaattaccatttgaaaaaacaacaaaattaaaggtttttacagagatcgataatttgaagaagaaagaaacaacaatagctgttcaaagacagatgacaatagaactaatatcacataaatacaaaaacgattacaaaatatttacagatggttccaaaatagatggaaaagcaggatacggcatttatgatagtagagagaaaatatcatatagtggaagattaaaaacacaatttacaataatgagtgcagaaatatttgctattttgaaagcagtagaatacttaataacaaaaaatgtaaaaaaatcggttattttaacagattccaaaagtgctgccattcttattaaaaataacacaacaaacgacaactttctagttggaaaactgattagagaaataaacaaatctcagatagagaagttaacaatacaatggataccgggacactcagggttaataggcaatgaaagagcagatttagcagcaaaattagggacaaataaacagcagattgaaaattatccgttaactaaagatgatttaattttgaatttaaaaatagaaacaaaatgttattggaaccaacgatataaaataatttcagaggaaaaaggtatttatcactacatgattgatcaaaatgttcgaaataagccatggttttcagatttcaaactttcaacacaacacacaataactataaatcgactaagaactggacatttggccactaaagacagactaaatgcatggggactcgttccgaacgacaaatgtgaacactgtaatgttaaagaagatatcatccacattttacactactgctccaagtttgaccatattcgtcgtgaatatccattactgcaaaataaggaagacttaataaccattctagctggcacaaactttaaaaaaatcaaggaaatagctaaatttattggagaaactggaactaatgtttgagttggggaactgcgttatggtaatttttactatgatgtgacgtttacatagtgcacccggcactgaaattgaagaaaaattagtttgaaacggtcgtttagttaagacagtgacgagttgtagtcacacatacaagacttggttgttatggaccagcaggtctgcaccaaaaagcgagaaagaaaaaaaaatctttacgcgatttcgtgaaatcgcaaatgaaatttattattttcgccgcaaaaagtcgtatcctgatcgggcagcatgacgaaaaccagattcaacacctacgatgtggtttgctcggtgacggagcttcaaaagctcatcggaatgcgagtgaaccaaatctacgacatcgacaacaaaacgtatttgattcggctggttcggaatgaagagaaagtggtcctgctcttggagtcaggaaatcgcttccacacgaccgccttcgaatggcctaaaaatgttgctccgtccggttttaccatgaaactgagaaagcatttgaagaacaaaagactggaaagcatgaagcaactgggggtggaccgtatcgtggatttccaattcggaacgggcgaagctgcttatcacgtcattcttgagctttacgacagaggaaacattttgctcacggattgcgatttaaagattttgaacattttgcgtccgcatgtggaaggagaggaagtaaggttcgctgtgcgggaaaaatatccaacagatcgagccaaagaggacaaaggtcctccggcaatggaaaaggtcaaggagacaattgcgaaagcccatcccggagatactttgagaacagcactgaatcccatattggaatacggtgcatcggtgatcgaccatgtgctgcataaatatggcctttacggatgtcgtattggtggggaactgccggccgaagcgatggcggaagtgccgaaaaaagccaagaaaaaacaaaaggcaatcgcaaaagaattttcaaaagtcttcaacatcgaagaggacatgaccgcattgatgtgtgcgataaacgatgccgaaacaatgctgcggaaagcaatgaaggaaccatccaggggattcatcatacaaaagaaagagttgaagcccgcgaaggacaaagagcaagaagagttttatttcaccaacttggagtatcaccctttcctgtataatcaatataaggaagatcctgtcaaggagtttgatagcttcacggctgctgtggatgagttttattccactttggagggacaaaaaattgatttgaaggctttcgctcaagagcgggaagctcttaagaagttatccaacgtccgcacggatcatgccaaaagattagaggacctaacaaaagcacaattagaggatcgtaaaaaggcggaactaatcactagaaatcaaaatctggtggacagcgccattttggcggttcaaagcgctttggcttcccaaatgtcatggtcggacatccaggacctggtcaaagctgctcaagcaaacaacgatcccgtagcatcgtgcatcaaacagctcaaattggagataaaccacatttctttgatgctgaaagacccgtacggagcactggacgaagattttgaagacgacgatgatgaagaggaacgtgaggatggagagggaaagctggaaccgatggtagttgatgttgatctggccatgacggcttttgccaatgcccgtcgttactatgaccaacgtcgctttgccgctcgcaaagagcagaaaacaatcgaatcctcttcaaaagccttaaaaaacgccgaaaagaaaacaatgcaaactttgaaggacgtccggacacagacaaccatctcgaaggctcgtaaagtctactggttcgaaaaattctactggtttatcagctcggaaaattacttagtaattggtggccgagaccagcagcagaatgagttgattgtaaaacgttatatgcgtccatctgacatctacgtgcatgctgaaatccaaggcgcttcaagtgttataatcaaaaatccttccggagaagatattccgccaaagacgttgctcgaggcaggaacaatggctatctcgtacagtgttgcttgggatgccaaggtcgtaaccagcgcatattgggtcaagagtgagcaagttagtaaaaccgcaccaactggagagtatttgactacaggaagcttcatgatacgaggaaagaagaactttttacctccttgccatttagtactgggcttgagcttcatgttcaaactggaggagagctccattgaacggcataagggcgaaagaaaagttcgtactttcgacgaagaatcgataatgagcaaggaggaccgttctgaagtatctgaagctcccgaccaggaaatacttctagaagagggagaatcagatcacgatgagaaagatgctcccgaaaatccagaaacccgggaagatgttgaggagcaagtgaaactactttcgttgaacaaagaagaagatgaaatcgaaaagcaaggagttgtgtcagattcggatacagatgatagcgaaggtccaaagtttccggatacgcatgtcaaagtcgagcacgacactggaaaggtatcagttcagtcagatccggttctgaaacgattgacctctgaaccagattcggaaaatgttattttcctgggtgataacaagcctttcatcataactccagctccaccgcgtaagaaacaaatccaaaagagtaagcaaaaagccaaggataaggaaagggctttagaggaagcggcagctagaaacaaaaaagaagaaccgcagaaacaaggtcaactaaagcgtggtcaaaaggccaagatgagaaaaatcaaggaaaaatacaaggatcaagacgaagaagagcgtaagttgatgatggaaattcttaaatcggcgggcaatcgaaacactcaaaatcaaaaggaagaagaggcaggcggtagtgatcagaaaaaataccccggaaagaagccccagccgcgtcttaaacctggagagtttgaagaattcggtgatgatactccagctgcggctgatgtggatatgttggattcgttaaccggacaaccgatggaggaggacgagctgttgtttgcaattcctgttgttgcgccttatcaatcgttgcataactacaagttcaaagttaagttgaccccaggaaccggtaagagaggcaaagctagcaaaatggctctgcaaattttcctcaaagacaaacagtgtacaaatcgtgaaaaggatttgctgaaggctgttaaggatgagactctggctcgtaatattccaggcaaggttaaactttcggctccacaaatgcaaaaagttagaaagtaatcggtaatcgttaatatatttttacctttgatgtttccatcgttttattgtagattatagataaaaatcatttattattcacttattctgcttaagtatatatgtgttcttaatacttacaagcttcgaaatccaaattattgactatgtttctgccgttaagaatcaattcatcaatttagagaaacagttttattgttattattacgccgctaatagataaaaaaataaaaaaaaaactacttcagcgaatatggaacagtttggccaatacagttaaaccttctatagcgatttttgtaaaacaggttgtacgtgtgctaaaaatgcggagcgactcagtagtgtgtggtcttttaattctgttgcatgcccatttcgggctggcgacggaatcaagatcaa

SEQ ID NO: 925 - DNA, 5700 bp, Aedes aegypti
atgggcgcgatcatgctacgatcgagtgcgatcgtattgctgctgatcgcatttggcgtcattatcaacatcttcggaagcgtggatgccgctcgcaagtcatccagcagtcgaattgcgaaggcgccggcctgtgccgagaatgagtatcgctgcgataacggggcttgcatcccggacgtgaaccactgcaacggcgtcaaggattgtaccgacggaagcgacgaggttgggtgtgattacttcctttgcaagaagccgatgtggtaccgctgcaagcacgacaaaagctgcatcagtgcgaccttcctgtgcgacaagcacgacgactgtccactgggcgacgacgaggaaaactgcgaaaacttcgaagtgccgcacgtcccggtcccgtgcagcaagttcgagttcacctgcacggacaagatgtgcatcccgctggatttggtgtgcgatggggtgtcccattgcctggacggatcggacgaaaccatcggctgcaaggacatcgaaaacaagtgcaaggggttcgtgtgcaagaacaaacgctgcatcaacagccacgactgggtgtgcgacgggatcgacgactgcggagatgggtcggatgaggagaactgcttcattggatgcgacctggagcatgggaagttcgagtgtgcggacaatagcacgtgcgtcgatctgaagctggtttgcgacgggaaggacgattgcggagatcacagcgatgagggaggatcgtgcaactcgaaggagtgcgattcgatgaggtgtccagagggttgtaaggctacgccgcacggagcggtatgtctgtgtaagccgggttttaggttcaacaagaagagcaaggtttgcgaggacatcaacgagtgcgaacggtacgggttgtgctcgcagggctgcgagaatactccgggatcgttcaagtgcacgtgcgtcaacaaatttaagctgaaggatgattcgaggacatgcgagctggacgattcaactgaaccgcttctgctgtacacaactcagaagtccatcggtggccttcatctgaacaccaagcatcagtactacgtagcgaaggatctatcgcaggtcatcggtgtaagctacgacggtaggcatgtctactggacggacatttcgttcaaaaccgaatccatcgaacgatcactggaggatggcaccaagcgggaactgttgctgacttccggtttggcctcgcctgaagatctcgaaatagattggctcacgggaaacatctacttcagtgatagcggccatatgatgattgccgtctgctccaacaacggagttcactgtaccattctgattcaggacacgctgcataaacctaggggtattgcgctgatgcctcagaacggaaccttgttctattcggattggggagataacgccatgatcggagccgccggaatggacggcaaaaacaagagaatcctgatcgagcaagacattcattggccgaacgggctctgtctggattggcccaacgggcgcctgtactgggttgacgccaagctgaagaagatcgaaagcatccgggtggacggaaccaaccgggtgacggtgctggccgatgtcttgaaacatcctttttcgattgccgtgttcaacgatcgcctctactggtccgactgggacacgaagagcattcagtcgtgcgataagttcaacggaaaggatcgcaaaatagtggtgcatgatcgacagattttcgatgttcatatctatcactccggtctacagcctaaaggagatcacccgtgcttgggaaccttctgctcccatctctgtctcctcgcaccgaacgatagctacagctgcgcttgtccctacggaatgagcttgaaggcggacaagcattcctgccgcgaaacggtcaaacgccagtatcttctgatgggaatcgccaactacctggtcacgctggaaacgcaaaccttcggacgccatgagtcttcccaagccgacgcctaccaaatattcttccaccggatggccttcaactcgatcacaggggaaatctttgtcgccgacaatcgtcagaaggcgatcttcaccgtcgatcccaaaagcaaatcgtcccagaagctgatcaccaccggtattggcaacatctccgcgcttgctttcgacttcctcggcaacaatctgtactggacggacagcgagcgatcgacggttgaggtcttctcgctccagactcgccaccgggccatcattcagcactacctaggtcaagatattcccgtcggtctggcgatcgtgtccgagatgggcaaaatgttcatcgccctgagatcgcccctacccgtaccgcatacccacatcgatcgtttggacatgaccggccgtggccctcacctgcatgtcatcgaggaacgactcagcggcaacggatcgttcaacttcgtcatcgatcgcgatctgcgttcggtctactggaacgacatgggttcgagcaagatcgagtttaccagctacgaaggcgatacccgccacctgttccgggaattccttcggctcccggtttccatagccatcgtcggcgatagtatcttctggacttgctaccgatcgaagcgtctctattggtcggacaagcacaacctcggcgtgaccaagaagatcaccattgacaagccaccgtacggagcgttccccgacgaaattgttctgctgggcagtcaacccctgcagcgatacgatcacccctgcatgaagcaaaatggcggctgctcgcatatttgcgtccccgctggaatgtacagctctgcgtgcatctgtccgacgggaatgatcttcagctcgccgaagaacacgacctgcatcgatgcgatcgactgcgagttcaagtgtaccagcggtgagtgtttgacgatcagcaagcgatgcaacgggaacaaggactgcgctgacggatcggacgagaagggatgcgatgaggctggacagcccaagcagttgcactgccaatacgatgagttcatgtgcgcagacaagagcaagtgtatcgatcagacgcgaagatgcgatgagcacgtggattgcggcgatggttcggatgagatgaagtgcgaagggtatgatcgcggaactggatgtcatgaacatcagcatgcttgcccggacggaatgtgcatcgatgtgaatacgctgtgcgatggattcccggactgtctggatggatcggatgaggtgggatgcacggatctgaccaacgaaaagagcaatgccacaacctgcggaccgctgatgttccggtgcaatatgggccagtgcattccgaagtggtgggaatgcgacgggaatccggattgcacggacgggtcggacgagcatgacaagtgcctgacgaagaccgattgtgcggcaggtttcaccaagtgcgcactagggcactgtatcgaggatcgattgctttgcgatgggaacaacgactgcggagacaactcagatgaactgaactgtaaggtcgagctggaaccgtgcgtgggcctggaggatgataacccgaccaagtatttgtgtcctcgatcggggaagtgtttggatattgcagtgcgctgcaatgggacggctgagtgtccggatggcgaagatgaggcagggtgcagcaactgtggactgcaggaattccagtgcaagagcgggaaatgtatacggaaggagtggaggtgtgataaggaggtagattgcgatgatggaagcgatgaagtggattgcgtcaatggaacagctgccgaacatatggaagtccatgtggcctgcggagggggcacttttgaatgtaaaccgggtgtatgtatcgagatgagtcaggtttgcaacggcaagaaagactgcgatgatgggaaggatgaaggcaaagggtgcgacgacgcatgcgccaagagcccatgcgagcacaagtgcatcaaaactccaaccggggcgatctgcgagtgtcgtgaagggtttactttggccccgaacaagaaatcttgcttggacgtggacgagtgcgccgaaggaaggccttgcgctcagcagtgtaggaacacgttcggctcctatcgctgctcttgcaatccagggttcatgcttcgatcggataagatatcctgcaaggctgtcggtccaagtcgttacgttctgtatacttcgtacaaccagatacgtaagctggaagtgaatcctccatcgattcgtatactgatgcaggccaacgagtcccggatcacttcaatggacgtggacatacgcaggcagatgctctactttaccgacgagtacaatccggtgatctacgaacacgacatggaacgcaacactacccacgtgctgtacaatgttggtcacccggagcacctggccgtggattggattaccggaaacgtgtacttctacgaccgatccgaaccgtcgatcaaactatgctccgttcagcgtcaactttgctctcgaatcataacctttgcttcgcaagtcttcgtcaaagcagtcgtcgtcgatcccgtgaatcggatcttgttctactccctcatgcacttctggatctttcaagtcccgcactcgatcatctaccgggccgatatggacggccagaatcagctggtcattaccaaggatgtctcgcatgtaacttccctccaggtcgatacggagaacaagctgctctacattgccgacatcagctctcggaccatcaatgcactcgattacgaaggcaaaaaactccgtacggtcatagagaatcagaacctggccgttagcaaaccgatcggaatcatgatctatgaaaaccaagctctggtcctcaatatggcctcgtctacggtaggccagtgcaaactctacggagacttcgaatgtcgactgctggagttgaacgttcacaactcgaaccaactgctgatcgtccaggagtctcgtcaaccggaagctgaaaacgtctgcgatacgaaacaaatcaactgtagtcacgtgtgtgttcccggtgccgacggacatggagtctgcatctgccacaatggcgaacgaatccacggaacggacatctgtccgcaaacctcgaacgtgatgacacctctggtcaaaactcatcttggtgaagcggccccgaacgtgcacgattcgtccgacgaatcgtcaacaggttcaacgatcgccaacgtcttcctggtacttctgattctggcgctggtcggagtggcgggcggatatatctaccggcgtcgctaccagcacaagttcgacatcggaatgcacttccacaatcccgaactcagcacggccgatgcggccgaagtcaagatgttccagaaagtgccacggctcaatcaaactactacgcacaacgaattgacgctggagacgcctccgcacaggcctccgtgtcaaggcgatcccaactcaagcgagtcgaccggccagaacaatgtcaccagcaccgccctagagctggagaacatgtccgacgtggactcgatggaggacgcgtacgactgccgagatgatcccttgcagcggttgatcctctgaattcgggcgcgcgcgctggtttggttacttggtaataagtaacttcaaaacctccattcttttgtagttgttaaatgttagtgtaatattagtaatttgtaacaaatttagttgtccatttgttaaagaataaaccacggctttgcgttgtaatta

SEQ ID NO: 926 - DNA, 1606 bp, Aedes aegypti
aaacgtcacaacaaaaaacaacgtgtgtgcgatttcggtcagggagctactacatgcgcgtgcggtgcgaaaaaaaaaattcgtaagaaattgaaattctgagtgcggtttttggattccgtgcccgtacagaagcggacaaacgatggccggactggaactgattgtcggcacttacgaggagtacaccttgggcctcaaagtggaacctctgaaaacggaccccaaacgtctctatctgaaggaaatcttctctacccacaatcacacggcctcggtgcgggtactggccacccacggccgatttctggcatccggcggatcggacgatcgcatctgcatcttcgatctggaaacgggactgctcaaggatgaaatgctgcaccacaacggaaccgtcaactgcttggctttctccccgaagggagattatctgttcagcggaagctttgacgggaaactgtcggccatcaatactaagaagttggctattgacaagaattggttgaacgctcacaagggatcggtgctcagtgtcgacatccatcccaagggcaaactggccattactctcggttcggacaaggtcgtcaagacgtgggatctggtaacgggaaggaccatcagcgcacgaggtcttggtaacactccaaagtaccatatgctgtcgctcgtcaagtggagcccggatggaaacagtttcgtcctgatggacgatcgaatggtcgatgtcatttccatggtggaccccaattcctcccgcacggttaaatgtcccagcaaaccgatttgcctctgctggatttccgacacggaactggctgtcggattggatgatggccatctgatgatgttcagcgtggacgacgatcacgagccggagaaaatccccatctacgagtcacgggtcaaagcaatggcatacctcggagatcatctggccacggtttccagcgcaggagacgttagtttgtggaaaattgacgacaaggatttcagggaagtgtgcacaaccaacattgggtgcagaccgacctgtatggtggttacggaggccgataagctaggactgcacaagtaccttcaacagccggaggacaacaaggacgaactacgccaaaagctgaagaagattcaaaccatcggtaaggtcacaatcgaaacggaagaccccgtcgcggaggcagcaagcgagcagcaaagttctaagaagtccaagaaaaacaagcgagcgttcacgaaagaggcggacaacagcagctcgttcctatcgaagaagcagaagaaggcccaccagagcggagatgttccacaatcgacaccgaagcaaagcaagtcgccgtttcagaagcagaagaaaaggcagccatcgaatacgagcggagtttggaccgaagaggatgtaacagtggaagacatacccaagaagaagcagaagaacaagcagggattgaatcaaaccatcagcgagggaggtcgagcgtttgggaagaaggataagaaaaaccgacgaatttcggtttagatgatttttttacagtgtacaattaccgcgtgaggaaaaaaatgttgcgtttaaaatgagtaaaatgttgacttcaaattt

SEQ ID NO: 927 - DNA, 3972 bp, Aedes aegypti
cccgattcgtgggtcgtggtgcaccacctccagtcacagtccggcatcctcgatccggacgatcacattggcgacgtagcggacgaccgggaggagatcatagccagctacgatgactgcccgggaggacccgatccgggagtgccgcaaggaggaggcgatggtgctagtgggagttccgtaggaaccggcagtcccgacatattccgctccgaaccgggcaaatacggtccggaaagttcaacgccacacatcgaggtcacctcgacggagcaacctccgatgggactgggactgcaggttcgacgaggaagcgagccatctctacaccagatcggtgtaacggaccagcgaagtccgctgtacaacgtcagtcccaatgggcaccaggacacaaaacggtggtcggcggcgccggtgtgccgaagcgacacggaaccaccggaacggctgctgtcgccctcgaacggagtgccgtatctctcacccgagtggaatgtccttccggaggaggaatctcacgacagtcttccgcagcagttctcccgatcggggcggctttcgatgcagtttctcggggccgaagccgccaacgggtaccgatggatggatgcggcggagagggtcgctacgactgcggcctacaatggaacgagtgcgaatagtagctttagctccaagtcgctgccgagggagtcgaagcggaaggaacccctcgggcaggccaatgcttccgtgtacgagtcgctgagggagaaagatggtgaaatgctcctggtggtcaacgaaaacggtggtcccctgggtctaacggcgctcccagacccggactacggaggactgctggtgcagagcgtggaaccggacagccgtgcagatcgaggtcggttgcgccggggcgatcgcattctcgaaatcaacaacatcaaactggtggggctctcggagagctccgtgcaggaacatctcaagaagagcctttcgtcgccggagttgcggttgcgggtaatccgggccggagtcggcaccaagtacaagcgagacaaccggaagccaactgcggtaggtggagccaaagtggcaacggtttcgcccacgaggaaggtaccgggagcgcctacggggatcagcctgcaggcggccaacacccggaagctgggcaagcgcatcgagatttccctcaagaagggaatgaatgggcttgggttttcggtgacgacccgggacaatcaggccggcgggcagtgtccgatctacatcaagaatattttgtccaagggggcggcagttgaggacggaagactgaaaccgggcgaccggttgctggaggtagatggggttccgatgaccggcaagtcgcagagtgaggtggtagcgattctgcgggcgacggagtacggagccaccgtacggatagtcgtctcgcggcaacaggagttggctgaggttgaagagcgggagattggttgtggtgtggagagcgaacagaagagtacgccgccgaaacctccgccgccagtactgccgaagtcatcgctcaagcagggaacccgggctcgatcagaggagatgctcgacacgcatgattcagccgtgaccaatgtacgatcgaccgtttccaagaacaccaactcttcatcattctcgtcgatgccgggcgccggaggaatacaatggaagaatcgggagattctgacgctgcacattccggttcacgacacggagaaggcgggtcttggggttagtgtgaagggtaagacgggatccgggaacagtagcgggggaagtggtggaagcggcggtaagcacgatggagacttggggatcttcgtgaagagtgtgctgcacggaggagcggccagcagggatggaaggctgaagatgaacgatcagctgttgagtgtgaatggggtttctctgcttgggcagtccaacgcagaagcgatggatacgctgaggagagccatgctgcagacaggtaggtcgaacttcgagttggacagctctccagggctagttcatgtagattttgtcaaattttcaggtggaaccaatcatccgggaaagatcatcctaactgtggcgcgtcgtattggtcgaccgatcagcacaggcgaactgttggaaacgatcgacaactccaactccagtgaacaatccggggccacggttatctatctaagtcccgacaagcagcaatctcaacagcagtcatccagcgaaaaacagcaacaacagcagcaacacaaacgctacagcaatccggtgctggacaggctgacgggtggcactggccaaaccgtcggcggaagcaacggcagcctgaatcatcatcccacgagtgccaatggaagtcccaccatcaaccaaagaccttctcctctggcgggccatggcctgcgcaacgaaagctactacatggccaccaacgacaactggagtccggcggcggtcaatctgaacggcagcaacgccgttctcatcgaggaagatccggaaccgacctcaccgagttacacaagtcatgaactgatcgcaactgatcccttccctctgaactatctaacaaatcttcttctatcttcccgcagaacattccatctgacgcggccatcggacggcggtaactcaacctccactcccaacggagacgtgacgtacgcgagtcagctatcgctggacacgaatccaccagcgtcggatgctttcagccgggacgccatcggcaggcgttcgatgtcggagaaacaccacgcggcgttggatgcccgggaaacgggcacctatcagcgcaacaagaaacttcgtgaggaacgcgaacgcgagaggcagctaacctcaggcgtggcggctggctccgtagaatccgtcacccaaatgggccggatgagcagtctgaaggctaagtccgaactgcgagcggaagcgcttgatcggctcggggaacttgggccttcgctgggaatgaaaaaatcttcaagtttggagtcgttgcaaaccatggtgcaggagattcagatggccgacgaaccgaggggaccgaatgcgctgcggacgcctcgcggccgaggacgggaggaggtgctcagggctgccgtcgaacggccaccggagacgcaagccaagaagcactggctgttggaggacgccgcaccggagggggattccggaggattcgtcccccgtgggtcacccttccagtcgtcgctcaacgatggcaagcacaagaaccggcagaagaagagcggcctcttccgaggaatcggccacatgttccgattcggcaagcaccgcaaggacggaatcgctcccatcagtgacaacagtagttccaagggttccgcaccgggtgcttcctccaccaatgggccttcttcgctgggtggcggtctgacgaatggaacttccacccatgcccgaaccaactccatcgagcgatcggccagctccggagtggtggtaagccatccgcccatgtatcaacctcctccaccgccgccgcagcagaacggatccgccatccatcacacggacgtgttcaaccaccggtattcgcactacgtcaactacgaggaactgcagcaacagatcagccgatccaagatcccccgacgtcatcatcattatcattcccaaagatcgaccaggaacactgccccggtggacatcacccttcatcagcagcatccgaaactgaagcagtcgcgtcccgtgtccagctattacgacggcggagccatgtacgaaaccatccagcacaacggcctcggaggttcccagcggaaaccgtcgtcgtccccttcgaaactgcagcagcaacaacaacaacaacatcagcaggcggccaattggaacggaaccgtgacttcctcgtccggaaccggtccggggtaccaaaatcacggttcgattcgcagccggggtcccttcgtgacccaggtccaaattcagaaccagctgtcctatcagtga

SEQ ID NO: 928 - DNA, 2511 bp, Aedes aegypti
atgaatcgaaaagtgctgcactggagttatcgcgacttcaggcagatgccggaagaactacgcgcatgctgcgatcaggtcgaagaggtgtacctgaaggaaaacttcattccatccattcctgtgtggttctgcgaggaaatgactggtttgaaatttgtttgcctggcgggtaacatgatagtgaatgtgccggagcagatatcgctgttgaagcatttggaatccctgaatttgtcgcagaatttgattgaagttctaccgaagagtattgggaagttacgtaatatgcacagcttgaagttgagtgaaaacaaactcactcgattgcctaaagagattggcgctttggaaaatttagagatcctagaattgtccaaaaacaggttcagtgagcttcctgttgagttggccaattgccgtaatctgaaagaattgatcatggatgacaactatttgctgtgtcgtattccaacaaagttattccttatgcctcagatgacatttatttctgcagagagatgtaatctagtgttactgcccttcgttgtgaacacgagtaccctggagcatgtgcgagtgttcaataactatactctcacgcattatccaatagcgcttgagaggttcatgcaaccaagctatgaatcttttactgctgttgaaccgaaaaggattccaaaaagctgctactaccaacggataagctgtgacgcgatagctcataatctaatctttcccatcgagttgacaacgattctcgatcgccgaaaatatacgcatgggccgagttctctggtcgaactatgcatgcgaaggttcaacggcactgcaattgttcgagcagcttggctggatagctggctaccagatggactgagtagaagacttcacaacggtccggtagggatttgcggaagtattccttgttccaaagaaatattcggtgaatgttttctgggattggttagaaggcgaaaacaaagtcgtttggtggtattgagtgtgctcttctgttccaaattgtgtgctgatttgtggttccaatacaattgcgatgtctatgaagaacttaactgggtgttgatttagattcgtgactacaaagaaacataaaacgttggaatttttaaacttcagctaagtaatttgaataagactcacctcaatgtggaaagccaaaactccatcctcaccatcgtgaggaacgtgaatcgatgctcgtccatcagctagaaccgtgacggatttccccgtacaggagtggcctaccttctcgccagaaatgacatcacagtaaattccagcgggaagaccagtttgtagaacttcaagcatatcctgctgctgttggttattgaaggccacaaatccgcaattaccgcgagcaaatgcaatcttatttgcgccattagaccaccagttttgcacaggagttccccaacaaacgtttctgaagttgatcatgttcgcaatttggcgccaacggtgttcacaaacccatccgtttccacaggtttgatcagcattgatcgatggagaaatgatgttaccattaccgtcctgtggcggtccttgatctctatcatcaaagtagaatgaactcatgatacgaagttgaccgaaaggatgggcagctgcaaatgcggtggccattttgtaagcctttggcaatttatgggtcaaggcatgatcacgttggttgtcatgattatccacgaacacaagtgaatctctcgatggcaaaaagccccaatcttctccaaagttttgcaaccaaacaagcatatcgccaccagtgaaagcacgtccgatatagaacgagtactggaattcggttaccgttccgagatgagtgtattcatatttcctaataggttcatgatcgcccccatcaatgacttcttgcatcaggaaagcacgtgatcctggcgcaaatccaaaattggtattcagatttttcaaacggttgaagatcacttccatatcctgtggatacatatgcttggcagcatccactcggaatccagccacacccagttcgatcaaatgatctaaaaactccacgatcttgtcgcgaacccaatctttgctctgatccaagtccggcagttccagcagttcacaatttctcacttgccaagcattaccccaatccgtaatggcacaggacgggttgaaatcaatgatggagaatggaacagctggataatcacgtgtaacggaattagcgatggaaccaccagtacccgttcctatggaaccatcgttcggatccctggacatatgattgatgatgatatcaacgtacaaacgaacgcccacagcattacaacggcgggacatatcgaggaagtcctgctcatttcccgaacgcgtgattagtttgtacgaaactggctgataccgttcccaccatggacgattgtttcctaattgaacgatgacattctcattgaccggtgataactgcaaatgttaaggttcaatacaataaaattccaaaattgt

SEQ ID NO: 929 - DNA, 801 bp, Aedes aegypti
atgatccccataaaggccgctctcattgacctgagtggaacgcttcacgtcgaagatcaacctaccgatggtgctgtagaagctcttaaacgactgcgacaactgggagtttcggtgaaattcgtaacgaacacaacgaaggaaagcgtttcatctctatacgctcgactggtcaagattggattccagctggaacaaaccgagatctacagttcgctgaccgccgcctcccgctttgtgcagagtaacaacctcaatccgtattacatcctaacagacgacgcgaggaaagatttccctgcaaacgactccgccaatgaatacgactcggttgtggtcggattggcccctgagcgattctcgtacgagtaccttaatgaggccttcaggattttgcacaacagcaaggggacagcccggttggtggccattcacgaaggaaagttttacaaaacgaaagacgggattagcctaggtcctggatgtttcgtgaagggcttggagtacagcaccgggttgaaaagtgagtgcattggaaagccgaatgcttacttctttcgttcagctatgccggacgggttggaaccagaggagtgtgtaatgatcggcgatgacccgaacgatgactgcctaggagccatggcaataggaatgagaggattcctagtggaaacggggaaatttcaacccgagttgtacgataaggatgctcttccgaaagttagtggaatcttcaaaaactttagtgccgttgtagaacatataagtaaaacgttaaatcaataaagggtcgccctaagt

SEQ ID NO: 930 - DNA, 2075 bp, Aedes aegypti
tgatgtcggagtcagatgtgttctgaattcagcaacgaatttcgtgattaattagtttaatcctaatgttaattgcataaatttaagttaaaactgtaacattcgtttatcccactgcggtcaagtggattctcgtgagaaaaataatggtttcgatcgaaagtttgcgcgaccagttcgacgagttgggagtcgatccctcgccggaggtcgtcaacaaatgcatcgaaatctgcacccggtacgacattgaagacgcggtggaattcgtggaaacatggatggcctacagcgtatcgaagttgggcggagcagaaccaacggtggacaacctgcgggacatggaatcgcacgagtttgcaaacaggggacgcaaaacggcgggacctgcaacgaaccgggttaagcagagggaagatttcggttcaccgagatcgcccccggaagacggttctgaagctggcttggtgatctacagcaacgcgaacttggactcggtggaaagcgatgtgcttgggtcgtacgggtgcgtaacacctaaggcacagaaaccggtttccaggctgcacggatcaactcccgaccggagtaaggttctgttctcccctgccagctattctccaatcacgtccaaacgatcacaggaccaggacgggccgaacaactccggaaacgtggtctataccttcggcaacggtcagctgctcaagcaagttaattggtcaacgacggatgttgaccggcgcaatccgttatctattaaatatatgttcgactccagttacgagcgaattctcatcctcggggaccggatttacgaaggtggaaagcggatttgtcgccggttggcatcccttagacaggaagagcgggcagatctgcctgagaaacttgataagactgaatgcgatgagctcacagctcataagaatgaacaagacgaaatccttgaaaaggtcggaattcgtcatgtggatcatccatgtacagaaccggtcaacataatgggcaggatcgttgtgcatccggagaagaaacaagatcgcgtggcgatcgtagacttcgacgagctgacattgcgccaaatgaagttggacttcagcaagatgaagacctggtcggtatttccgggggaaactgttgtcatggaaggggtcaatccacggggaaatgtctttgaggttcataacatttactacgagatagatctagagctccccaaagcgccgatgaagcttggaaatgaggtcaatatggtgatcgcgtccggtccttacactgacaaggatgatcttctgtatgagaagctatcggatttgctcacatactgtaagaacaattgtcccgacgtattgatccttacgggtccgttcggggacataagcaatcccttgttcggcacgatcgccgaaacctacgaagagtacttcgagaaaatcatcatcaacatcatgagttcggtatcgcccaacaccgaagtgttgatcgtgtcccaccacgacgaccttatgtccatgttcgttttcccctctttcccgtacacaatctcaacaagcttccccaacctgcgcttcctgccggacccctgcatcatttcaatcaatggactggaaatcggcatcacaaccgcggacataatcaaggatctgtccgaggcggaagtgagcggtgatcccaaaggcgacaaaatcaagcgtgctttcaactacatgttccaccacaaaaccttctacccgttgaatcctccgccagaaaaccttcccctcgacatggaccttctgagcacattcggcaaactttcgcgggtacccaacatgatgatttgcccgggtgatttgaaatgctacattcgggacgtgcaccggtgtgtgtgcatcaatccgggacgcctgtcggaccagaccagcggagaaggcacctttgcgcgagtggtgatcaaacagccggaatctgaagcggcattgccgttcaattatgtcgtttgtcaggtggttaagtcgtaaagttgagctttacacaaacataagatgttacagatgaatttgaagaattaacaataaaaagttgaattttgt

SEQ ID NO: 931 - DNA, 3457 bp, Aedes aegypti
cagagcgcccaatgctatttatgttttcgcgcgcactcaccaacgattcgaatttatttttgtcgtaaaaatgttttaaaagtttgcacaaattcagcgtgtgaaaaatgtttaactgcaagaaaaaatgcacgggtatttcccgtttcgtggatgaagatgtccgcaaaatgctggagctagaaaagttcaaacagtgtaattccatttcgttctccaatgtcgacgacgattcgccggttgaagtgtttggatacgagctgttttacctggatgacgaaacgttaaggattcaaacggagaatgcacgggattatgctgggaaactatcggttgaagcgcaccgagatgctgtgggacattttgaatgcagaaggcagattgccgagctggggtcatttctacgattgattctaggcgaagtagacaggctagatgggaaggtggtgatggattccatgtaccgactgtacgattcctttccggagctggttacggtagttgaaggagcggccaacgcgttgagccaagagacatatgattacttccacggattgttggaattctggtggtacgggttgattataacatttgagctgcaacagcgcgacacgacgtcggatgggtatgaaaccatgtaccgaagtctgctcgaaggtttaatccaactggcgatgttcaggtattcgagacttgaaaaaagcgacttgccgttccatgatcaattctactgcacatgtgtgcgcaacatttggatcgggatcatgtctttgagtatgagtggacggaagcaccttgatttttgggaacatatcaacaacgctctggagtccatacggaacggaaggcatgatctgtacagaaactttgccccaccggccaatgatttcttgttcgttgcttggttcattaatggaatcgcctcattgtatcagtattgtatattagatgtggacacattcaaggaatccgctgtgatagtaaaccctcccgattatactctgctggacagagctgttaaggaagtcactcatggggacaagccggaagaccacttgaggattcttctggtgttactcaagcccatctataccaaatggtggccggtaaagcacgatttcctattttctctatgggagtacttcagcaaacgtctcaactcaccgtttcaattggcatcggaaccactcagtaaactggcttgcatctgccgatctccgattggcctgatcgaacaagcccgttgccaagctgatccacaagcattcgaatgtttagacacctactcatccagtttcaaatgctatctaacgattgtcgccttcatggttcgccattactccgacaacaaccagaaaaccaaagttcaaattctcttcaaccgtaccgttctgaaactggttcccgccaagatagaacttctaacagagcaaggaatctacaactactcgctgcttatgctcacagtgttggagtctaccccataccaagacgattaccaccgtctatcgaagcaaatgctgcatttcaagttggtccagccgagttccgccggaaacctcgatagcaccattcgccgcatcacgatgatatgcctggccaatgccgcactggtcatgcacttcagtcagcggaatttcgacaagggcgcccatctgcagcagttcctgaaggcgatcgacgaggcctggatgaagtacgggaatcggttgcaaccggcgttacacgtgttggccgatgcgatggggtccgtgtacgatgacgtcatctccggcggaaggcagttcggcaaaggggatgaaaggttcgtcggtgtttgggtggaaaagtatctgaacgagtgctcaggtagtgagcgcgatgcactgtttcaaaacatcaaccgcctgttccgatgcttacgtttgaagcaaccgttccacgtgcaacaacacaatgatgtcctgcgaccgctgtacgagattgtgctgccttttgtcgaaaaagcattcaccaaagccgatcaaccatgcccaatcatcgcggagctagcagcacattttactctgttcagcattgaacagccattcgtagagccgttcttggcttctttttcatttttcgccgataatgtcgatgccaattccggtctacggttgagttacaccaaactgatcgtcaaaagtgatcgagtcagtgaaatcgacgacatgctgattattaaatgttggttgaaattcgctattataaacagcgctgaacagctcacagaactctctcaagtggttctcggattgagtgagttcagatcactttgtgacattccgtcccatgatcttattgacgaaggcgaggagccgataggattgtttttcaaattcgtcggcaaaaagtttaaggaatgtgaaaataacagtgcaatgcagttcgatctgaagaataaaatgcacgttttgtttcaacaattcgacaaatggatcccaaaccccaatgttgctctactgaaaagaatcctgtcggttctggccctcgcgctgaaggaatgtggacctgtggtgtacataagaaacaattcaacatgcctgtatcatttggcggtcaatcactatttcctaccaatgaccgtgctcaccgacaggaatgtgtccaatgagttagtactggcaatgggcaagatgtggttccgaataatggatgccatgggtcaaatggactacgaaatcgatcccgtgctaagtgaccatgttacgaatatgatcgttaaatgggctcctcagttcctcaaattcaaagagaaaaaggacatcgccagaccatatgtaatgttcatttcgtctttgaatgagccatttatcacatttgcagtcaatagatatctgctttcgtatgtggaactggatcaaatgggtgccccaaaaccaaatgccgaaaccggattgacgttactgctgtacactctcgaagttctgcacgacattcaggacaacggaaaaatagcgtttttcattagactgactgctacttccatcatggaccacgccacaaagtgccacgatgtatatcctagcaaagcagtagccgttaacattattttcaaaatgctggattgtacccgaagcagctcaaatctcgtcaaactggaactccgaaacagtttggcatcgtataccaagaggcatttaccggtggaaacgggctattatttccgttttatgtccaagttggcggagaaaaatccagaattcatacaatccatgatatcaacgattcgagaggaactcatagatacggagcgcttgagaggtgggaaagaagataagcatcttcgcaggctgctgttccagttggaaggagcggtggaagcgagtatcaataagcaaaagccgtaatttgttatacgttcagttgaagattcccggatacgtttctctgtaattagaaatggaataaatacttttgagccaccctgttacgatag

SEQ ID NO: 932 - DNA, 2001 bp, Aedes aegypti
atgtcgaagctggtaaagaacccaaacgggcactgtaagttgtgcaccaacaaggacagtatggacaacatggtggaatgtgacgattgtgatcgctggtatcacctctcctgcgccaaactggatcgatcacctacggcagaggaatcctggatatgcgagcactgtgccgatatccaaaggaaatggtataagcaaggcgctgctgccatcgagaagaaaattgccactcaaaaacaaaccgagaacaagagccccaattccaacgagcaaatcctacaagaattgaccaatgcaatcaccaacaactcttccagcaaatcaactttagatagatcattcccaaactggggaaaacgcagaactatcgatgaagaggaagctaaagctatacgagataaaacacctcaaaacaaacgagttaaaaccaattcatccaactcgttaggaaaaatcatgctagccacaacaacattgctatcgattgctaatgctatcaacatcaagccaatagaggaagatggtcttatttttgatcatgaaggaacgtgtcttttgaaaagaggctcctggaaaacaaacatatacaccggtatatctccagcacaggacatcaattttattgaccacgtccatcagaatttaacaatcgcgttaaaagagatggaaaggcagacgaaggatcaaacaattcatcagctggcgacatcaattgggcatcaatgcgatgatgcaatccaagaaattcaacaaatcacccgtaaacgcagaagcaagggaatattcggattccttaaagacatattcttcggaggagacgacatcgacgaagcagtagaagcgatgaggattcaggaagataacaaaattcatcatgtttcggaaactgtacaaaagggagcaaacgtatctcagcttgaacgtgatatcggggcggatcaatttccccccaatgagcattatttcggtttagttaatttcggcaatacctgttatagtaattcagtcttacaagcactttacttctgtaggccattccgggagaaggttcttgaatacaaggccaaaaacaaacgcacgaaggaaacgttgctgacctgtttagcagatttgttctatagtatagccacccagaagaaaaaggtcggttccatagcgcctaagaagttcattgcccgacttcggaaggaaaaggaagaattcgacaattacatgcagcaggatgcccacgagttcctgaactttctgatcaatcatataaacgaaatcatactagccgaacgaaatcaggcaaaaggcgcaggaacaagcggtagtaaaaacgctggtaccatcggaggaggagggggaagtctgaatggggacaaccccgggcagccacaggaaccgacttgggtgcatgagattttccagggaattctgaccagtgaaacgagatgtctgaattgcgaaacggttagcagcaaagatgagaactttttcgacctgcaggtggatgtggatcaaaataccagcataacgcactgtttgcgatgctttagtaataccgaaacgctgtgcagtgataacaagttcaagtgcgacaactgctgcagctaccaggaagcacagaaacgaatgcgcgtgaaaaaactgcccatgatactggcgctgcacctcaaacggttcaagtacatggaacagtataatcgacacattaaggtgtcacatcgagtggtgtttcctctggaattgaggttgtttaacacgtctgacgatgctgtgaatccggaccggctttacgatctgatggcggtcgttattcattgtggttctgggcccaaccgagggcactatataagcattgttaaaagccacgggttctggctgctgttcgacgacgacatggttgataaaattgaggcctcaactatagaagacttttatggtctaacatctgatatacaaaagtcatctgaaactggttacattttattttatcaatcccgagacgcaacctaa

SEQ ID NO: 933 - DNA, 646 bp, Aedes aegypti
gcttccttgcacaaacatgctgagggtcgtagcctccgaggaacgcgcatcatcgatcgggaatcggaaaacatcatccggatgtgcacagagatgttgaacgatctgccggaaggcgaagcgaagcaaacagatggtcgaattcatggttctggtcctcgaagccttgtccagctacatcaacgccgtcaatcacattgccaaaaagcaacgccagttccggatactcaattcagctcaattcggacaaaaatcgctctccgctgctgttcctccgaagctgctggccgaacctctgatgatgaatggtctgcagagacagaaccataaagcgacagcaagcggcaaacaacgacgatgagttggacgattttgcagagcgcatggaagcttctggggccaggaggattgttttttggaggaggaggacgagctcagccccgaagatatacagatcggtacgaaaaccacgaacgagctctgtgaatctactgtttgttgagggaatctgaatacatcacagagtgccttcaggcttgtattttatctgcaagggttccctgaattcgtctattaaagcgtcctagccattatgatccattatttggataattgtttaaaacaataaaataggtggtagttggtc

SEQ ID NO: 934 - DNA, 2012 bp, Aedes aegypti
tgaccttcaagtaatgctcgacatgctgtgaacatttcattttatcaatcaataaataagtaagaactgccctttccaagttgatcattttgtatggtagattgaaatggttgcaaatgcattgtccaaaccattataccaaaaaataagatgcatttgaaagtaaaagcccggaatacttaagtatgacgtaaaataagtcaaatatatgatttgagccctttttaaaatgtgtttgaggttttagccgaaattgattctagctcgaaccactgttgattgggaggattgtgattacaataatgtttccctttgttttccaccatttacgagcccctcgctgcatttcatgttgatgcgttttgagtttttgagcatccctctgtttgacgtttcattgttgacatcgtcttctcaccgacagattaccgcgcgcacgatttacgttgtgaatttgtgatgaaccgttgttcgttattttggctgaattttgaattagtatttgctgctcacgatatcctgttcatccactttgaatcagatcaagaaaaagcattcccacgaatcatgctcgacagagacgacgaagaccacctggatgccctctcaatattcagcggcaccagcgaaacggatcgaaagcgacggtatgacttccacttttctctgccatcacctcaacagctcccgcaaccgatggacgtggacacttctggtggaccgattagactatccccatcgatcacgtcgccccgtcccagtgagaagaaacagaaactaaacagtggtcgggcgaggcttaagattcggaagttggccaattgtgaggacgataccagtggatctgggagcgatcagaaaaggagtggagggatgctgcgactgcggatggttgtctgtttctcgacggtcgttttagtggccgttttggtggcgcttgccagtagggaggatctgagagaggagttctataaacgatacatgaagcaataccaggcacttctgcatgacgtcgatgattactgcagtcaagagtttgacttttcggcgaccgctaaggcactgtcatctggactggtaggccaatcggaagctgttgaaaaaatagtcgaaatagtcaatcgacgccagcatgagcgttccacatcgattgccctgctgggatccacaggagttggcaagagcctaatggccaacataatcgccaaaaagttccagtggcagtcgaatgtgcatcacttcttttgggactttacgtccactgcggagaagcgattcgaacggtttcagtcgttcctctatgggatacggcatggacgggatgtggaattgaagtgtggtcgaactttgattattgtagatcatctgggacgtggcgacgtggacatgatcaacaagatagacgcccgtttgcggttcgtggcggataaggacgacgtgcagctgatggtgctgtacgtatttcagggagcattgatgaaggacggttccgatgtggttcaacatctgaacagaaatattgaacaagtgtttctacgctccttgaacgagaaagatttgatgaagtgtatcaacctggaaacatccgatttagggataaagctcgacgaacactccggtctgcgggaagagctgattgccagcatggatgtcggacgttacggatgtaaagccgtgcgagcgaagcttgcatattattcaaagatgttcgaaaacggttcctaattgttatacttgttgtcttggatttgactgagacacaaatgtgctgtgattttctttttagttgaaatgccaattgagtttaacaaacaatgggtgataatgataataaatatgctaagaaaactacatgaaaacaattataatgaaaaatatcactacctactacgtacattacaaactaacattaagctactattactaacaatacaacgttcgacccacagcgtttctcaatctggtactggttgttatatcattcatttatgaacagttttaatggtataatg

SEQ ID NO: 935 - DNA, 2075 bp, Aedes aegypti
atgtgcaaaccgattaaggcttcgacgatagatggcagacggaagggtgcatgccttttttgtcaggaatacttcatggacctgtatctgctggcagagcttaaaaccatcagtttgaaggtcacgacagtggacatgcaaaaacctccgcccgatttccgtaccaacttcgaagcgacccacccgccgatcctgatcgataacggactggccatcctggagaatgacaaaatcgagcgacacatcatgaagtcggtcccgggcggatacaatctgtttgtgcaggacaaagaagtggccaccctgatcgagaacctgtactccaagctgaagctgatgctggtcaagaaggacgaaaacaagaacaacgccctgctggcgcacctgcggaaaatcaacgaccacctggcggcgaggggcacccgcttcctaaccggagacaccatgtgctgcttcgattgcgaactgatgccccggctgcagcacatccgcgtcgcgggaaagtatttcgtcgattttgaaataccaaaacacctgacggccctttggcggtatatgtaccacatgtaccaactagatgccttcacgcagtcgtgtcccgccgatcaggacatcatcaaccactacaaactacagcagatgctgaaaatgaaaaaacatgaggagctggaaacgccaaccttcaccacatctatcccgatcgacttgaatgaccactagagagggacagacagagtatatgaattccaaccagggaatttggcaaccattattataaaacaaacagtagacctatactatatgtcaggaacagaggagaatttgcaatacatacaaacacacacatacagattttgataacgatttacatagaacaacccatttttctgataacaaaaacaaaacacaaacacataccttatggaaacaattcatcgaggagagataaccgacaggtgtttgacagcagtgctgccaatcgaacgcgccttcgccttgaatgtactattaactactacaaaatggtgaatcctatacatataaatataaaccgcatcccttaggatacaattgaattgattgtagaattttgttttgcttcgcgacggccatcatcatcgtcagtggaaacactgattcggtaacggtataacaaaaaatgagtgaattactactcggagatgaggaaccagaacaacaacaaatgtaaagtttaattctaagtagagcttaacactgtgaagagcagagaattcgttgttaattgtatcgttttttgtaattttcctattttaatgaaacaaaaaaaaagccttaagttgtaacggatgatttatcgagagaaaagacacacgagcagcttttagcaatgtgcgatacgaaaaaaaatatatattgaagtttaccattgagtaagaagaaatacgaaaagttcatcaatgttttataattgttttaaaaatcgctttcgatgtacggtagtagatgtagtagtagtgaccgcaaagtagtgtaaaaatcttttatcaaagaatgccttattatgttctaaaattggtacaaattctagctttgttttgcttcgcgtcaggcaacactttccattgcgaatttcaaatccaaattagcctacagttatcaacgaatcaacagcaacagctcagtgacactgaaatcatacagaaacatgaaatgaattttaagttagtttgctaagcagagttcaatcaaaataggacaaccttcgcagtcgtgttgtacataaagaagtgaatgaataagcaattatcgatgttagtgaaacatttttaaacgcttcgtagaactatatttgttccgctttcttgaaacttgcacgaatgaattaaaaaataaaagggaggaaagcctactgcgttagaaacagttattcgcgcgtgcgagtttaaacaaccgatagaaaagtaatgacttttttgttgtgaattatttacttcaacttgttttatatttgccagaaagaagtagacggagaagcagcagaaattacgaagaaccgtagttgtaataaaggtcttaatcttttccgacattaa

SEQ ID NO: 936 - DNA, 801 bp, Aedes aegypti
aagcttaaacattatttattaagaaggaattacattgtttggggggggggttcgttggggcccatagatgtgcatgcttagcgagagagagcgagaggtgagggaacatttatggttgttacttgccgactgctacacaccggctggcagatatgcggcctcgtcgaatgcaggatctgtagcttgttaccacgctgctcctctgggtcttcgggttctgatctagcttctgtggatccttgtgggggtaaggttggtagaccacgtggtagtgggatgacgtccctcgtgctcgcggacggggtagtaccacatcggatgttgggcacaagagagcggggactaacccatcagtcctccctcggccttcacctccatagcggtcggtactactcgcacgtggcgtgtgcctcgacgatagctgatgggactcgtcggacaccagcacggggctcgccagcctctccgaagttagtagctccactggacgaattccacgggtcgaatcaggtggttcctacaccgaagcgcgggttgcgctgcctattggggttatcttccttcggggattggataaggttggctccaacagcctcctgggatgggatatcaccctaggtcgtctcagcgtacttgaccacgtcgccggcctcactacgtggattgtcttcccgtcaacgctttcggaggaccagctggctacactcggatggtctatttcttcaccagtcggtcacttcttctatcggactcacttcgacacgcaccaattaacttttcccatccgaccttcgtggtagt

SEQ ID NO: 937 - DNA, 1308 bp, Aedes aegypti
atggtcaattctacgcccgtcgaagtttctctaaacgaatgcgtagatttgagcaaagtaccattaggtgcattgaattacaaaacgtatgaactgctgtcggcattgctaaatagaaagaaaatatttaaatcagaggacggctattatcgtgattggcgagggttgtttcaagtactcaaattggataactatctggtagcagagctggaaaaccataacaatccaacgaaaagagttttggatctttgggagaactcattgaaaggagctaatcttaaggaccttcaaaatgtgcttggcttaatcgacagatgggatgttttggacgatagcaataagttattttatgacgacgcagaaaagtttctttccaaaaccgctaaacaggtcagtacagatcaattagaggaaacgagcattggagcggatgaagacattattacaaaagatgatactcgacaaaataagcagttttacgatgcgttcattttgtttgctgatgctgacattgaatttgctacaaaaatcatggagcgcatggaggagagaaaattgaagatttgtataaaggatcgagatcttcttgccggtattacttttgagcacgaagctatcattaagctgatttctgagcggtgccggcgattggtggttgttatttccagagaattcttgaaaagtccgttgaacaatttctttgttatgtacgctcaagccttgcaaattgaacaaaagaaacgtaaaattattccttgcgtgtacgagcgattggagcttcctgcaaacctaaagttttatttcattttggactacaagcgctcgaacaagctgtacaatttttgggacaagctggaagatgccataaaagttcgaacagattccccggtgactgaaattaagaatcaatcaaaagcaatagaaactgtaagcattccaaaaataacagttgaagatgcaaacgaatcatcggcagataaagttgatcgaacgcaaaccaaaccagaacaactcacaactggtacatcccattcagtttctcagcccatcaagaaatcactatcatcgtgggatgttagcaatgcgctcaaccgtgtactaacaagtaagtctaagaatgcatcttcgagtacatcagaacttccaaccggtgccgagaacagtgatcaggaattgaaaaaagtaaagtggtattccaagctgggtttatcgtccagtaagtccagcttggatggcaccggcgaaaaatctgagaagaaaaagacgaagtggtacaaaacaagcaaaaagattgcaactgctatgtga

SEQ ID NO: 938 - DNA, 3576 bp, Aedes aegypti
tcaaaacacgtgcgtgcgtagttgtgtgcgcaatgtcagctgtggatttcgaagacttcagtcgacgttcaaggaatggaaaatcattaaaaatctcggaattctaatgaaaatcctgtgttgtaagagattaggaatcttttcataaaacagttgaagcataaattgttgtctagtgagtgctagtttgattcgcatgattgaaaagaaagttcgcgaataagagacagttccgctcgggaagtttgatcaatactgtcgtgaaacggtgtgctatttgtcacgtagaaaattttccgcaagttttcccagggagtgctgaagattttctgttattcttattatcgtcgcttgtgattagcatctgctgattgtaatacaaagtagaccgagtgtttttattgcgtcagttttcattggcgaaaagtcaaacattttgctgcgtaatttcacccggagggcaaccggcaaaagaaggaggagaaggtgaagattgtgctgcagaaataaaagtggaagtgaagattggtcaaatagtgagaagtgaaaaaacaaaatgtcgaacgttggggacaaatttgagctttcccgggacgagttccggaacattacacagtgtttggggaatgaagaatttcgaaagttgtttgccgagtattgccaggagcttaaagatccggagaaccggaagcagtacgaagaagagctcaagttgatggaagctgagcggggatacgatgtgaagttcattaaacctttgccgggttatgtaattaagaccgtggttgatggaaagacgaaggcttttgtcaacgtttgccactgcgacctggttgggaaaccttccagccaatgttccacaaacaaaagaggagaaaaaggcctcaaatggagtattccttacgcccaaagtcaaccgaggaaagattacgataacaaaaatgtcgattgcgtcgtttacgatgtcgtttttcactacgatacgctgcatttgacgaagagcaataagaatttccggaaattggtaaccgacactgccctggatgccgtcgaaggagcattccatgtgtctttggatagagttaatctgaaatttcccaaactacagtacaaaggtgtcgctaaaatgaccgtaattcgacaaaaattgaaaaatttcgaaacgcggcgtaaagatggcctaattgatacgctttatcgagcatccgagcagagtaaaataactcatgataatagcgctgataaggaaaacgtgaataaacaaacattcaagtccgcatctcaattagaatacacaactccagcctacaaactgatccacagaaaggaagtagagtaccacgagttgaccggagaattagacgcaaaactcgatgccgccatcccgaaggagcttgtgctggtcattgagctacccttgcttaagtcggccaatcaatgcactctgaatgtcacgagcagcgaggtccatttgatcagcgacagtccggcgaagtataagttggaagttaagctaccctacacagtgctcgaaaaaaatggatctgctaagttcaatacagatgagacaacattgactgtcttgttgccggtcgccaggaatcgccggacattgaatgatgttactgtttccagcaatgatcaaagcatgcctgatgaaatggatcagaaaccagtggaacgtgtaaaaccgctcaaagaacctcaattggtgcatagcaatgcaaataaaaagataatattccccaagttttccgcaaacaaaatggacaacatttttgcatttacgttaaacgttcgtaatgtcgacccgtccagcattgagctacagaagggcaccgatacagtcagctgcagattcactaatattggcaacggatttttcccctgctattatatattctttcttcgatttcctaacgccaacataactgaggttcaacacgaagaatgggataataacataattctacaagtggtcctcgatcatggactcatcgattgctattacgccggcacgaatgagaatgatttggtacaatattctatcatggaggatatcactgataaaatcaacaaatttgggaaggaaattgaagatgacagtctttgtatagcggtctccaaaaatgctattaaacaagagcgcaaatcatcccacctgagcatcgaaattaaaacaaaagatgagatcgaaagcgatgaagggatcgattctgcactagaaggagaactgaagactgatcaatcaatgcaagaggatgagaacccggatgaaataaatacacgcacagttgaggatgataccaaagttgccaaggaaaatgtgaaaaaagtcgaccaggaaacagctcatgaaggaaagaagagtaaaaagaaccagcgcaggaaaaacaagaaaagatctttgtcagagtcgtgttgtgatcacttgaaggttacaataaataatgacaaccccaagcctgaatctggaaatgaagcgaattcatttgaaggcacaggtagcagcagcgaagcaacatccaaacagcgaaaagcacgcagcgtttcggagtcatgccctgctagagacaacaacggggtcgaatcggattccgtggataacttatctgccctaattcagttcaaccataagtacaaaggaattctaaaacgttcatctcttcaacggagtatcagcgaatgctcgtccatcgatgaacactattatttgggaacctctgtcgatggatcaagcgtcgcggaatcagttgatcacacaaacggagaattatctgaaagctgtcgcaagacagtgcgattcaatgatgctattaaaactaaattgttcagatccaacaccagcattcttggccagaagaaaaagaacgcgaagaaaaacgagagcaaacgtcgagctctgactcgtcgtttaagtgaaggagaaagtactgataatgaggataaggatcaccaaaccactaatgaagcaccgggatcagtagtacaaagagacacagagcatgatagtggaatctcgctggattccgatgcggcacacccaatcgaaattaatgcagatacggaagtgcagaaccagcatcaaaacgattcgaccaaacctatcgaaatcaatcgtaaggttgagaaaaagttcatcgccagcaaaaacaacaattgcaacgtaaaagctcaatttattaagagcaaacgcaacgattccagtgatattgaatttaagagcgatatgatttttgatatcgaaatgtagcatgattgatcattttaaacccattttgaagtgtagttgttcgactttcttcacttccattaggttctgattatatttaacactactcttgaagggtgtgttttcttagagtgcaagtcctacatcacagttgttatatgtttgaatgcaaaattcatcaacaaaattaactaaactcgagcactagatcgaaagattcaaattttgtttgtacctacttagaaaacgcaaatcaaaacattggattggcttgatagatagagtttatcgaaatacgttaaagctgaataaatctgaatggaagcaattgccataggaaaaaa

SEQ ID NO: 939 - DNA, 853 bp, Aedes aegypti
gaatgattggcatcatcagcagaaactgcttttaccgccaaaacgatctagttgctatcgttagaaagtgcggatttttgggcgtatcaagttctaagttaataaatagttctcccaatatgtctataattcaaaaaagaggagccctaatagttttggaaggctgcgaccgtgcgggaaaaactacgcaatgcaaaaggatcgcgccggacacaaagccaaattcatgaatttcccggacaggtcaacgcagtttggtgccttgattaattcctatctgaccagcaaggacaattttaccgatgaagcaatccatctgctgttcacactgaaccgatgggaggccaaaaacgaaatggaacgcctgctgcggagtggcgtcacgttgatcgtagatcgatactcctattccggagtggcattcagtgcggccaagggattgaacatggactggtgcaaagcgccggaaaccggtctgccaaagccggatcttgttctgctactcacgttgacggcggaagcgatggccaaacgcggaggatttggccaagagcgatacgaagttccagaactgcagaaaaaggtgatggagaaatttcacaccctgaaagacgatagctactggaaggtggtggatgcggataaaaaagaggacgcgctatctttggagctttgcgagatggttttggactcgatggaatcgtgcagcgataaaccattgggaaagctttggtaacattggttaactagttcaatttaaatctctaccatgatgaatatgattccggtatttacctacattaaggatagataagttaaaacaagaaagaatatattttgacatacattttct

SEQ ID NO: 940 - DNA, 2368 bp, Aedes aegypti
attgatgatttattgtgctcaaactagttacaaacaatagtcatgaaaatcccaaaagaggttcagtgtcgaacatgcggacaggtgttttgctgtgcgaaatgtcgacaaaagcacgaagacaaatcccaccaggaggtgcaagccatacgacaaatttgctacatttgcaacaatcggccgttcccgctgcgaactgataccaagataacaacaagcaatgtactgatccaacacctgatgaccgagcacttgccgctgcgttgcaatcggtgctcaaaggtgtttctcactatttcggatttcaaagccattgtacgatgcacgcctttcggagagaacaatgccaacggtgtaggtcatgcttgcagcttggagcacagcccaaatatacccaccattatggaaacgcctgttgaaaactacggcgaagtggacaacaaggagaacattgacgaaaacggaagtttatcggatcaatcaagtgccaatcggagtgacaagttgcgcccagcgacggcaatcaaagccaaagcacctcctgcgaatgtattaaaaggaccaaaaatatctgaagaactactcgcgataacggatcccaatgagcagatcgaagaaccaaatgaagcccttttgacaccgctatcgaaaatcaatctgcgatggaagcgtaagagtcaaaccttcgatagcttgaatggttccagtaatttgtccgcattcaatacgtctgaggttcctaacagtgcaagacagaagctggctcgtacaacttcaacgccaatgatgcatggatatggtcctaacgccaaatgctccaacgactcgtattccagtgccctgggacaaatgtctagcatccaccacagcgccagtgaatcctcgtatgtcaagaacgatgaccacacgccaatttccccggcatcctatgaactggaaaaagttcgagccattataaaaagtcgctccaaagtggctgccacaccgctccgtcaggtcatgtccaagagcattcaacgagcgatagcacagcatggtcgctacacgaaaatggtggcaccaggaactcagcgaaaaatgagcttcaattcaacggggagtagtgcaacgaatagtaccgtaggatctccatcccgaaacgcactggatctccgaacaactccggtgctgaaaagatcctccagtgagacctgcgttggaggtcggaaaagtgccaaagtaagctacctccaaaaagctcaaagcgaagagtctggcctgtaccaaccgtgtgacatgactgagtcccaatatttcgacgcacaccaaagcgaaacatcatttgaagaggatggcagtgtgaatcaggaaaattgtagcaatcacaaaatcgacgagcagagtttgatagccaacgagctggtaaatctcaaagccttccccagctactactatcaggacaccccgaaaatagctggtggtatactcaaaaaagttatatcgttcactacgccagaaatgacccgaattggtgagcacgaacccgatccaaacgaatcttcagatctttgggctacgccatgttctgtcccaccgcgaagtttcagttgctcggcactccaagaaacgggcctaaattcgttcgtagccgaaaccagctgcgacgacgtattcctacctccaactagatccaaatcctatagcaaattgaaagcggatcccgccaacacaataccgaacactggtaagctgtggaccatagtatcgaatgttatcagactagcgtcccggtcggatgtccgcgacgagttgggcaccgaaagttccgaatactccagtgcatcggacagtggcggagggtctactttcccaacgagtctggtgcggaaagcgacttcctttgctggatttctaagaaaccgactcccgggacgacaacaccaaactagtacctcacccgaaatggacgagcttccatcgccttaccgttcgggagcatcggacggtagcaccaaacgaagacgaaccaactccgtgtacaccagaccgtcttgcgaaaccgttgcgacgcgccccatctcgagcccattggccaagagaaagcgcatccagggaaggcaaccgattgaacgcatgcgaaatagtagccgtggaagcagtggaagcgatttttaatcaacgggcaccagaggcaatcctaatctacaaactttacttactgttctttcaaatgtcagtcaaagtagaacctattaagtctaacagtaaaattttcaaaatgtatattcttgtgcaagtatctgtgtattgcgtacgagacattcattttttctcatttggtgccataatgtcagcatatgatacaaataaatacagtaaaaaattataa

SEQ ID NO: 941 - DNA, 772 bp, Aedes aegypti
attttacaatgcttttttttatttgcttttcctccgctccttgcaaaactcatccttccatttcactttgtcctcactcgctacgcaactcactttctagcctttcgtttattcctagcactgccgttggcctagccacattctactagtacttggcaatgaaattgataattcctaataggtatcttcacctccttctcgtgtgttttgtgtgtttctctctcgtacaatgtctaccacctcctgcgcggctccgaaaacacttaaaaataaataagaaaatgcaacactacccctcgttccatcaccatccatctctgcgtcgacagcacgcctgtccatttcttaacagttttgacatagctacttactagagtttacaatagtaatagtactataacttatgctgcgccgcgcaaaacaatcaaacaactgagaaaagaagctactctgctgactgagggtattgtgatgctcttctgattctagaagagcaggtggccttcgactcgcgatgctctgattcttcttctgaccaatttacaatagtagtactacacgtacgtcggttcctaacacacgcaatgatacacacacacaaacattcaacaatgaactaccagaaacacaaacctacgccgcggttcctcatcagttcttgatcatcggcttcccaccgccgtacgccatgctgccgtgagcgattgttgatccggagttgttgctgctgttgatcgtcgcgcccggatgatggtgatggtggttgttgttt

SEQ ID NO: 942 - DNA, 2474 bp, Aedes aegypti
cagtttgttcagtgaattcaaaaagcggcaccgtcgcggttttttttcgattcgatggctgaccgttttcttcatctgaaattattgtgatttttataaagaatttttgcgttgttaatggagacaggagtgaaatactacagacatgaacagaaccatcagtatgaagcgactaaacacgccatccagttcggcaaatgtgggcgcagcggaggaacagttggatgcagcgatattccattgtttgacggtgctctccaagcggaatccaccatcggaacaatttcgagccgtgttcgccaagggaatgttcctgaagccgaacaccaaggcgtttattcacgttctgcacttcctgtttaatgtgtacgacgccaaggagtttcggaagcggttctactggcctattttcgacaagaatgcggaaagtgccttccgtagttcaaccgtggagtatgtgaataacttggttgaacgaggaaagctggatatggaaaagatcaaggctcacacggtggttcttccgggcgggttgaagttcatgaagtttttgttggtgctgatcaagtttgtaacgaaggaagaactgagacgaactggtgtgcaaactggaggcaagataatctgcaaaattaatgtagtgcagctcttggaacatcatcaagaatgggaggatgttgggacgaaaattcgggaagccatccaaaaagacgttggtgtaattcaaagcagaattcaaggaatagatgaatggcttgaaaacttgttcgctgaatgccaaggaccagcaaaacaaatgagttacgaaaagctgatcgaactatggggaacaatcaacaggaaacgattcgaagaaactgaatccaagcggaaacgactacaggaaattacgactgaatacaacaaagttattgtgacggccaaaagaaagcttgagccaaaggagcttgtactgggaatcaaggaagatgaactcaaggagacgttatatcgtttggaagttctgttccccgataatgcctgccactttcgagaagtgttcgatgagaatgggaagattgacgctgtaaaaatgtttgaaattttgatatttcttgttccggatataaaccagaacttgtcaggattttctgttcgcagcattgagtcgctcaagtttgaattgaaagaactctccaaagttgtcgtaaaatccgatagtatatgccacgaattagcatcattgcgaagaagtttgccatttggagatgcgagatttcaggaactgcaaaaacaaaatcaagctgatgagttgaacgctgatcttggaatcaggaacaaaatcttcaatactccgccaatcactctcaactttcaagatgactgcgaaccaggcagtcgaccaatatctaaaagaaatcggcttgctctactggatgatgatcaaattcatcagatgaatctccggatgcgacttctatcatctagcttttgtcatcagttgcccaaaacccctcgttccgctaagaaacccaaggtagcccctgcaagcccaggcaacgtgtttgccgttccaaaacctgcgcgcaaggaaaaaatgaaccctctctcaatgttaaacaaaataacagcgcatggcaaacccaaatcgaagcccccaccagtcaacagcactcttaacatatcatccctctcaacgttgggagaaatttcccttcgtcccgagttttcatcgactcttctaggaacaccagaaaaacagacgtcgcaaaccaatccaagtattactccaagcgatcccgtcaaagatccaccctcgcaatcagctttccaaccgtcacctcgcttgaaagccatatacagccaggacatgatagtagagccaccatcatcagccataacaccactccccccggatttcctcctaggccagagcagtcggaacagcaaacggagaagctcactgctccagctcgaccagttgcaaacgtctccgtccggtaagctggagtcgctggttatgaaagcgaaagcagcggccaccacaacggcgatgagctacagaatgccgaaaatcagcataaccacaccggaggagattgattctggaattggtgaagcgatcaaggcgcaggatgtggaaggaatgggtaactcactggaggacaattgtctggatgatttggagcgaacgctgcattcgcaggcccaagacacctcgttggatgatctctcgaaaacactcgtggcgctgggaatgagccagttaacgctcacatcgcccccgaacggctgcatcaccgatgatcctcatcatccggctccggctgtttcagtgcaaactatggacgaggatctattcaatgtgagtgatggtattttaactgattttgattgaaagttacttttgttgttcagtgatttatttactcagaaaacgtttgtaaatgtatgtagtaggaatgcaaatatacgcttcaattttatgcgattaa

SEQ ID NO: 943 - DNA, 1293 bp, Aedes aegypti
atgcgaaaaaagtgtgctcgcgtcgtcgtggttttgggtggtagtattctgatagtagctttcgtgcttttgttgagggttgcgtggatagaagacaaaaattcggcttggccccatttaaatgagcagcagcacctccgctatggcattaaggtagaagcagcgattcgtgtgggcggcggcttagctgacagccgccgtttcgtggatgtttctagttcgctgtctcgttcgctgccgtcgtcgtcatgcggtgttgatcatcaaaacgtctccggaaaaaccaccacttcggtcaccttcaaccagttctcatgggccaccgtggcggaaaattgccgccgcgatgtccacacttaccacgccctggcatccggagtccgaggactgttcactcgcagtatgtcgtcgacttcggccaacggcgctggtggcgtcgggtccacttcgggtggcgcttcggcagcaggtggttcggccacggctgccaccccggccagtgcaattcccgccgagttgaacgtgatgctccatgggtaccatcggaagctgaagaccaacaagaagaagtactttgtagtgtacggtgatacgccggacaaaagtgcccggctcgagtactttgacagtgagaagaagttcaagcagtcttggctgaagagcaccacctcggtgcaggccaagcgaagcatagtgctgcgcagttgtttcaacatcaacaagcggcacgacatcaagaagcacgtgatcgccctgtacaccaaggacgactgcttctgcatagtgttcgacagcgaggaggagctgaaccggtggctgcggacgctgctgtcgttgcagcggggcgaggagtcggcgggcgagccgccaagacctactttcgaccgggcgctgtcggctgtcgtcgacagccaggccacagctgaacttgaatcaatcttccgtaaacgatggctaatgacgagtcacacatcaaatataatagtacgctaccagccctgtacaactgaaacagtcgtcgacatccacacgcggctagaatccaattggttcggcaacaatgttcgccctacgtgtctcatcgaaaatttctggcttatttcggtcgtgtggaatctgctgctgctgccactgttggtttggccgggtatcgaaactgaagggcggattcgtaggtgggggtgtaacgtgcaggagttatccatgctatcggtgccaatccatttaattgcatctcttgcggcccgcggccgaagtaaagccgaacggtttcgagggccgtgtatagagtag

SEQ ID NO: 944 - DNA, 1132 bp, Aedes aegypti
atgactgttattgaaccatgtttcgaattccactacggtccggaacggaacgaggacaacaccatcgaagtggtcatcaatggggacttgaagaaagccaccacccctccggagtccaccttcaagaacctgggaccctcgaacaagcggtacacactgctgaaggatgaattgtaaataggacgaaagcaagagagaggcacaaccaataccgatggacggaagacgaaacctcgggggtttccatacgtttgggaacagctgtaacacagatattcttctcctttgctaagaccacatttattctttcgaagaacgtttctatatttcgtcttttggttcttggccttcgttttctttctagattaatccatccagaatcaattcaatctgatagtgagaaaaaaaagtatattcacctgatgtaatcttcaaccggtatttgtttctgaaatttccctatttttggataattattgtttgagtgtagcaaaacctgtctcatataagactaacaactattaaacataattgtgtcggagtaataatacttattacctgattattatctacataaaatttggtgagctaacaaacccaaaatagggaaaaacgccaactagcgctacgacaggtttgaaattcttaacagtaacacgaaaaaaaaatcaaaccggagtgaatgtgaatgcacgtgggacaatgtgtgcgactgattgctgctttagctgtaattagtcttgtattttaaaccatttttcctggatactttcttcggtcctattatcaattgtagaagttttttcaatagttatctcaatcatcgctacgcagacaacattaaccacgcaacaaccggacgacacgtttcagggcagcagtcggagacgggtccgcggctaatcatgcccctcaacgagttaatgatcgtgtgatgatggtggatcgagaaacagtgatacttagttacacattttatacggtacgaattacgttaggaaaagaacactaaactaatttataacaatcagaaacggtcagattgaagagcagaagggctaagatgtgtagcgatagttttttttttgttaattcgtactacaaaagtctgtaaaataaaatctgatataag

SEQ ID NO: 945 - DNA, 2435 bp, Aedes aegypti
tggaagtgttaagatctctgattagtcagttgattgcgatggataaatatgccatcagtaatttggtgggtgaaggatcgtttggaaaagtgtacaaagcgatcgacaagcagaacaaaacaaccgtagccttgaaaatcatcagcaagagggggcgatcaggccgagaactgaaaggacttcgtggagaatgtgaaatacaaagaaacctgcaacacccgaatatcattcggatgttggattcgttcgagacggagaacgaaatcatcgccgttacggaatttgccaaaactgatcttcacagtttgcttcgtgatggatcgctcggagaaccaaaaacgcagaagatcacttacgatctagtgtcggcactctattacttgcattcgcatcgaattctacatcgggatttgaagccgcaaaacattctcctggacaggaacatgacggcaaagctgtgcgatttcggattcgctagaaacatgacgatgggaactcacgttctgacgtccatcaaaggaactccactatacatggccccagaactgctggaggccaaaccgtatgatcatcatgctgatttgtggtcgttgggttgtatcatctacgaaatgctcgctggagaaccaccattcagttccacttctatgattcacttggtgaaacttatcaggaatcagtacattaaatggcccagttttctcacctcgaactgcatttcttttgtgcaaggactgctggagcgggacaccagtcatcgaatgccatggaccactatcataaatcatccgtttgtcaaagggcacatcgtaattctgaaagaggacataccagagtcacctttcactaatccactcactgcttctcaaagcagcgagaagcggaagcaaacgaatcggataatttacggtgaaaattacgagtaccttaagtatggaacgaagcgtccaacaaaagccacgaaagggttgaacgaggaagatctggcttcttctagagatagcatgaacgttattctgcagagtgatatggagtatgcggaaacagatgcagaagatgctgctgctaccttaatccccaaaagaagttctctagaaaacgataaaaatcccatgaaggaaagcgatgaatcacgtcgaatcaatccggaaggtttcaccgtagaatatcatcatcctttgggcgaaaacgctgaactcgtccaagacaatcccaatctggtgatgaacaacttcaacgacaacttccctctcctggacaaaaacgcgcaaaagttcatctccactgacgaactcgcaaacagactgaatagcattaacctacaaaatcaatcgctcaaattcaaatcccaagagctggagcgacgaaaactcagccaaaacatcgacaacttctccgtgcgtctcgaatccgagcgaaatgcccaaaccaacactcaaaagtcaaccgacgatctccctcaatccgacaagaaatcagaaaagatcactccaaccctgctgccaggttgggactcctgtgacgaatcgcaaaatcccccgatcgaaaacgaagaatggcttgtgttcctccagaagtccatgcaggaaatcctggacggcgaactggactccctaaagcagcagaacttcgtcagcataatcgtggccccgctccggaactgccgggccagtgccaaagtcatcgaaaacgtcgcccacctgctcagcctgccccttgccatcgatgcccctcccgccatactccacgacatcctgagcgtctacgccgaactgaaactcgtccccaacctggtgtacgcctccaagcttctctgcaacaagaagctcaactcgtccaacagcgaaagtcagtcgtcgcccatccccactcctctgaccacgtccaactcctcaatccgattgctctcctcgctggactgcgacgaggtcaaaaccctgacggccgtgtacgatctcatctgcttcctgatccactccggggagaacttcctgaagcagttctgcgacgcgatcgaaatcctcggcgtcaaggagctgttcgtgaacttcatcaacgccgtccgatcgagcgaggagtacgtgcggttgagctgtgccatcctggccgtgctgaactgtgccttgcgggagctgccggagaatgcggaaatcgtggagcagatcgtgtttcacgagaatgtgaacctgattcagatgcttcggcacggggactccattttgagacatagaacgtgcatgctgctgagaattttggcgaggttcagctgcttggcccttcaaaagcactggaacaacgaaatcaaagagtcgttggagaatctgctggaagatcaggatgtcgacataaatatggaagcaaaatgtgcattggacgaatttaaatacctttcctttataacggctgatacggcgagttgaataaatataagctac

SEQ ID NO: 946 - DNA, 2499 bp, Aedes aegypti
gattaagttttcattgattttcgttgaccctattatgaaagcttttgtaatatcgaaaatccttctcaccttttaacgaatttgtaacgaaaagctttcaccgcccgcagtggtggccatctggatgaaaacgattcccaacaaattcgaaaagcgaaagcactatgtcatcaactagtactgcgaaagcctcactcggaatcgtaacgcattctccacaaataacaagtcattctcgtggtgagagagtgagcgatctcagttcggcacttagctgtgtttatttacatttcgtacgagtcaattactgcatcgtcttcagttcattatgcgtctggctgtgaatcgcgatagacagtgactagagtttagaaaggaataaaattgtgattgcaactcatccaaccaaagtccataatttttttttttcggataatgatacggagtgtcgtagtgctgatgattggtttcgtcctgtcaggatgtcaagccagaagttccaatgcaaccgaaggacttccgattgtaatgtggcacggaatgggtgatacttgttgctttccgttcagcttgggaggcttcaagtcattcttggaaggcgatctcggagtgtacgtgaaatcggtagagataggaaactcgatcgtaactgattttaaaagtggttacttaattcacccgaacaggcaggttgaagaagtttgccggcagctgggtgaagatcctaaactggccaacgggtacaatgcgatcggtttctctcagggtggacaatttctacgagcgattgctcaacgctgtccaacgcctaaaatgaacaatctgatcacccttgggggacaacatcagggtgtatttggattgccggattgtccatcgctgagcagcaaaacctgtgagtatttcagacaggtgctaaactacgcagcctatgcgcgatgggttcaggactatttggtgcaagcgacctactggcacgatccgctgaacgagtatgtctacaaggagtccagcaccttcctggctgacatcaacaacgaacgaacggtgaatgaaacctacatcgaaaatctgcagagtttgaacaagttcgtcatggtgaagttcaccaaggacaaaattgtgcaaccgatcgagtcgcagtggttcggctactacaaacccgggcaggacagggatattcagaagttggaggagtcggatctgttcctgaagaaccgtttagggttgcaggaaatgcaccagagaaacaagctggtgtttttggaatgtgagggaaaccatttgcagtttaccaaagattggttcaagaccaatatctatccgtttttgtgaaccaaagaataagataagaagtgaattaatttgattgcatatattatcatattatcatgaaacttaacactaggtgcgcaataaatttgcgaatgaaaatttagaatgatgaattaaatggattcaataaaaatttatgaagatgaaaacatatgttgtaatacggacaatcatcgatctgatgaacggaatcgataatattgacgcatctttagcgtgcttcatgcaaaaataacaatatcttaaattacagctacaacttaacttacaaaaaagtcaaactggctcaaatgaacttcatcatttctttcgcgattttcacaggcggttgaagatcagcagatgaaaatagaactaacaatcttggggcaagcaccttgacggcaccttggaagtgttgtgttggcaacgtgagagctcgaaaaaaatattattttcattcactatgggtacaaaaatcaatcatcagaatcaaaaatctagcatcatggtaatcttacgaaaaaaaaatctgtcaaggtagttcaaattgtaaacaggagtaaaaaataagagattgcagatcatatcatgctctattcgaccagcctatacagtgctttcaaaaataaagcgacacctcaacgtgaatgtatggaaactgagaacgaaactaaacttgaattccaataagaatgagaagcttttcttactggacgtaacttgctttcggatttacatcatcttcgaaagtattcaaaagtaatcaatctcaatgcccaaacggaaactatccatttaactgttcaagatgggtacatcactaagaataatcaacaatttatttgtgcaatgaataatctactcttgtcatcacagctcattagggtgaaaccatgctcatttagtttttgaaaaattgtatgattgtattgtcttattactattatttctgttttgttaaaataattaagatgtttgaatatgtttattattggaaatttatttcatagacctaagcctaagccatttgcaatcttcaatttgtctgcatattggtgcgtatgggtatgggcgtagtcaggtttttactcgatgcttgagatatctttgaccggtaattcagaactggccagttttgacacgcggtatatacagttccgccaagaattttccaagataatt

SEQ ID NO: 947 - DNA, 724 bp, Aedes aegypti
atgacatcaatgatgagtgctagcactgcggaggaaactgccgatcatagtttaccttcgtttgcctcattttccgcggagctggagccctcatgggattactacgaccgtcaggagcgctcaaacggttctaccaacggaggtgatgtaatatcctcccaaacaagcaatagtagttataccagaccttgggaaatggattccaaggaccatcgtgcagctgcaatcaccaatggcggtggcggcgggggattcgaaccattccccaagcttccgtcattccagagtcaattccatggctacaacgatacggctatggtcactccagaaccgagtttgccacaagttacagccgtaccggtgcccatctcaccgagttctgcatcgcccggaaccggtggctccctcacacagcttacacagctaaccccaacgccactcccgccccttcaaggtggcctcacaccgatcggaagctccggctttcacacactgagtgctgtcaatccacgtccgtacccactcgtacctgccccgatccaagctcgtgatatttctgccattaaccagcagtacattgatgaacgccacatccagctgtatcagccgatctcaagctttcagccgcagaccattcccaccgttactgtgctcaaaaatgaagtcgtcgacttcgacttgtcaacgctcaagaatggcaccatccaccacagcaacttccaaa

SEQ ID NO: 948 - DNA, 714 bp, Aedes aegypti
ctttaatcagtgattgatagattagattctgctgatctggagcgaaagtaacggaagtacctacggaatgacactgaatcgagaccctgatgtaatatgcttcaaacattgcggaaggaaaattttcgtcttttctgttccctcacattgtccggtttgcagtctgccattatcacaatccaatgaagtgctaccatttacgctaccctaccccttcgtcaacgcaacgcaatgtccctgttcggtggttctccggtcgtcccacggagacttcctcagcaacttccagaacagtgtcaacctgcacattgccctgactgactcgtgcggttcgatagttgagttcgacagtccaggtttgttatggacgccggccaggaacgtggacaaagcccaatggaggcagtgtgtgttgatcatgcaggtaccggaagcgtggtacgccgagtgggatcaaactctgagaaatgtgatagatcacgagggttggagacgaaaacagtatgacgaggatcatgtaaattgctatagttttgttttggattttcttagacacttacaatatgaagacacttcgcaatttgttcatgatagacaaacattctctacaaaattcgttgtgccaaaaactgcatatgcagccaagtttataacaatatttagaagggtcaaagataatagcttttggccagatgaaatcaatagtgaatgagg

SEQ ID NO: 949 - DNA, 3511 bp, Aedes aegypti
ggctaagaccgctcacggtccatcttgcttgcacagagttcagtcgtgtttacagaaaagtgcatagttttgctgcaggttgcaacattttcctgattatattatggtaaaattagtttgaaaatcgccgcaaacatgaaacctagccccaagaagtccatttccgccaaactgaagcaacggagcaaatcctcgagcagtggcgcaggtggcgggagcggatcttcatcttcaacggtggttgcatcgaatgccctgaactgcaattccaacagcatcgggaacaatgtcgcctccgggggaagcggtcatcatgtgcgatccgctgggataaccggcggaagtgataccaactcgtcgggaaacgatgccaactcgtcggccgccgcaaaggataagggatcgtacaaatcctatgcagggtttagttcccgatcggtgcgcaccatttgggagcagcatgacaaacaggagacggaagtggctcccgaagtgtacaccaaattggccgaggacaccacgtacaagctgtgggaactggccaacaacatcaaaacctacagtcgacactcgagtggtcgggtaacgtacgatctggtgaacgaggtgctgaaggattgcgacattccgccgatagtgggagccaacaacgaaccgtgggacaagatcgaatacgatggagtgtacttcttcaattccgacgaggtgctggatctgcgggaagagtacatcaaggacgtctcgatggaacagagcaacataccggtgctgaccacgtcctggatggcagaatcggccattgccgaggatctcattgagctgtacaacaatatctgcgacgcgatctatctcggagatgaggagtgcttcgaagaggctattggaatactgtctaccaatgcacatgttccgtcgctgatgaaacttttgctgaccaaggtcatcgaaatgctaggcttcgagtacacggaatgcacgttggaacgatcgctgcagttcttggaagccttggttcgaaactaccacatttcgcattcggatctcactttggagttgagtctgctgagtcaaatctttgtcaatctcttgctgggcgcggccagcttcatgcaggacaaatttattcccgctcaaccgttaaacctggacttgcaacctcactcgcaaacctcccaacttcagcagcccttgtcgataaatcaagccggcactgaaccatccccacaaagtgccatcgatcagcatcagacaggtggatttgcggtgcattcagcccaagggccgatgaccatcatggagaacaacctggcaggtccttcggaggattctaacaactcgaattccaatgcaacggaggagttgctccgaagtatcgagaacatcaaggaagggcccgatgggatcgatataaataacataaaagatgagtacgaagccctgttctcgatggtgcaaggactgggaaagcaggaggtcggagaagaccaggaaaccctcgccggaagcgatggcttccagatcaagaccgagttcaacaacgagttcgatgcttccggccaaaactttatggtccagcatccgccgatcttgggcgaagcggaaatgaatttcgacgtcaagccggagatgtccgacaagctgaagcaggaaccgaacctccccgaagatcacgatgacaacgccagtgttcagatgtccgaaagcagcaacggcgaggtgatcaatcccaactcgaccacgctggaaagcgagaacatcaccactctcatttgcgccgactatttggcggacgaggtcagtcgggtgatcgggctctgttcgagcaagtggggcttcctggagcaggagtgtaccttcctgctggtggaacgacttcagcggtactttggcggcgaccggaaaccggactcgatcgattaccactggctggggcgcgttctgcgcggattgtggtccgtaggggagtttgccttccgggaggtgataccctacctggagaagatcgacccggaccacgtgccggaatttgtgtatccctatttgaacaatacaggaatgttcctccgtggcaaaagcgacatattcctctacgaatatctacaagaagtctgtggcgatggactgatgccattcatgtttcagtatgaacattacattgaagccaaacatcagaaattacatcgcttacgcgagaaagccaaccagagcaagcactgttaccggatacctccaaaactactgctcaacgtccattccaaaccctgccacctgaaacccccgccaacgatccacgatttcttcccggagcgaaacgagaagcaattcccacagtccggtcaagctccgtcgtcgcgattcaatttccgctttgccggttgccgaccggtggcgctgaagtcgaacaaggctcgccacaccaccggtggccgatcgtcttcaatttttggaatgggtgtcgcgcaggaaaacaacgaccacggtcgtgatggccttggccatcagcagtcgctgaagcagaatgccggattgctgcggggtttccaggcgaaggtggtcatcgctaggaggaaactgctgcgtccggataccaatcagtaccgtcccaggcgggtgtactgtctgggatctacgaatctgtagagtacctagctgttgtcatagaatagtgatttgatcatctataaggtaggttacgaatgaaattgtgttgtactcatacaaggcgtgatgttaaagggaatctataacagccgaacctccttgaaaggattcctttatgcatttggtcgattaattccatcacccatctctcagacctgcttgaaaaagcgatagttgctttcagtaaccgttcaaaaagttgggctttcagcggggtcgatccaccgatactagctaactcgagtaactaacatcctgaagtggaataagtctctcgccaaaatctcttgtctgttgaagttgtctgatttggaaaaaataatcgactacgtttggtacaggtagcctggtgtacgactgcaacgatataatctagatgggcttttgaagaaaatcataaaaaattacctttcagacaagacttcaatagagtcattccccattcgcagttgttccacagcctattcaactcgcatacgtttaagctctcagacggtgaaatctgccaatgacatcttaattatccacagcggtagattcacatgagagctctagcgatgactacctgaacatctggaagatctggactgagattggagaattttaaaaccaccttctgtaaatcaacggtgtaacagtccgattatcctggctcgatcatggacagtaggatcctcttcgggcaactggtcgacaagacggtcaccaaatgtaacatcttgtactttacccccttttcgacttagagcacctgaggaataagcttgctaccagtctggacgcaatgcacctaaatcctttacctcaaggtttctcattcggagatccacgaacccctaggaatgcgtga

SEQ ID NO: 950 - DNA, 965 bp, Aedes aegypti
ctatgtattgttcatagttctgtcaaaccactttgcaataacactcatagtgcaaataaatttgtctgataaactatacacacattactcaatctcgtaatgaccccaacgcgagggaagaagcgcctggcagcgtccagttacgagcaacggcgtcgccgtttgcgccatttggccagctatgcctcgtcgatgggcagccccacaacgctccccatccaaccggtactcgtttgcgcgcctccacaggaacaatggcgcgacgacaacaacaatgcacccaacatcaatcccaggaggagaccgtaccttgcgggggccttcatctacaaaagtggcccggaggacgatctgcggctgcacgtgttcgaccagcacgaagtgaaggtacgtcatgaggagctggaaacaatcgaaaggatcactgctgatttcgcctccgcaacggcagggcagccaaattacgtgactggcgtgtacttggcacagaggcaggtccccatcaactgcactgatgagtgccgtttcgagctggaacggaaagcttactggagattgaatcaaacttatcgggcgaacttgaactttcgaaggcaatatgtcgaagccgtgaggtacgagtgggatcccgatgtgggaggttcgtactcgtacaagtctacggcaagctggaacgtgtcggggatttgatgaggcactcgaataaattgttcgggatggaaactcattattttccatcctgaacaagtacgggtttattcacaaatttcataacgctaaaaattgctattttcgacacccacccaccccctcgtaacactttttgtatgaatatttttataaatttcgtatgagccgtaacatcactaggatacccacccacccccttttgcgttatgaaatttgtgaatgagccctacctgagttttctttgataataaatcttcgagctgtttagctgttgt

SEQ ID NO: 951 - DNA, 591 bp, Aedes aegypti
ggtaccaccctgttttactggctaaacgacatcaaaccgtgtttgtctaacaattggttcaatacttggtatgtctccgaaacgtcccggaaatcgggacgggtacactctttgtataatctactcacaatcatatgctccgaaatcgtgcccctacgagtagcattactgtacaatctccacccccctcaaaacatacatacaaatgcagtcaacttgtgtaaaactattttcagctctggcgtttttacgcgagtcaattttccggcttgggatccgcgggggtcgactctgcttcgcattccgggagctcttctgccgactggtgcgattgatcgtgccgttcgattgacatcggtgaatcggattccgtactggggggttgcctcacatcaggagaggaatctttctccggctcggcgttgttgttgtccgactcttgatgatcgtctggcgtcagcgactcttccggtactggatcctgctcctctaaaggatcctctggttcagccacagccatctccgcttcttccaagtcgtccatctcctcatcctcggttgctggtaacagttccgcttcctgtaaaataa

SEQ ID NO: 952 - DNA, 555 bp, Aedes aegypti
atgtgtcatggcggattccgtgtgcgttcgcgattgcatctttttgcgctttttgcggatgaaaatttgtttcttgaagcgaagcccacatcaatctacaacggccaagcatctgctccagcaatgattccgtccggaattcattcagggtgcgagttccccaaaaccaaatggaaaacgaatccgctagacggctgtttgggatcttcctcaggatgtttcattggccgcagagctgggagtgttccgcaggaaatatattacaccagcggtcaacttttggccaacagccagggagaacagtctacgtatttatttacggaaggagcggaatggaagtggcagatacttatgatcggtacgtaaaccatgtatgggtcctgtgaatcattctaccgtttgccgaggaaatcaaaacacaccctggagtgccttatacttgcatgttacctggaagggtccattgcggttccttggattcactgtttgaagcgtccattatgctccataatgtgaattattctgcaataattgtataataaatgctgcaatagg

SEQ ID NO: 953 - DNA, 704 bp, Aedes aegypti
gatggaatgatgctgcgaacatgtggtaaacatgcaattctatacgacttcgacgacgagactaaaatcgactacagctacgcaacgttgcttaattactatgattacgatcatatttacacgacatgactggacgcacctgttgacgacatccacccaacgaactttatctactaccccggggtttcatttgactggtaatcgattggtacctatggtttcaaatctgcggctgaaaatacgcccagcgatttgccctgcaaatctgcaacttcatacgaactcgtgccaattttccgaagaatgacacatggcgtgtattgtggaccaattttggcattgaactgatcgcctgccgacgactgtcgaaagctccgcttgaacactcgttgacccacgtcgaaagtcggagtgtaaacgaatatgctgttgatgaatcagttgctgcagaacagaagcaattttcctacgtcacgttgatcaaagacctaagttcatacgtttcaagctgacagcaagaagggctccctgcggttactgacgaaggtagttaattattcaaggaaacagtggtaaagaaactgagtgctctccaaaaaaacaaaggacactcgctctttgtccttgcaatctactggagtttttcattcatataatataacaaataataaacgacacagttcttttctggcgtcttacatcag

SEQ ID NO: 954 - DNA, 1433 bp, Aedes aegypti
cgttctaaaagtgaaaaaacgatctggttcagagcaaaacgtgtagaatttcgtctgtgaaacacatagaatcgataaattgtggatcgaaatcttcagaaaattggataaccgcactctgctgaagttagctctggtatcccaacactggcatgagctgatttttacgcatctaattcgtcgtttccaactgaagctggatccgggaaagctgaaatttcccatgattgcatccagcattataccagggagaaactacaaacatctccagttgaaattatcggaaatcgaaggcgccccgatgaagattttccatcagctgatgccgaacttggagtcattgacgctgaacctaaaatcgcttgagctgtcggtcctaatacagatgctaggattgtgtccccgaatcaaagagctgcacctttatggcttccaattcaaacacgattatgacatcgaagaatttatctactcatctttgaaaattcgtcctgctattggttctttggaattggagtacaaaaagttgggtgttttcgaaagagaatttcaaccatgcattctgaacggatcagaatcggagatgttgaccgcctcaaaattcgtcccagctatcgcatcgttgggcttgaacgttaacaatttggacatcgttgagagaatcttccagggctgtatctccaatgtaacaaagcttgatatggtcgtccatcaaccgggagtgagtttgctggaacggatggctccccaattgaagattctgaagttagaagtttatgaaggagccatcgaatacgtgcttaacctgcgcttcccggcactagacacattgtcgcttaagctgcatgcatcgtcatacaaagactccgtattttgtgactttttgcttggctcccaatcattgaagacagcttttctagttctccggaagtgcgaattcaaggacgtatttcccgccataaccaaaagccttccgcttgttgaaaaactacaaatcgtcagcgatacggtgacctcgctcgaaggactggagcgtatgacaaatttgaagtcgaatttctaccatctgagaagagtaatcatcctaccgtcgctcagaagcttggaggtgaacaccaaatgggctcttccggaggaccttacccgtaaggttgctgcagtgaataaatcctgtgcgctgatactgaacggagatattgtcgcgccagctgtggtagtccgccgttccgcagtgaaacgtgtaaagcctagcgtttgattcggtttggatatagagtaggaaggtaattttgatttgattgtaatatgtacattcccaaatgtacaagctacttgatttaaccaatagtgtcgatgtttaagaagtagccttttaatctgtatcaatgaatgtctagctctttttccgtttcaataaatgacttgagctgttt

SEQ ID NO: 955 - DNA, 1712 bp, Aedes aegypti
gttgctttaggtcgcaggatcggattctacaggttttgtggagacattggtcgagggaatttctcacgcgttaagcttgcggtacatcagttaaccaaagataaagttgcaatcaaagtagttgatactagtcgtttagatgccaaagctcttcgtatgctttcaaaagaagttagcacacttgaagcagcattccatccatttattttgaggttatttgaggtgatagacaccataggaaaaatttacctagtaagtgaatggatacccggtggagaactctacagtagaattgtggatattggtgcactagaggaatatcacgctgctgttatattttatcagcttctcatagctgttaaatacttgcacagtttaggatacgttcatcgagacataaaagcagagaatattttaatgataaacgaagagagaataaagctcgcagattttggttttagcactcaattaatcaacggttcaaaccaacatttggatacattttgtggatcacccccatatgccgcacctgaattattcagcgatgatcactatgtaggaggacctgtagacatatgggccttgggaatattactttattttatgctgcatgcgaggatgcccttcaaaggatcaacgattccactcttgagaacagccgtattgaaaggagaatatgaaatatcgacatctcttagtttgtcatgctgccgacttatacaacgtattctggtaaattcacctttccgacggccttcaatggatcaattattggaatgtcaatggtttgaatatgtccaatcaccagttatccagaaaagtcgaaattgttccaacgcaacaggtgcggaaagtgatatcagtgaggttcctaatagacgtaaacaaatattttgtttgttttccactagaggccaatttagatttcgatcatccaaaaatgtaaacatcgtagctgccaatcaattccaaaccaccgtttcacaaataaacactagtaaatgtagtaccaaacgcgcaaatagtgtattagaacataattttttgcatccgctgagaacagaaaaaacagttgaagatttatcagaagaatctgctgctagtatagtaaaaatgcatagtgatatagacgacaactcgcaaaataagcggaaattttcttttagaaaagtagtaagaaaacgagttagtccaatagatattttaaatgaacgcaaatctaaaacaatcaatactgaaaaaaacatttcaaaacatgattttagaatcattctgcaggatttaatagtcggatggcatggaaagcaagtaatgtatccaagtttgaattcgagcaacattttaccactggaatctgaaacaaggagacttatggataaactaggtatatctgctgatatgctggaaaaaacaataaataatgggccacgtagtgatatattaggaatttacagaataataatgcaccgtcttcaaaaagaacagaccatcgaatgcatatcaagcaatgagatccaatccgacactaggaataatattagttgttctactcaaatgaaaaactgggaaaaaagcgtacacactaagcccaaaaaacaaactttgagtactgttacatgtgccatactataggtataaatagttgttaatgtattattgttcctcgttgtaaaataaactagatttttcatttctttgttttattaccaatc

SEQ ID NO: 956 - DNA, 4525 bp, Aedes aegypti
tatcaacaataatatttatatacagtagaaacacgcacggtattgcaatgtttaaaaattttgtcacaattcacgtgtagctttcagcatttaaagcggcgaacaaaatctgaccggtgtccagggaagatgcctcccaaatctctgaaaaaagaaaagcccatctggtggaagtgcgaacaatgtcggatcacagttcttgcggtagaattggcaaagcatcagctggattgccaaaatctggagcttctcagtggattcatcacagaaactaatgagttccatagcacccgtttggagtgtggcaaattgaccgcctgtgaagaactcaaggacttggctgattggcagttgaatggcttgattatactgggaagtgccgtgatgagtaaactaaacttggtactgggagatctaattcaagttggttttaaaaattcagacaaaacggagaaatgtaccataattagaaccgtttggccgagcgacgaaaaaggttctcgggttttatgtactcctctagatgaaatcgccttcaataataacgtttcagtttgcataaaaccgttcaagaaaaagatcccaaacgttgatgttttaacgttgagcagtgatctgaccgatgctgaggaaatctgcaaaagtgaacgaacatttttgcaactgcttcaaaggcaatatcaggaacgtattctctcagaccaaaatatgctgtatctcaggctgtgcaataaactgtacgcttttaaggtggtgaaagcactgctcgtagaagatcaggcatcattggttagccaactcgagcacatgtcgattggattgcaacattttaaaatcaatgccaattccaagatcgtgataacacgaaataacgttgcagattccattagtacgagttcaacaaaattcaatattaccaatattggtggttttggagagattatcgttgagatcaaacaaataattgaagttgccttaggactaaccaaatcaacattacaagcaccgatcagccgagggattttgttgtatggcgtatctggaactggcaaaactatgctcgtgaattcactggcgaaccatttcaattgtctcatagtcaaaatcgactgttcagaaatattcagcaaattctacggagaaactgaagcaaacttaaaaaagttgtttgataaagcaatcaacaattatcccaatccaaccattgtcgttatcgaagaaattcataacatttgtccaaaaacagaatcttcggacattatcaagcgtatttctcacttttttgtcaatcttatggatagtttgcatacttcgtcaaaagcatcgagaatggtcattctaagtaccacagataacccagataatctccatccatcgttgagaaggggtggtcgcattgactatgaatttgaactgcctattcccgatgcacaagcccgagaagaaatattgtggaagattctggcgttgcacaagcatagccttcaaatggaagacgttaaaaaaatttctctcgtaactcatggatacgttggtgctgacttggttagtttagtaggacgggcaatacacgaaacggatgcggtggtaaactataatcatatggagcaagcactacaattcgtaaaacccagtgctatgcgtgaaatattaattgaaagtccaaacatacactggtctgatattggtggacaacacgatcttaaacttcagttgcagcagataatcgactggcctattcatcgcccggaaatctttgcacggctcggaattagcgctcctcgaggattgctaatgtttggtccaccgggatgctctaaaacaatgattgcaaaggcgattgctactgaaagcaagctgaatttcttgtctatcaaaggttctgaactgttctctatgtgggttggagagtcagaacgcgctgtacgtgaactgtttcgaaaagcaagacaagtagctccgtccataatattctttgatgaaatcgatgcaattggtggtgaaaggtcagccgaatcaggaagctcagtaaaagaaagggtgcttgctcaaattttaacagagattgatggcgttagcgcgctgaagaatgttaaaatcgttgcagctacaaaccgaccggatttgatagataaagcccttatgcgaccgggacgacttgaccggattatttacgttaaattaccagatgggcagactcgtaaggaaatattaaaaataaaattatcgagaattccagtagcggttgaggtgagtattgatgatctggtagacagcacagacgggtactcaggatcggaaattgaggcagtttgtcaggaagcagtattgaaagctttagaagaatcattcgatgcaacagagatatcacgcaaatacttcgatcatgctttgatggtagtaaagccgcgcacaagtgtagaattattgcaactgtatgaagaatatctgaaaaagcagagacagtgaccaccaacgacaattaattgagaaacaatgtgtgaataaaacataagcggtaacaaattgaaatatatgtctgatgtgttaattcattcctccttgcattattccgcttgcgttcgtctaactaacacaaaagctggtgcatattgaatccatttcagtaaataatgtggaccacacatcaaaaaggtttactcttcagttccatctcataagaaaacactatgtaggtgtgaaaaggttcgatgatacggcaattcggatgcttttaacacttttgcttcacgctacctgcttatccaaacgagaggaatgaacatctgatatattttcggatgcttcaatcaattcgtttaattggactgcaatgttacagtaataaaactcggtaagagaagacatggaattaccggatgaagggctatttgtacaggtacaaattgaggactcgattgtgtgtgatatttcaaaattcacttattaatactattcttttaagattatcattctacggttgtatcatctgcatattcttcttcttggcagaagccccaacttggacagagtctgcttcacagcttactgttccatatgtaagtacttacaccacttacacagttatgacttaatattttctgcgtcaaggttaccattcttgtattatggcaatttccatgtcctggaaaagggtcgtacattgattacgtgaaggggaagggggttttcaattacttatgcgtcatgcttttttttcaatttacttacaatatatcttaccataagattaaggcagggtggcgggaggttagtagttaaaaaatctcaaaaatcgtcttacataattaatggacaaccccgaagtcgtaaattatttccatttaagggaagatcctggaccattgagggaatcaaacgcacacacggtgctggcgttgctttatagtcgcggatgttaccacaatctctttattcacattgttggcgtaacaatagcatcacaacaggataaacattcaatcttaagtgtctaatccaacgcacgttgctactgaaacaaattgggaattaacgattgctactttgcatctttcttctacacgacgttattcacaacatcgctaggtttagaggaaagaggttcataatacaccatgcgcaaaaaatttcacccctacaattttcaaaagtactttcagttatttccacaattattacaaaatctaattattcgttttagtattttcggcgtgatcataataatggaataatcgcgcagtagacagcaaaatgatttaaattaaatgcgaagaccttaaactgtttttcatgtttacattttttcacattgcggatgtgatttttagttacacttttttggccttgtcttcttacttagtttttttttcacattttgtttattacagactgaagcatgaatctaaaccatacttataaaaagctcatttgaaaatgtgtttgttattgttactattaggttgtcttcagcagcattacacattatatggcaagttatattttttgcaacgcgtcatacgattaataactctgctaaagatgtcagggtctgtgtactgtataattctttcctctttttgacttttttatttttattttgacattggtgagagagaaaccccaaaaaaaaaaacagtataacgtattgtaacattgccatttaaaacattaaaaatacattgcataatattgtaaaaattatgatattgagttttggtatgaggtttttacaatataacgtacggactgttaagtatcataacaatacacatatcgatactttctcatacttagagatattcatttttatgagcagcaaaattgagcagattactgtacaaataacaatttgtatggtattcaattagtaacacacagttaaacaaattgtttatgtattgttttgaagtgcaatttgtgtattgtattgtattagaatttgtattttaaatggattgtctcccaacctatcggatattagtgccgatcgtagcaaaaggattttaacttctatacaagtaaa

SEQ ID NO: 957 - DNA, 2443 bp, Aedes aegypti
gtggaagtgtttggcttatcctgtaacgcgattaagaatcaactgataatacagaaaaatttgatgtattagtgattgtttaattgttttatttttcttgttgtttcatttccaatacataatgcgattatcgatcatctcagtgcttgaatcaaattttacgcagttttgggtaacacaaattgggccaataattccgattcaatctgaggcaaaatatgtcaacgtgtatcggcaggggaaatgtcaaactagtgtttttgtttttattattgtatcaaccgtattaaccagttccagaataacaaattatctatatcaagtttcaatactacatataactatcaaatatcagcttaaacagtttaattaactagttcttgaaatatgagcttagaacactgttgtagattatgcttgaaaagccttgccgacataatgttcgttgaagatagcgaagatagttatttttctctggccgacgaccgttctctgcaacgaatgattttggaatgttttcagattcaggtttccgatggagaaatcgtgtcgaaagtttgcagtcagtgcaatgatgaaattcgtttagtccatgagattcggaagcggataaggaaaaccgattttgaaatcaagcagtattatgcatcactagcgataaaagatgaagcagagtatgaagctgacccagtcgaaatccaagaaaatgagcagattgaattgattgagatggacgatgacgaacgtgatggaaatacagaaatggtggcaagctttggagaagaaaattcagctgataacgataattttacccaaaaatacgaaattattgaagtagagcctctgctaagatatgaccaaaacaccgtcgaagaaccaactgaaatcaatcacgaaaggaagcatatacatagcgtcatacaaatacaacgtttgaaaaagccatgtgatcgtaaagtacgcaaaacagttgactgcaagtgttacatatgtgctacagaattcgacactaccgaaatgctggacagtcatcttgcaacgcacgtcggcaccagcgctcagaaatgcaatctctgcgatttccctataacgacagtgcgatctttgaatatgcacttgagaacaattcactttaggaaaggaaaacgtattccttgcgaagaatgtagaaaggataacaaggtacgagaattttcgtctaattttaaactgcaagcccacattaaatcgtaccatgaaaaaatcgtagaagttcaagagaaaaagcacatttgtacttattgcggcaaggcattctcaagagggactcatctcagaatgcatgagaatatacatacaaaagcaattttatacaattgcaagcaatgtccatttgctgcaacgtcgcgatctggattgttaaggcatttacgtatacatacagctgagaaacctttcaaatgtgacgaatgcgatgcatcattcaatcaatctaatgcgcttcattctcataaaaccgcaaagcattctgatgaacgaccattcgcttgtgatatttgtggaaacgcgaaacggttcaaaaccaaatacatcctccaaagtcacatgaagatgcatgagaaatcggacacagattcaatcactaagggacggcgtgttaaaacattaggaacagaaataaccgtttatgatcctgaactaaagtgcagtttctgtcctgcagtgtattataaggaagtgttcctttgccgacatattgtagaaaaacatccctcagaatcggtgtcaatgattccttgtgatgattgcaatgtaacaaataaaaacgtatttttcctgacacaaaaagaaaaaaaccgtcatgttgaaaagcatgaaaagacgaaagctctacctgagaaggaacgtctctgcaatgagtgtggaaaaacattccaaacaagcactgcatatcatcgacaccgtcaaactcatatcgatatcgtatgcaaagaatgtggaaaatcattttcgaccagcagaacattgagacttcatttgctaacagttcacctaaaatcccgaccatataaatgtgacaaatgtgaatcgtctttcggacaattgacttcgttgaatgcgcacatgaaaattcatcaaaaatagaaataaaactggaaaatggttttccaacaaatatatgaaatgtatgcttgttttattattttttctctcaaattctcattgcttgttacacgatatacgaatttaaacatagtaaattggcgaaaaagctcttagttattgatgtgatagtgctcgttgaagcagtagcaagtatctataagtaaataaggttcgcaatcgttataccaaaacagaaggtgctgataatttaagaaacacttcactcaaagcgttaaaagctataagaaatcatggaattataaagtgtgttataaactatcgaactgtcaaattttaa

SEQ ID NO: 958 - DNA, 979 bp, Aedes aegypti
atgagtgcatccaaatcccgcggaaaaaactggagtgtagaagaggacgaagccctgtgtactgcgtggttgaatgtatcccaggatggagcaaccgggacgtatcaaaaacttgatacactgtatgaacgcatatatgagatgttcatagaaatatgcaccgagaaaaatttgtcttgtagcgcagagttacgagttccaagcggactgaaagcaaggtggttgctcatcagcaaagcttgcagcaagttttcgggttgcgtggcgcaaatttctgctcgccagcaaagcgggaccacacagtccgacgttttcaaacaagctttcacactctacaatacatcaaagaagagtccgttcagtttgctgcacgcgtacaaaattttggagtgtgctccaaaatggaagcagtacttggacattaaggtggcggcagttaactcgtcgaagcgtaggcagtcggaagaaaacgaggatgatgaacccatttcaacggcatcatccagtcgtccaatgggccaaaaagcttcaaaaaagttgaagctgcagcagacaccaaatgcggacattggagctgagattgtgaaggcgagcaatcttctggcaaaagcagccgaaaaaaaggctcttttgtcacgagaaaggacgatgaccataaataggatggcgaatcatgccataatgtccgtcgatttttcaacattaagcgatatcgcaaaaaagtattacaaaatagaacaagaaagaattttggaagaagcaatgccagaacacacagcaacaggttcgttggacgcaataagatgcgaagaagttagcgacgagcctgacgaggaagattttcagtctcaggagatgcagtatcttgaatacagtacggagagtgagtgatcaaatgattgtcaatgggtgacatttttttatttaattgattttaatttgtttttacgaaaattacagtattatttcgttattcgtt

SEQ ID NO: 959 - DNA, 1412 bp, Aedes aegypti
atgctgatgtcgttgaaaagtgcggtggtgctgtttgtgctactcggagcctgccgaggagtaccccgtgatggctacggtcccggaaagcaggactggggcttcgtcgaggtgcgcaagggagcgcacatgttctggtggttgtactataccacggccgaggtggaacagttcaccgatcgtccgctgctgatatggcttcagggtggccccggagcctcctccatgtatggcaacttcgaggaacttggtccgctgaccctggagggtgaaccacgaaatcacacttgggtcaaaaactacaacgttctcttcattgacaacccggtcggaacaggattcagctacgtcgagagtacttcccttctaacgaaggacaacgcccagattgccgatgatttgctcacgttcaccaaggagttctaccggttgaatccggagttcatgaccactccgctgcacatctacgccgaaagctacggaggaaaaatggcaccggagttcgcgtgggttctggacaaagccatcaagaatggcgaactggatatccagctggagtcgatcggtatcgtggccccgtgggtgtcaccaattgattccgttctttcgtggggagaattcctgctcaacatgggttttgtggacacgaaaggttaccgtgagattcaggcggccgccatccaaactgagcacacgttgaacgaaggcaaatacgaagacgccacttggcagtggggtcggaccgaagaagttatcgtccgggaaacgctgggcattgatttctacaatgtgttgttcgcccaggacttccgggccacgcaatctcggttggcaatgtttgctaaggacatgaagcaggccaccctcgaaagcgcagttcgcctggcctccgaggatcgtgaccagatgctggaagatttgatgcgtggcccagtggcggaaactctgcaactcccggcggaatccgtgtacaacaaacaaggtggagccgtgttccagagtatggctggcgattttatgaaaccggcaatgcatgtcatggaattgctgctgaatagcaccagtttggaagtggccgtcatcaccggacagttggatctgattgttgccactgctggcaacgttgtgtggctggagaaacttcaatgggaaggacgaaatgggtacctggccgcaccacgaaatggaatcggtccgctcggaacactcgaaggctacgaaaaaagctatggaagattgcacatgtactgggccctgcgagcgggacacatggtgcctgccgataatcctgtcctgatggattatattctcaagaagcacgccggttttcctgaagactaacactcaactaagaatagaacgaaaataataaataaattgatatttctatacaactaataacgtactagctg

SEQ ID NO: 960 - DNA, 573 bp, Aedes aegypti
atgaaggcctttgtgctgggatcagtgctgctggtggcttcggtatgctccggatcgtacattcctcacgatactcctgaagtggccgctgccaaggctgctcacttagcggctcatgctgctgccggaatcggttcaagcggccatcactggaatcaccacgaagcctctattcagaagtggcacggaccgatccacattccaaagatctacaagggcgtcccagtcgaaacccccgaagttcagcatgccaaggcattccacgctgccgcttatgccaaggtcgccggatacgctcagcacgatgaccattatggtggacatcatgacgcccatcatgtcccagttcatcatgaaggcggagcctggcacggacccatccatatcccaaagatccacaatggagtcccagtcgaaacccctgaagtccagcatgccaaggctttccacttgaacgctctggccaacgctggtgctcaatcctacggaccttcttcttgggccgaacacggtcaaggacacgaagatgatggctcctacaaaccccatttgtatgagtccgaacagtactaa

SEQ ID NO: 961 - DNA, 3010 bp, Aedes aegypti
gttttgtttttcgagcaaagtaactaacaaacagctgtagaacagtaaaacttaaaaaagattcctatccgtatacgcgttaaaagtctccaccggcagcatgccatgcgtagttccgaactgcgacccgaaagggcaatgctttgcgttgcgttttccgcaaagttacctcctgacgaaacgctggaagaaagcaatcgagctgggatcgggggaggctctggcggaagatgtggatttgcttgcggcggaagtttgccagcaacatttcgtcgagttcaacgactacggcgagccgatcgttttcaacagtgaggatacgaccagtaatattcaggaaatccgtctcgcctgctgcggactcagtaggaaattcactctctccgatgaaattctttccgattgggaagaacttatcctaggtgatcggagcatcaaagaactattgaaatcggtaggcggaacagaacgttcgctttctgcagattatgttgaaggtatttgccagccatgtttggttcgattggatttagtagctacggtcactagagagatgtcaacaaatgcaaagattagcagccaaatggaatcatttattaaagcagaaaagcgagcgtggttcaagtcttctagatctacagaaaacgattcattgcagccaccagcgtcatcttcaatatttactcctatagtagagctgaaagttgaagaaccgggtcaatctgaaaatatgggcagtagtctcactttaacatcgaaaaattccagtagtcttgaacagatcgcaagtcgtacaagaaagaatgtttccaaaaagtcagtgatctcttctacatgcaatgactccgagagaagcgaaaagaaagcaaaagcatctcttgtgaacaaaacttgtataaagaaacctaaaaggcctctcacattcaaggatccaaataaaaagcctaaagaaaaagtatacttgagaaagctaaacaaccaaaaatgctatatttgcatgaagatgttcgaatcgagcgatgctctacaagcccatcttcttgaacataatgatacaaccctggtctgtaaagaatgtggtgagacctgctgggatttcataacttacaataggcaccttgcgaagcatgattgcaacgaaagaccgttcaaatgtaagcactgttacaaaagatttgcaagaccaaacgcaagacgtatccacgaggcagatattcataatgatggtaaaaaacgtattgttaaacgaatagaacgagcctacacttgtcaacattgtggtaaatcttgcagctcgctagctaatcttaaactacatgaggatgctcacgcgggattgaagaagttcaaatgttctatctgtgataaatggtttgcgaaccgctctaccttagaacgacaccatcgcacacacacatcgttgaaaccgttcgtgtgcaagatttgtaacaaatcctatcgcttatcttcattctacgagcagcatgttaaagagggttgtcatccaagcgcttcaaacaaatgcaagctctgttcaagtgatttcagatttcatcaggatttagttaatcacacccttcaagaacattccgacgaggacgtaaaaatttaccattgtaagatttgcgatcaacgtttcattcaaaaccgtctatactatgttcatatgacacgacacgacaaaatagcgagtagaaagtaccaatgtcaacattgcggtaaaccgttcgcgtcagcgttcgcggtcaaatatcatgagttaacgcatacccaaaaggatatctacaagtgctcaatgtgccccaaatcgtttcaaaatgcaagtaacttgaacagacattacgaagggattcacaagggagacaagaaatatcagtgtgatatctgcgaaaaacgatttcagatgccgcacattctggctacacacaaacgaatccacaccggagagaggcctttcggatgtgagcagtgcggaaaacgtttctccgatccgagcacactgtggaggcaccgtaaaaacgtaccgaagggtaagttcacctgccagcactgtggcaagcaatgcatgtccatgtcgttcctgagggaacatgaggatgcccacgccggtatcaagcgacacgagtgtaaatcatgtggtcgactctttgccaacaagaacaatctcgagcgacatcatctgatccacacgtcggaaaagccgtacaagtgtgaagtttgtggcaaggctttccgtcagtcgcctatgtataaggatcaccttcggttacattccggggaaacgccgtatgggtgcaatggatgtgaacttcgattcacatccgccaccctactaaggaaacacaaaatacgttatcacggtgcttcctcggcgcaagctcaagttggcctggctgctcctcgcgcccagaattactgtcgcttctgcaccgccacattcaagcgacattcgctcctggtggaacatatcctgcgagcccatcccaacgaacaggttgacttcttccagtgtcaaacatgcgagcaacgattcgtggacaaactagttttcgatatgcacgagcgcaatcacgagaagaacttccagtgcgggttctgcgacagagccttcagctcactggaagccctgaaagcacacgaaccgatgcacgacggagttcgcggctacacttgcaaaacgtgctcgaaaacgttcagccacgtggccaacctgaagcgacacgaattgctccatcagggcatcaaaaagcacgaatgcgacttctgtggcaaacggtttgcgcagtccaatcagttgcacacccatcggagaacgcacaccggggagaaaccgtacgagtgccaaatgtgcggcaagcggttcgctgacaatagcacattgtgcaaacatcggaagagtgtttgtaagacgagtgcagctgtggcagaaacgggtacgtagtcattttgttttatggcttgacgatgtgaatagacgatttcattgataacaagttggtgcactgatccg

SEQ ID NO: 962 - DNA, 4351 bp, Aedes aegypti
atcatccagcaacgtttcctgggaaacaaattaataaattattttccgtgttcggctgcatggacacattacgcatggagctctcgcgcgcgcaattcgatcggcccgcgtgacgttgaagaggaaaatcgaaaacattcgaaacggactgttttttcgttcgcgatctgtcaacaaaatatgcgcctctccttcgcatcgcatcttgatgtcgcggaagaaccgtgttcgaaaagtcaaatccacggacgcggacgcagagtgtggaagagtggccagcaggagaagagcgaatcgctgtgaatatcgacgagggggagtagcgagcaagtattccttcaaatacacatcgcatcgcgtagaagtagcagcaggccgcgagaaaaagacccgccgaactggactcaagttgtagccctagcatcgtttgacggacatttttgcataaaaagtgcaattttcggaacggtcccgtgcgtccgggaataatcgtatcggaacagaaatagtgcccggtggtagtgcaaatttttaccttccagtggacgtttaaatagtggaaatcggtcgcggttcagtggggaaaaagctcgctggaaaattgtgatactgcatggggtgcgctttttgcggatcgccattttgaacgaattcggttttgtgtggcgctcttgggttttgaaattactgtggtgcagtttgtgaaaagtgggctcattggaagctgggattttaccttcggatcaggtcgatagcgggagttcggtttagcatatttcccagcgggggacggttcattatccgggtccgccaggatggcccaccagaacaaaccggtcagcatcgtgattcaggataccaatggccaacaacaagttctgcatgtaatgcaaacggcatcgactactggccgcccacttacgtcggccagcgtcaagacgatcgttaaagaagtgaccggacaggatattacaggacagacttttgctacccctgttatgcagaaactagcgcctggtcagaaattcatcacagtgaataatccaaaattacagatcgtaaattcatcgacagcgaaaagcgtcaatggtaaaccgctggtgcgattctcaccttcacagttgggtcagctcaaactaatcgcggctccaggacaactcggaggaacgcctattgtcggtaagaacctaaccgccatgctggcgccctcctcttcgatgtccacttcgacgtccgcagtgacggggcaaatgccgtcaacgtctttcataagcacaaacttgatgaccagcaattcgacgccggttctgtcgacttcgtatgtgtcccaagcgcagtcatctaccatggtggccacagcctcccatagtaactcaaaaggatctcacaccccacaccaaaaccagcaccagcaacaacacctgcagcaaccacagtacaactacggcaagaaagccgcctcagcagcagccacggccactgccaccagtcagattcacacgccggcttcgcgacggagaaagactgacaagatcggccgcggcctaaggcatttttccatgaaggtctgcgaaaaagtgaaggaaaagggcaaaaccacgtacaatgaggtggccgacgaactggtcgccgaggaaacccaaagccatccgggagtcgatccggcttcgtacgatcagaagaacatccgccggcgggtttacgacgctctgaacgtcctgatggcgatgaacatcatctccaaggagaagaaggaaatccgctggcacggattgccgaccagtagcgtgcaggagtgcgacgacctggagaaggaaaacgaaagggcccgcgaacggatcgagatgaagcagcagcagctgcgcgacctgattctgaaacatgtggcgttcaaatcgctcgtcgcccggaatcaggaaaacgaagaccgaggtctggtgccgaacccgaactctgccatccaattgccattcatcattgtaaatacggataagaagacttacatcgactgtagtatttcgaaagacaaaaccgactacacgttcaaattcgataatacattcgagatccatgacgatctggaggtgttgacgcggatgggactgctgctaggtctagacaaaggaaagtgcacggtggaagacatctccaaacttaagtcgatggttccaaagtctttggaaaagtgcatcgaagtgtacggcctcggcatggagaatgaaaccgaagactgggaaatgggttcgacctacacgggtggcggtccggattgcgatgacagcgtccaggatgctaccgatctgctgtccagctatcaggacaacaccagcgaactcaacgatgacgacttgatatccgaggatggacaggatggttagagcaaacctcaatccattcgccctgagcaaggcgtggtctggacttcgccacattgtcattgttacgaaatccttcccggtagatattcgaggatgttgtagtttagatgttcgtgagcgctctccatgtacgcatgcactcagccggtgtggaaccccatacaaagtggagatggatttcgttttttttttatttcattgattgcttactatttttatctttggattgattcagttaaggtaggtagaatgttgggcaaccttatgtcataaactcatgtaatctccgggaaggatgagtgcaatgcagtgctaaaagtgagtaggaaacaacgttttctatggacagcgtatgcgagaatggaatgtagcatggttccaaaagtgctgatgttaatagtaagacacccaactaagaagaacatgcatacaatggagagttacaatagcacgctttccatttcatcaattacaaacaaaaatattattcctaagcaaaagtgcaacacgcaaaactgaaatcgttatcgttagaatctacctattgcagcctaagaatgtccttaaacggtaaggacacactggaatgagcaaatgcaaattcgatggaaaaatgggaatgattgtttctattgtaagaaaataagaaatgcttgatttactaatgggaagtgcagcgaagatgaattgattggttggcctgaagaaagtaaaaaaatcggataaaacccctagttaattatctaatgcaccgaagagtacagaagaatcgtttacatttgacttgctaaataaccatccagtactaaaaaacacaggtgaaaatatagcttgaatgcagaacaaatgttctcaactaggaactaaacggaacacgtacctatccgaatcgaatcagaggcaccctttgtgctctactggcagacacatcccatttaaataccagaaaacatctcaggcttttatttctttttacaatcgattaatcaaaagtagttttttttgcatcagcaacaaaccatagcttatataaggaacaaaaatcatacttagtaataaccatgaagcagatgttaattatagcaagccgtaagtgtcatatttttcatactgttttacgttttacagacaatatttccttaattttgttgtagccaatataaaaaagacattttttcccttcgtttaacaaggtaacgcttttcgatctcatcagctatcatccagcatcgtaactcgcgctgatcccctttcccatcgccattcaagataggcgtaaaagtaaaaaaaaacacgaacatcattattaatcaactcctattgtacataccggtcgaaaaataattataatctatttctcccaaaatctgtaaaactttattcgaacgcaaatagcacacagatagataacatactcagacacaaacccgcacgcaagctgaacagcggtagtggatgttttactgtggaatacaaacaaactaaacaactaacgagaaataagaaacaaacattgcttaacttttggccgatggccaatgcacgacagagacacacaaacatcctaactattggtaatgtcgcactgtacaactctgaaaaattgtttctactttctatcacatggaagatgcaatggtaaaagaaacccctaacgctatccgaagtaacgttttgttctttgtttagtttatattagtttacataatctatatagactttattttttattttcgctactgataaccgagaacgactgtttgcactgattatcatcggaagtcgaattacgattggctcccaggggcgagagccgaacctttcacccccactagatatatgtgtagtgtaaaacttatatatttttctattggttaagcaaaattttacgttttatttttattttttgctagcgttgcaattcgtgacggtgaatgatgaaatctgacattaaaagtatagaagtagttaaa

SEQ ID NO: 963 - DNA, 4861 bp, Aedes aegypti
atgttacttgttgttgcaaattggtctgggcgggtggacgacgtcgacgaagacgacgacggggcgtttcgcaacaatgttacacttcattttcgaggccgagagagagagagacatggtctcaggtgtgtcgctctaaacagcgtgcaagggccaaagaagaagcagctgaaaatttgtttattgcttcagaagcgaagaaaaatgcatcatcatgtttgcaagttcaaggttcaaattgatcgtgatgaatcgaattgctttttttgggtttatatcgacaagaaatatgattaccgttgccttcacagtttaatacccacgtcattattgtcttttttccacccatccaccgtcaaatttcattcaattgatgtgaatcttcctctctgtgtttgccccgaacaggaatggctcgagaagcaaccgctggacgtggccgccactgcgccgatcctcccgggatccgcccccacgacggattgcgaagcatccggagagtacaccgattccgactcgatcgctcgcgacacggacagttcggagggcctggccaactccgttgccacgtgcctccagggcgatcaaacctcgcaagagatgctcaccgacaacgtatacccctcggaaacctccaacgtctcgaacgacgaagtcgaatccaagaacaactccaactcgaacacttgcctggtcaaacggcgggtcaacaaatccaccgccgagaggccgtggtccgtgtcgtgcatttcccagctgaacacgtccgccgtggagatcaaccagtacggggagaggcgcgagacgcactccaaccaacggctgacggcgagcttttcaattagcgagtctgcgctgaacacgatgtcgccgatgcggcccgggacgctgaagcagacgacgagcagcggcaatgggagccaactggcggtcaagagctcggacagcaagggatcgctgaagaagcggaagctgcgcgcgagacgcaagaatcgcatcgacgagtccggttcggatgaatcgcaaccagcgcagcagtcttcaacgttgcaccttctacagcactcgttaatcctgcagcaccagcaacaactgctccagcagcagcaacagcccttgagggaaattcaactatcggccggaagtagcagtggaagtggcggtcgccagcagcatcatcagcatcatcagtccagcagcagtcatcgagggggcctcctgaagtcggagtccttttccggacggattcggctgtcggatgacttggtcacgctgtcgtcactgtccgggtcgtctggatcgcgcaaatcgtcctctgctcggcagacgacgaggtcaacggccatgacgacaatgatggccaccgtatcgacgaagaaatccgctccggatagcgaagaggaacatcaacagcagcaggcactgatggcgaagccaaactttaagatcggttccgtcacgcgcgctcgctgcggcagtctcaatctaggatcattagccgcgttggctaattataatctagatggtgtggagcggagtgaggcggacctcaacggaacgggaaccggtaccgaggagatgagcagcttctcggagcaagcatgggacaactaccaggagaagtacatgagcgaaccgtactcggaggatcgggacacggacgctgcccggcggttgctggactttggagacgattacaggaatttcatcgattcccagtcggactgtgcgtcgtcgtcgctttcggcggccaatatggactcgttgtcgccaccgcgattccgaaagaacgattcgctcagcaagagttccgagccgaacacgaactcgctgaaccggcggaagcgattggacgagtaccggatggatgatcgctacagtcacaacatgaactcgtggtccagcaagtcgggcagcccgccgcatcattcgctggacaagacgctcacctccagtcgaggcaagcaccacgtcctgtacgaaagtcccgatcactcgccgagtggtagcagcggaggaggtgccggagtaggtgccctcagtggaagtggtcgtcggcggtcactgcgctcggtggacaaacacaactcgttcctgcggtcgctatcgcacgagaccagctccagctcgaacaacgagttcgacgaggacatggaagcggagatgaagaagctgctgatccagagcaagctgcggctggccaacaccgaagcgctgaaagccaaatcgcacctgctgaagccggaggactatgacgaaatcatcaagacgtgccgggagaacgttcgctgtctggaaacggtgctgctgtcccagccgggaaccgtactgacggcggccaagtgccaagacttgcgagatacgatccactgctgggagaagttgctgagctggagcgaacggcgacagattacgacccggttccaggcggagatccaatcgctgaaggatgtgctggaggatttgggcagcaaggcgttcgacttctcgtcggaagcccacatacagctggccatcgatcagctgaagaatgaacgcaaggtgctccagaaccagcggcccaagatgctgaccatgaatgccgccgtgcacaactgggtctcggcccaggaacagcagcgcaaggaactgctggacgattcgagcatcgacgcccagatggaacagctcgaccgggacaaaaacttcaccaaatgcacgaaccagaagtgcggtgcctgttacgattgcctgaacgagctgcgcgaggattgcgcgatcaaccgggacctgaaggacgggattagcatgctgtacgccacctgggacgaggcggaagtgaggataaggaaccgaatcgagaacctgtccagctcgatgatgacgtggaagcagctggaggacggtctgagcgatttcaaagacatcctcgatcgggaccgtggcaaacttcaggggatcgaaggggccctgcaaagcggggccgggaggactgacgaaatggtcaatagtgtcaaggaagttgtcaaagctctgtccgagaaggctgagccgctttttcaggagcatgatatcgccgttccggtcaatcttaagctctcgtcgagtgggtctctttctgatagtggcatttccgatggtggtggcatgtctgatggcagtctttctgagcgggagaagcgattgagcgcactgaagaggctggtcaagcagttggaagtggccctcgctccgggaagcgaagccatgcagacgatcaccaagcggctggaaatggccgagcacgatctgcgctcgctgcagaacacctgccggaagatcatcatgaacgagaagggcggcgacgagggcgggagcagaaacggtggtgagagcgatcggggagaaagcagcaacaataacgatgccagtgtgaagaacaagaacagaaccaagggaagcaaaaagaatcgcaactccagcccggcgaaacccgatcggtcccggtcccgatccaaccaatccctggacgaaacggactcggaagaaacccgtctgcacccggaggtgcaaacggaaacgctaacccatcagcagcaacagcgtcaggaacatctgcagcatgccaccgccacccagttgggtctgattcagaccaccaaaatgaagctgtcccagaaccggtgggtgtggcgaatcaccaagattgccgttccggtgcagttggctctggtgctggtcatgtgcgcggcatgcttcttcgaaccgcactgctgcgatgccctcaatacgtactcgatgagttttacgccccagttgcgctacatcaagggacctcctccggtgtaattccggatccggtcgcttaacttttccttcgcttcggcgaggggaaaatgaaatgttttttttttctgtttgtttatggattttacgcggataattttatatcctggagatatagaatagttgtgcattactgcctagcatgtaaggaaaccactttttaatcgcaaattatttataaagcaaacgtaccgcaatattatccttcgtcaaaagggttcaatatttcaaaaatatttgtaccataccactaacttcgttattttataggaagtgaagaaaccggagtgctcttagaaggtaaacttacactgtttcttatttcactaggtttaagatgaatgaaagtacgaaataggtcagaatcaactaaacgtatcatatggaaaccgtcgttgggtgtcgaacaatgatcggagatcaggtacccgcgacaaattgccgccatgcgtgaacgagtgaaggcaatagctacacgtgtgtgccttcagcgtccagcaaaaccgattaccaaccattcttttgttaagcgtagatcattgttttcatattcgcattagctatacaaaacagtcctaatgaactcagcaaacagagtaaatgttcctccattaacatttatgagtaagacactttttcttgggcagtttccgaaaattaaacaagtgtactgttttccctgcattcaatgtgtacttttctaaccagttgcaatatatgtttcgcaaaaaaaaactacagaaaactgttgctattttgtacattttgggcgtttctatttactaatttaccttctaaatttcgatctttaggtgtatgtctaccgattatcagttgtaaatctatcgaatatcagagagctatcaatattttaacacggagaaatgtaaaataatttgtagaaaattactttcgtatttttggagggatagcatataaggagaacgcatttttagcgcatccctccggtaaatgtactactagctgcatacgtggagaaacttatggaagaaaaaaatagaggcgttcattgaaaatatatgtttatatttttaat

SEQ ID NO: 964 - DNA, 2073 bp, Aedes aegypti
atgtattttgcgatcgtttcatcactgcgaccgtcagcattgctaatttgtgcactggtgctcacgacggcgacacaagcagtcgtcaatatcgaagcacaacgtcgtgaggcaccaatcgccgatacctatggacttccaccctcgtcttctgccgcctcttcactggacctacccgctccagtctatggagctccagcagtagcacagtatccagctcctccaccggacattccacccccaatcgtgccacacaaagagtatggcgtaccggtacaaaactttggaccgcccaatatcaacatcgagtacggaccaccagctccagctccaaaacccgtgtactatccaccgaagcccatctatggcccacctccatcgcaagctcaccactcactgccacatcatccaccaaagaagcagtcttcgttccttgaatcgctgttctcgacattcggattcggaggcgaagaggcacaccgtcactctcatcaccaccaacaaccccagcagctctatggtcctcccccaaagcccgtctatggaccaccgaaacccacctacggagtgccgcaatttagtcaaccggccccaccaaagccagtctatggacctccgaagcccatctacgttgcaccgaagcccgtctacggaccaccgaaaccgattttcaccgctcagcaaaccttcggacatcactcctcggctcacgttcccccaaccccaccagagatcaagtgcgacggatggaaaccaattgccggcccagttgtccaaggcccaccaagccaggtagaaatccacgctccggaatcttcgtacggacctcctcccagtggtgacttcctcggcggtggccatcaggttatctccggcggtgacctcggtctccaattgccccgattggaacctggcccagcgttcaacaacgacctgcacatcggactcgaacagcaaaagggaaacagctttgaaattcattcgaacttcatttctgactcttatggagcaccaccgcccgattcgtatgccccaggtgcctacaagccatcgttcgtgaagccgctgcccccaccaccatcgccaccaaaactgcagttcccaccatcgccgatctacggagttccccaccgaccagcctcgtaccaacacggtctcgctatctcccatggatccatcagcggtaatttgaaaccatggtctggaccagttgcaccaccacgtcagcccattgcctaccgcccaccagtgccatccggtctcatcgaatccattggacacaccgttgaacagctggacaactttggaagcaagcctcattattccggagacgtgtatcttcctccaccaaccagtgacatcccaactgctccggtcgccagccttgaactgcatgcccttccatccgaacaaccaccgaaacctttcctgacccagcatcagttcccggtagccctggcccaggtgcagcaacctcgcattcccgacttgaacgttctgccaatttcttccaccgattgcggacatggtccagaactatcgggacacgtccacgagcaacagtcctcatactttggaacatcgggagcccaggcttacaccagcgaggaatcaaacagcatcgactcgagctatggtccgccagcttcgggagccgccattggagagtaccgcaccgcccatcaattgtccggaagtgaatccgtttccgcatccagcttgcctggtctcagcggtggactcggtggtcttgaactggtatccgcccagaaatcgcatagcctaaccatccccgtacaaggccagctgggatcctatcaacttcagtttcaagctgccaatcccgtcggatcaggacatggaggatccggaggagcccctcatgaacaaatcctcaccgaaggactgctccagtcaatcttgtcggccattgaacaaccacaatcgaacttccaacaggagtcatcctcgtacgatccgaacatcgatcacagcgaggtgtccgtgttcttgaagagtcccgagggtcagaaaaccttggctgattcagcaccttctgttcacaagcgataa

SEQ ID NO: 965 - DNA, 1846 bp, Aedes aegypti
atgtttgtggaagatttgcggagggatttctacgagcggctgatcggcaaacgggttctggtgattgtgaactacgacgtcgatgccatctgcaccagcaagatcctgcaggccctgttcaagtatgacaacatggtgtactccattgtgcccatcatgggttgcagcggtttggtgcgggcctataatgagaacaaagacgacgtgaagtttgtgctgtttgtcaactgtgccggatgtatcgatattctggagctgttgcaaccggacgaggccatgaccttcttcatctgcgactcgcaccggccgtacgacatctgcaatgtgtacagtgaatcacaggtccagatactaggtgcaccgaagagagaagaaggcatcccagaatacgaacagatttatcaggaaacggacgatgaagatgacgacgaaggcgatgacgacgatgaggtggacaacagcgatgaagaggaacggggctctcgagaaatgaaccggattcaacgcatcgagcagcagctgttgaaacgtcgaaaaaggcgcgaatgggaagagaaacggaaccagctcatgttcgagtacacccagttcaactattacgggagaagttcggcgttgaccattttcgagctggcttggcgtttgtccaaggactcgatcgatctcctctggtgggccatcgttgggctgacggaacaactgctgatgggaaagatcgaaagcgcaacttatacattagctacggaaagtgtccaatcgcacgtgtcccgtctcaccaacaaggccagtgatcagacgatccaaacgtccgttaagatccattacgaaaacgatctccacttagcactctacaggcattggagcgttctggattcgttgaagtactcgatctacccggcgtgcaaaatgaaattgtggacctacaagggcgagaaggtcatgcatgagttgctggtcgatatggggctccctctggtgcaagccaagcagacattcaacgccatggagctagaactgcgccgagagttttacgacaaattagaaaagttcgccgaaaagtaccacatgccggaaataatctacggttcgttcatccttcagtacggctaccggaacaagtactccgccgcagattacgtctactcaatgctagccattctggaatctatcaagaaagaccgcacccctgaaacgtgcttccttgaatcgatggatgccctttcccggaacaacaaggacatcctcgacaatgggatcgatatgtgcaaaaccctgctggcggccatcttcaaacaggtccaaagctccctcgagatgcacgccgtctattcggccggaccgttcctttatttcatcctgcaggaggaggtttcgtttttcacctgtccgtacggtttgctgatgttggctcggttcttgctgaacggacatgtggccgtttcgcgaaatcgtcgagcgcgggaactacctctaattgcggtggcaccaatcgacgtgagtcgtggttattcgctgctggtcggtgttccacctgtatgcgaggacagcaagaactttttcggtagggctttcgaacaggcggcgctcaaaagtggcgctaccatttcgcaggactttttcgaaccgaccgtcatccagatacgacaggccgactgcactaagttcctcgatgcactgacggttttgctaggttagtttgatgtcgaacgcgtttttttcgttgttgtctaggaactacgttcgtgtaagtttggattacgctttagcatagttttactgtaggtttacttttacacctgactcacacaatatttaccgataagctgaggaacccgacattatatga

SEQ ID NO: 966 - DNA, 2858 bp, Aedes aegypti
agggagtgggtgggtgtccaaaatggccaatttaagcgttatgaaatatatgaaccgacccttaaatatatgaacaaacccaaaaattgacgtgttcacaaaaacggaacatatctgtatttacggtatttacaaccgacgatgcgatgcgacatcgttgacgatgcaacactgagtgagtatgcagcacacatggcaacactgacggacacgatgatggctgacgtcgcgtaaaattcattcattcgaacccgacggcagcgagaccgcgaagtgtttttgtaaacaaaccccccaaattgaaatcaaggccaagattttgaaaaaaatcgaaaactttgtggggtaagttaccttctaaaaatttcctgcaatgttgggttaggattatcactgttcagttaaacgctactataataccaaactagagaatttcaattcaaccggttagttttatcaatgaagtaagttactactgtcatccgaatttactacgcgaatccacacgcacacagatgcacttcccagtcgacgagacgttccatcaaaaatcgacctaagaaatgaaccgctagttgggcaaacagcgacgaacgaagtgcacttgttttctcgctttgagagtgcgggagaataaaccccccgaaagaagtgcgataagtgaaggaaggtagtaaaaacattggacacgtcgcgcgggtgctgcctgcgaaagaaaagctgatttcagcaagattcgcaatccgttcccgttgttccgagtggaaggttgctaccttttttagtgcttgcagctgcagtctgatcagccagaacctggttgcgaatggaacattgaggaaaacatcgaaacgacacgacgagttggatcgattccggggctggttatagggtattggcgaatcagcagaaagtgaaatccaccttgggccgatcaaaatggacgagaccgtgatgttggtgctgttggtcattgtgatgctggtggggtcctacctggcagggaacatcccgctggttgtgacactgtcggaggagaaattgaagaacgtgtcgattttcggagcaggattgttggtcggaacggccctgacggtgatcattccggagggaatccgatcgctgtacgatgagagcaaactggaggcgaaaacgatggccacttcgggagctccggatcacaagcacggtgccgacgagcattcgtctacaatcggtctctcgctggtgctgggattcgtgttcatgatgctggtggatcaggtatcttcccggcggagggagggttccaacgagcgcaatttgaccgccacgatcggattggtggtccacgccgcggctgatggggttgccctgggggcagctgccactaccagccactcggatgtcgaaatcatcgtattcctagccattatgttgcacaaagctccggcagctttcggccttgttagctttctgctgcacgaaggaatcgaacggcaacggatacggaagcatttgctgatcttctcgctgtcggcccctcttttgactctgctgactttcttcggaatcggaagtgagcagaaggaaaccttggagtccctgaatgcaaccggcattgccatgctgttttcagctgggacatttctgtacgtggccacagttcatgttctgccggaactgacgcacaatacggggcatggaggacaccggaccggtggacataccgattacaatctactagagaatgctgcaagtgggaaggttgctgttcacgctggtggaagtggtctgaagaacacggagttggctctactcatcctgggagctttgatgcctctattcctaaccgtaggacatcaccactagtaattgtgattcacctaggtcaaccagaacattgccaaatttttaaagaaaaggtgagcagtgtgaacggaatgatggagttattgaactaaaagtaggacgcaatttcatttgacgctgcccgcctcaaaggaggacgaaacattcgaatccgagttaatttttaaacagaggaaatcgattcgttttcgtcctcgtgatatgtgatgcaataactctgcttttaactatagctcaagttatattccaatcccatttattcgattcgctgtgagcgaaaaccttttttatgcctccgatgactggggcgttctgttcaacggctatctacgtaagtttgtgtttaatttgtcgctaaacagaccttctaatccggtacaactatcagcttgcaaagcactcataaatcgagacaaagtttgcagcagaactgatagggggaaaagtagcaatcgcaagtcttcaaggcaataattttatctcactatccaaacacacgcgccttgcgtccctagcggatctctaggatccgctgtggaccttcgtatctctaccactatctagcactatcatcctcatgtccccgaacacgaacatctgtcatctggctaatgcgtacctagctgctatactcagtacggagaccgacaaaatgataagcacccgtcgtgacgcgcgatgtaaataggtagatgaacgtgagacggggactatgacttgcccgagacgtgtacaagtttaaaacacagatttaaaagctatgttgtttaaccgttaggattaagagacgaacaaaactgaagacccaacgaaattatactgaccacttgaaggacggtgcccgacgatgggtttttcttttcttaaggctattagatggaagcaatgctatttgtttgttgtagactcgtgtacgtgtagactgagcgaatgcgttcaagttaggtatattattatattaacaaaagaaaaacaagaaaatacattcaatattgttcgtaagtgaa

SEQ ID NO: 967 - DNA, 921 bp, Aedes aegypti
agactttcaggctctgaaagaactgatgcagaaaatgaactcatctacgaactcaaacgaagaagatgctaagacggatagatcagctgagttgagtgaaaatgaaaactctcaagacatctcgaccaagagcgaagaaaactgctcagaacttcctactgaacagtctttccaatgcgatgtgtgtcacaaatcttttgaaaccagagtacttctatatcgtcacaaaagaaatgttcacaagccgaaaaggttcaagtgctccgtttgcggaaaatgttttgcctacaaacaacagaaaaatatgcacatgcaagttcacaagcagaattcaacagctactaaggacttcgagtgtcctgaatgtcctaaaatatttccatcttggaaacatttacacaagcacctgatctttcatgtcagcaagaagaaatcctccggtgaaagaactgtcgcttgtccaaaatgtgataaaatgtttcaaacgtccgcccatagagattctcatatgcgaattgctcataaaaatgtggaacacaaatgtgacatctgcaacaaatcgttttccatgcgcgctcaactttggaagcacatgaataatgaacatggtgaaaagtcggctagttcttctgaatctgacggcgagaattcttttcagggaaataacagctacgaagcgggtaggaaacagcctcaaagaaatgcgaaacacagagcagttaaacaggaaacgataacggatgatgaatcttagacttgcttaggccgaagtgctatcagtgaaacgtgaactcaaaagaataagccaggtaagttatcttgtgtttcattgcgtcgaagaacttcctaatgtaaattaatgttggcaggtgaggacataactataatatcaattataattaaatatatcatcaatgacat

SEQ ID NO: 968 - DNA, 774 bp, Aedes aegypti
atggcagaaaatgttggatactatttcaaagtgcccagtgtgaacaaagcgccaaatacatacgacgatgacgtgaacgaacttcatcctttgtataaaacacttgcggtacaacttggtgaaaatgagaacattcgaaaacaaagtgtgcaacagctacgtgagtggatttccaaaactgctacaatcaagcgatgtagaacggatgcgccatttctgttgaggttccttcgaaccaataaatattcgtttctaaggactgtgaagatgctggacaattacttgcatgctctcgcaatccacaaagactggtttggtcagttgagtgcagatgatccggaactgagtgtcctcatcgatggtggatatttgttcccgctgccgcagctggatgcgaaaggtcgaatagtgttcttcagtttttcgagtggatttgatgcgaaaaagtcgtcgatagctaatgcaattaaaatgaactttatgttaggggaagtacacttcgacacgaacgaagcccaatgtgctggaatagtgtgcatctacgatatggagaagattgatatgtccgtgttgggacagataagcatccaggacattcggaagttggtcgatctgctagaccatacgtcggcgggacgtttccaggaattgcattttgtgaacgcgcaaaaggtgacgcgaacttttgccaacatggtgctacagctgatgagcgagaaaatcaggagcagagtgtttgtaagctttgtgcctgttgagtattgttttctctaa

SEQ ID NO: 969 - DNA, 3432 bp, Aedes aegypti
cccggcccgacaccgctcgcattcctctttcccgctggggcgttcgttcaacgtgtcaaatttttctcgatgtgttcgttttgctttcctttcgccgtcagtccgtcatcatctatccatcccgtaattcgtggtatctttctccggaatcgtttgtgtcgcgcaaaaaaaggaggaacaccagctgcttggagaaatttcacctggtgccgtagaagaattccgtgattttgtgctcccggtggtgcgacaatccgtgcggtaaattgtcccgtgcttgaggaccgcaccaatgcggagggaaagtgccgtttttatgcagagtgaaccgtcgaaggaaatcgtgtcataaatctagccggattcccagggctgcaaaaccacacatcgctctcgataatagggtggaaagatgggtggccaaaagttccagtacgatgaaagcggagggactttcttttactttattctgtcgtttctggcgctgattctgataccggccactttctacttttggcctcgcaagaaaaaggaagacccagagcgcttcaaagcagaatgtcagtgcgaaccgtgcaacaagaaacgcattctgatatcacattccgacccgtacaaaggcgtgaaggcgttcttcgtcaaggtgctcatcatcggtggatggttgctgcttgcatttttgacctacaaggtgtcccaattcgactacgagatgtccaactttgatccctacgagattcttggtgtaccgctgggatcgtcccagaaggacatcaagaaggcgtaccgtaccctatcggttatcctgcatccggataaggaaactggtgacgagaaggctttcatgaagctcaccaaggcttaccaagcgctgactgatgacgaagcgcggaagaattgggaaaagtacggcaatccggatggccccggagcgacatcgttcggcattgctctgccttcgtggatcgtcgagaaggaaaactccgtctgggtgctgggattgtacgcgttggtcttcatggtggcgcttcctaccgtggtgggcacctggtggtatcggtcgattcgctacagtggcgacaaggtcctgctcgatacgacccagatgtatttctactttttccacaaaacgccccacatggccctaaagcgcgtggttatgatcttggcggccagtttggagttcgacaagcgtcacaacacccaagtggtggaacgccagtcagataacgaagaggtgccgatgctcatcaaacaactaccgaatctgaacgagaagattaaggaactgcccttgtgtcggatgtattcgatcaaggcgcgcgctattctacatgcccatctcagccggatggcactgaatccggaaacgctggacaaggaccgccagtttatcgttaagaagtgtccctacctcatccaggagatggtcagctgcgtcaaccagctgatcatgttggcctatgccagacggatcgccaaactcccaaccatcgaaacgattgaaaactgtatgaaactgtcgccaatgatcatccaggggctgtgggagttcaagaaccctctgctccagctgccacatgtcagcgaagagcacttgcggtatttcatctccaagaaacccccaatccgcaatctgcagcagttcgcccagttgccggccgaggaaagccgcctggtcctgcgcagtttgagcgactttgaatacgagaacgtgatgaaggtgctgggcaggatgccgttgatcgactttgccgtcaagtgcgaagtggtggacgacgagaactcgaacgtggtcacggctggagccattgtgaccgtgacggtcgaattggtccgaaggagcatgagtgagctgttcggggacaccaccgccaaggagaagcagagcattacagaaagcaatgacgatggagctgaaggcgacgacaatggaggagacgcaacggtggcatcaaaggatgaaaaggaagatgccaaggcggcgaagaagcccgtttggcaaccgaaggcaggcggcaagggtcacaagggcaagagcaaaggtgcggccaataaaaataggcaccgacaggcagcggccgctgccgctgcgctcgctcaaacccaggccacaaaggtcgagaagaataaaatcaacgaaaaagttcgcaaggaggaatcggatgctgacagtggtgccgaaagtgacaacgacttcagctccgacgagggaaagaagtcctctgtggaagatgacgatgttgagtgggaaaagttccaacagaagatcaacaagcgtgagaagttggaaggcaaatccaaggtatcccacccggtgcactgccccttgttcccagaggaaaaatacgaatactggtggacgtacatctgcgaccgaaagtcgcgcactcttctcacggcaccgtaccacgtcaccaacctggtgcaccgcgaggaggtggccctcaaattcaccgcgcccaagtggcccggcgtgtacgtgttcaccgtctgcctccggtcggattcctacttcggaatggaccagcaggtcgacctgaagctggacgtcaaggaggcggccgctatcccgaccgaacatccgcagtgggacatcagcgattcggaatcggaaacgaacgaacagcaggccaacgagagcgaattcactacggattcgtccgatgcggaaaatgacgacaattaggcttgactggagagggagagagagagtgggagatgaggtaaaatgtgtgcgtgaggaggagtgcatgcacgttgcaatgagagtgattattataaactttcccccaaatcgaattcattttcttgtttgaacagctacagttgaaatgggccactgattacatacagtgatgggcaaaactctaggaccacatcactagaaagaattttatttgctgaatttctatattgtgattttgcttctataatataattttaccattcaattttaagaattatgcatttgcagaaaataacacagggtgcccatctgggaaacccgggaaaaaagtcgggcattccaaatgacccggaaaaatacaggaaattgtagaacataccgggaaaatatgctacaaaactgtgctaggagccgcaagactttcccacttgcacttagtaacacgactagctgatcaaaagttgctgaagatatatttacggcatgtttcaaattgttcgaaaagaaaatcaagatcaatcgtgtccggtataagtgttcagtcgagaatgcaaaaaggtgagctcgttgatgcctatgataacacatttttatcgtagcaacgttacgtttatgtaattttcaaacaaactaagaatcaccccttcactacaattattattcgtaaaattcaataaataaattaaattttgccgcaaaatcacaatggcattatacctaaaataaaacaaattagcgataat

SEQ ID NO: 970 - DNA, 1858 bp, Aedes aegypti
catctcggaattcggaagtgcttgagcttcttcacgacgacgcgatccgcgtgctacgtttgaccgtgtccgtgagtgatttctcttttctatccccctccgtgtgagtgcgtgtttcgggaacaaccctgtaaacaagaggaagccgaaacaggaccattcttcaggataatcaacgcaccgctacctttcctcgaagcagacgacaagcacaaggatccctaattaaaaaatggccgccctgaacatgtgcaaagcgcccgaatcgtacgaaacgtacgcgttcaaccttccggacaaattcaaactggccgctcaggacgaactccgcgaggacgacgacatccgggaaaatgccctcaagcagttccgcgaatggatcgccaagcatccgctgatcaaaaagtgccgcaccgacgctccgttcctcttgcgtttcctgcgaaccaagaagttctccatcccagccgcaacagaaatgctcgagaaatatctctccatccgtcagatctaccccaactggttccacaagctggacatcaacgatccggagctggaggccatcattgacaccggatacctgttcgccttgcccgaacgtgacgaacgtggccgcaagattgtcttctccagtgctggcaagtacgacaccagtcgcttcacagcggcccaattgatccgggtccattccctggtcgtcgaagcccttctggatgaagaggaatcgcaaatcgctggatacgtccacgtcattgacgactctgacttgtcgatgggattcctcggaatctggtccttcacagacatcaagaacctagccaattgtgtccagaactcgctgccgatgcgtcagaaagagaaccacttcgttaacctgccatcgtttgccaacaaactgtccgatttcatcctgtcggttctgagcgacaaactgaagaatcgcgtattcgtccacaaaaacatggatgagctgaagagcaaggtcaatcccaaactgctacccaaagaatacggcggtaccgttcccatggctgagtgcgtagcgcagttcaaggctttcttgaaggcgaaacgagaccagctggtggcactcgatgagatgcaaatcgagatcaacaagaactctgcctactgggctgagaccaccgatgcggacatcgctgccggagtgatcggtagcttccggaaactggaggtcgactaagtcccttctttttattatcagaattagaaacctcttctgtatgtcctgaatctttttattctagccttaatagaactccgaatcagctcggtgacatttttatctgaagaaatagttctatatacacttagttaaacaaaagttaattagttgaaaacgagaaagagacgatttcagctagaaacgatcctctctcccccaaacaggtggaacaaagttaccaaaactcaactttatcgttaatacatgttatagaattttgcatagaaccttccgttctagaactatatttctctagcatatcttagtatcaagtactgtcaactcgtttacttactttcagacagcaaaactcttctctgtgatgatggtttcagaaactagcacagactaggacgcggtaaagtaaatctccaaatccttaatttattgcttactatgcccgctatattattcttaaacttaaaggttatgcacggtatggaaaggacaatgtaatccaagtatttagtgagtagattagggtcgacctcctcctccatatcttcctcttccatttccggatgtgcagcatccaatattttacgccgatttgaacgttatgtttttgtcaatcagcaatgttttatgaaataataaagtttaggaaagtcc

SEQ ID NO: 971 - DNA, 1382 bp, Aedes aegypti
tcccaccttgattccaatgcagctgagctgagtgaaaatctactagcccaccacgcgttccactattaggcgtcgaatgtcttctgaaccgagagggaaggggacaaaccaaatccaaacaatcattcagtcgcaagcggtacctcacagcgatcggaagctcgcatattagttcaatcgccgttttcatcgcaggactcctccaaagatcaatccgggcgtgacaaattccagccacaatggacgtcgacagtatagtctacagcaactgtaagaacccctccaagtacgagccgtaccgatgtacgttgagtgataaactgcgcaaaattgccaaggcagaactccgcgaagatgacaaaattcgtgaacaagccctggcccagatgcgagaatggatcgccaaaaatccccacatcaaaaagtgccgcacagatccgttgtttttgctgcgattcctgcgtaccaagaagttctccataacgcagtcctgcgaaatgctggaaaagtacctctccattcgacagacctacccgaaatggttccgaaattgtgatgtcgaagacccggagatggaagccctcatcgacggtggatatattgtgcccatgccgcagagagacgacaacggccagcaactgatactctccgtagcgtccaatttggacctgagtcgggtgaattcggccttgttggcccgggcacatttcctagttcaggaagtgctagcagacgacgaggaggcacagatttgcggctatgtccagtgcattgacgagcgacagctgtccatgaagttgatgggactgtggtctctggtcgatatcaaaaaggtagccgaaagcatacagcatggcatccccaccaggatgaggtcgttcaactttatcggacttccggcgacggcggttacgcttctggagttttgtgtctcgctgctgagtgacaagctgaggaagagattcaacctgttccgcaccgtgaacgacttctcgaccaagttcaacaaacgcatcctccccaacgaatacggtggcaccggaggccccctgtccgacatgatcgctcagttcaaggagcgctgcagggccaaacgggcccaactgctggccatggacgaaatgcacatcgaaatcaccaaatcttcctccttctacgcggacacgtgccgtggcgatctggacagtggcatgatcggaagcttccggaagctggaagtcgattagatgtacattgcaatgcgccctatgctaaataaacgaaatgaagaattttagtatacttgcttggagttaggtgaagctttagcttttaagagatttttaggcttaagtaaaaaaatatcaataaatctatacgtaccaccaacctgttcgatcaaa

SEQ ID NO: 972 - DNA, 3394 bp, Aedes aegypti
gctcgaagtcgagcacaacagaagcaccattcgtccgaaagctgattcaatattgcaagtgaaaaattgtggtttaacaagtgtcggtcttcgtatttccactgaatagttcgctagacgtgcaatccgtgtgaaaatggtactcggaaggaacgataccgtagataactgaaacgaaacggattgtgggatccggtcgtcgccatcatgagcctggatggatgccgtccttgagaagaaagtccagctattgtgcgtgttgtaagctagagaaacacccccaccaagaccaggaccagcccacccagaacaccggacgacgatgcggataatctactggctgggagtgttcgggaccataatcggggccaccgcactctattggcccccgtttgtatacatttttctgttcttgctctactcggtcattctgatagctctggccatcttcggcaccatctacgtccactataaactaacgaccaaggagtcccgcccgtacacccgcgaagacctacccaccaatgtcctgtacaacgctaccaaatcacagctcttcgattctccatcacctcccaaatccggcaccaacctaccgatcatcttcggacgaaccgtcgatggcctactgcagcagatcatcgggaacgccatgcgcgatatcgtcagcccagccctggaggaaatcgtggccaacccacggcggatcatcgatctgctgaaggaagacatctggctgggcatcgataagctgcatgagcgagcatcccggatcgatgcccccaaaatgatcgccgttgatttcgttttgaaggctacggtgcacttggaaaagatacggatcgctcaggcaagggccgccgagatgggaacggatccggtgtttgggacgtcttcctatcttgcaacacaggagaaagaactggagtttttgaagaagatatgcgaaatcttgatcatatttttgctaccccgagggtactcgctatcgccgatcaaggatttgctgagcgaggtggtatcgtataaggtgctgtttccggtgatcaggctggtgacctcgccggattttatcaaccaacaaattgtggagtgcatcgagacgaagctggtggcggtggcgattcacaagagaagctacgagtatgcggcaaactttgaggatttcttgaaggtgatcaacggaagcgcaacgatggacgaactgcactcgatccggggaagcatcgtgagcgacatcatgcaggcgacgacgatgcaaaatctgcagaggacgaggggcttcgatagtgaaatgttcgttgggaagagtggtagtggcaataactccggggactcggagaacaatccttcgcgagcggagattacggcatcgttgaagttgaagaagtacattcaacaactgtcattcgcaaagagccaatgcgaaaaatgtctgtccaaacttggatgggacgggaacgtgagcaacgagattgatctctccatactggacattctctccaccgttgccggcagaagacacttcatggtcttccttgaaccactgaaggcttcttcactggtaggattttacacgaccgttgaagagctgaaacacgctccaaagagctcgtggcatcaactgggggcagagatcttctatacttacatacgatgccctaactcggagattcctgtagataaggccactcgaaagaagatggagtcgttcttggtgggagacagtggaactgacgtcttcttcgaagtgcaacgcgactgtttgataacgttggaagagaagtactaccagccgtttctgcttagtgaggaatataccaaactgaagagctcgctgactcaggaagacttcaaagaaatcaccttgagtacatatctgtcttccagtacggaaagtcaggatgagacggcgtccaatgcttcctcggccagcggagacgtagatccggtgatcatggatttgagtaaccattctacctacgctaggacaaagctggaacagttggatgaaaagctatccaacaagaatcaggcgttagatgctttgaagcaatcgctgaaacctgactcgaagcttctatcgattctagagaaggagatcgattggttgaagggagagaagcgccaactggaggcgcatcttttgagaaccgaagtgtggggtgaatacctcgggaagtggcgtgccatagtggagagtgtagacttttcggacgacaaggaacctcaaccacagttcatgatagtcgtccaagtggacgaagtgaatgactgtggcaaagaggatgtggccacggcgatggatgctgccgatagcatctctacgggttgggtcgtggtccgatcattggctcagtttcatgatctgcatcgtaaacttcgaccgatgtgttcggatctgaaaacaattgatcttccatcgaacaacgcattcaagttgtttctgttgaagaacgacaaatctctactggaaaagtccaaacagcagatccaaaagtatctcaacttcatcttggaggatgatcatctcaaccaaagcgaagcactgtacgaattcctgagtccaagctcggagaagctgaaacaaagtgcgaatccatcaccttccaagaagcagtccaagttttcgttggcaacactattcaaggctaacagcgaaaagcttgaccaattctggggtcctcacttccggttgaacactgcggatttccccgacgatgatcaggtctccatgtacttggagggatcagccgaaaacggggctgccaagtcacaacaagatccagacgccaaggactccatagctgaaccgctgtattctctcctcggcgaaatattcgatatgggcggtgtcttcaagtggctccgccgcagtttgatctcgttcgttcaaatcacctacggtcaaaccatcaatcgtcagatccgggaatcgatcaactatctcttcgaagaacccatgctgcacacctacgcatcggccgttctgaaaacctactggcccggcggagtccttaccataaaatccatggaccgctctgaagaccaacaggaaatgacgatgaatgccgccaagtccctattgctggacaacattcccgatctgctgtgcaatctcatcggtgctcagaacgcccgcaacggcataatgaagctgttcgacaacgcccagaatccactgtacaacaagcaactgttctacgacatcttggaaatcctgatgctcgaacttttccccgaaatccgtcagctgaaggttccaccgagtgtgacggctgtggcagttgtgggaggctcggccgtctcaactccaacgcatgctggccatgctcaaaccattggaggatcttccgcccaagctaccccgacacgaatcatatcaagaaattga

SEQ ID NO: 973 - DNA, 934 bp, Aedes aegypti
ggattattttctttctactcgaataccactccactccgtgggcgaacgtgatgatgtgtttctttttgcttaaaacttgacttcctatagttgaactagttgaattagattttttttctggggaattgaaaaactaaactcaatcttcgtattaacaccaagagctgctacctagccgatgtatagcatcagaatgttctcagtggatgattttcaatgctatgcggagattgctatctaacgatgttatgtaaaattgttattccgtcgaattgagcggcaacagcaaatagcgatgatctgtagattgtgtgggtataatcaagcgctgaagtgaggcctgcgaatgcaattatcagcagatgagctcctcactcgccactctagtgaagctctacagcaaacaatccagtccgaagtggtccactggtggtggccgttgagagcttggcgttgagtaataatcagcttccgaaaaatcaccatacgcatcaatcgaacaacaaacgaaagcaatctgttgaaaatgtgtgccactcttcctgttctagttcactgttcgcacgaaaaaaagcactcgcaaaaaacgcccctccgggaaaaacgacactcctttccggatccttcgtgccaagtctcacttctgcttgcgtattcttccgtcaaaggacaaaatagtctgcgttgcacttgccgtgcactccaggaaactggaacgtgtatattgtgaactaggacagctacgcataaaactcgcacaaaactatctagccagcactaggagccttcaacctttacggtgacgcaaacgattcgcgaaactttaggtaccgacagcaagtcactactaactgatcgaaacttggtcagctgctaataccgtgcaaaggcaactacactccccctctctctcactccgtgtcgcacgctcttc

SEQ ID NO: 974 - DNA, 1269 bp, Aedes aegypti
atggttgaaccaggcctcaagctatccaatggaccgggtgccctctgtaaggtatgcggagaccgtgcatctggtaagcactacggagttccatcatgtgacggttgccgagggtttttcaagcgtagcatcagaagaaatctggaatatgtgtgcaaggagggtggaaagtgcgtcgtcgacgtatccagacgaaatcagtgccaggcgtgtcgattcgcaaagtgtctgcaggccaacatgcggcgtgaagctgttcaacacgaacgcgcccctcgcaattgtgctccacttgcagcaatgaatggaataaatccttccgatttctacccctcgcgagccttcgcgatgccacagacaaatctattcttcccgcttcccctgcacataacagcatcgtcagcattctcccccatggatccaactcgattcatccccccttatggaggagggagtgcagcaatgttcgatcacttcccgccgacggcattcggtacatcttcggtgccaccacccttggccaatctgaaaagcgaaaaatccctttcggagtcaattttcaccaagatcaccggagacacagttccacttcaacctccaccatcctacaccatcagcgctatccttaactccggcagtttttccgccaaagaaaacgaagtcagcagctccgaggagagcatcagcagtcaaccgacgaatggtgagaagtcagaaacggacatgctgctcgaaactgcggccaagctactattcctagctgtaaagtgggctaaatcggtgccatcgtttctgcagttgccaaccgccgaccagaaggtgctactcgaggaatcgtgggcggagctgtttgtcattacagcggcccaatgggggctaccgatcgataatggtgagttttgttcctgttgtttgtcttctccagatttcatcacccgtaatccatcggccagacgacttcacgccgccattcaacagttcaccctcgcgcgtgtcgactaccgagaggcagcatgcttgaaggctctgattctatttcgctcggaaaattccaacctctactcatcgcacgaaattctgctgcttcaagatcaaaccataagtctattgcacgaaaagtgcggcggagttaggctgggacacttactgctcctactgccatgcataaaatcagcagcgaatccgaaaatcttacaggagatgttgtttcggaagacagtgggcgaggtcgcaatagaacggctattgggcgatttgatgaaaacttaa

SEQ ID NO: 975 - DNA, 2087 bp, Aedes aegypti
gctccgtcacagtcgcagcaagccgaacggctctcgtccatagtttgatatttaaatttttgcatcggttcctccctgagaaatcaacgcgttctttgatcataatctatcgtcatctgttgtacggggacaagccgaggtacgaacacagatcgcaggaaccgctgttttttgtggattaaaaagtgtgaaaggctggtagtgtagaaagtgcaaaaactcttcggatcaatcaataatgtttccaacgccgctatcggaggaatttttccaaaaatgtcggaccgatttctacgagtgcccgaagaatgtactcgcccagaatgtttgcacccggatagatccattcgaagcgtgcatgtcgcgaaaggccttggaaaacacccaacatgtattcacatataagattgagaacgaaggcaaaccgctgacgaatcagaagagttccggccgttgctggctgtttgctgcactgaactgcatccgcattcccttcatcaagcagtacaatttggacgagttcgagttctcccaggcgtacctgttctactgggacaagatcgaacgagccaactacttcctgaacaatgtcgtcgacactgctcggcgtggggagaaagtggacggccggttggtggctttcctgctgtcggatccgacctgcgacggcggccagtgggacatgctggtcaatcttatcaacaagcatgggttgatgccgaagaaatgcttcccggagagctacagctgcgaggcgagcacgcgaatgaattccgttatcaagagtaagctgcgggaatatgccaaggagttgcgtaccctgatcgccgccggagccgacgagaaagaagtgcagagcaagatccaggagcaaatgaacgaagtgtacaacgtggtcggcatctgcctcggcattcctccggagaagtttacctgggagtattacgacaaaagcaagaagtatctaagcatcgggccaatcaaaccgaccgatttctacgagaagtatgtgaaaccgtacttcaatgtggacgacaaggtgtgtctggtgacggatcctcgctcgtcgaatccttacggccgatcgtacacggtagactgcctggggaacgtggtcggtggacggccggttctgtacaacaatcaaccggtggaaacgttgctggatttggtgacgaaagcattgaaactcggagaaccggtttggttcgggtgcgaagttagcaaacgctttgctggaaaacagggtattgaagatctggatatacatgatttcaagcttgtatttggcgtggatatccaaaccactatggataaggctgatcgtttaatgtatggcgaatcaatgatgacccacgctatggtatttactggagtgtcagttgacgtaagtttccttagaagttttaagttagttttagtcaagtaaactccacaattcttatagcccaatacgcaaagcccgaccaagttccgcgtagaaaactcctggggagaggaccgtggcgaaaagggttaccttatcatgacggccgaatggttcaaggaattcgtctttgaagtagtggttgatcgcagcatagtgccacaggatgttctggacgtgttcgatctgacgccaactgttctgcccgcttgggatccgatgggaacattggccaagtaaaaaaaaatacaagccttgcatacatcacacacacatacgctttagcgcttatttaaatcttcttcaattgcatgaaagaaaaataagatctgagatattcgaaagcatacacaaacacagaactgctatgagcaggaagacttcaagcttctgaatgaaaagcagctttaggaaacagaaacaaatatagtgaacgaatctcgtagcttttcgcatgttgctaactacaaacacgcgtgagagcttgaaggaagccattcttgtatttgacaagaagtaatttaatctagctaatatgtactgtatttaaatgaataaaatattaatcgctatgtaacagatataaagaacagataggaatacggaagacataacttttttaaaaaggaaaaatacactatacgagacgaatattgtaacc

SEQ ID NO: 976 - DNA, 1426 bp, Aedes aegypti
aagcaaaatggaattcagaactgccgatttggagctgtttaaagagaaagatggtgcttacataaaattcatagaagatctaacaaccacccttacggaagcagacgaagcgtatgatggcattagagtctcaaaacgtacatcgggctacaccatagtgattatcaagcatggggaaactgaggttccattagtctacagaattcgagatttgtacataattggagtgattgttggaaaagtgtgctacatggaccataaagcttatgccgaggtgaacaacatgaatgaattgaataaagtaattttcccggctaaagccgaatcgctaaccagagaattcagctatcattttataatgcccaaaggtgaaaatactgaaatcagatttgaagagttggaattctatttacaaaagctcacacaaattggagataagatgaagcgtatagaggtgatgcaaaaatatctcggtccgtttgtgattttgttttcggaagctgttcgttttccagcaattgccatattggcacagcaagcctttcgttccgatgatggcaagattaagctttccgaagatgtcgcacctccggaagtggtactgaatgacaatgtcatcaaaatacacacattactcttgatttggggacgtctttctagttgtgtgaaatatttgaacgatggaaaagactgtactgctactgttgaaataaaacataaacctactcttggacatctaaaggagtattcaacaccacaagcaataaaaatcaacaaagatacgctaaaagcgctattaggtgtagcaaattcatattctttcgaaaagttcaaagttagtctgcctagaataaaacgcgaaagtttgaacgttccattgccatcataccagcagcaattaatcctgtctaatcaccaggaaaatctactcgaatacgatggaatcacacagcagtctagtgctgcggccgccaataatgtaatgcccaacctagatatgactggggtcttgcagcttctaacacttggaatactacattttacgaagaaacggctccatctaaccgaatttgaaaccgtaatacacaactctagggaagccgctgccgtagccaccgatctcacggatcgaattgtacgttttatgatatgtagcggtgcattcagcgagcagatcgaatacgaaaatcagatgcatcttcagcgacagttgaccacagcgttgttccgaggtgacaaaatctatgggattatttccaacttcgttgcagaatatggtataggtgacattgatggtcagtcaacggaggaaacattatatcaagctgtattggatggcgaatgttttgaataacgataagtatttttatgttcaagttcaatagggaatcaaaagcgaataataaacgagcaatgacatgaatcc

SEQ ID NO: 977 - DNA, 801 bp, Aedes aegypti
acataaaagtggcgacgagttaaaacagtgtttaacgcgtgcaaaagttcatgtgaaaatctaagtgaatttgtcttttgtcatcttcctgtggagtttaatcaccgtttaatttcaatctactcgcagcagcatttggccattgcaaactgcaacgacaattcctttcggtgggggaaaacaataagacgacgtttgctgagtttatttgtggtcatttgaccaatgccatagcgtgtgtggtggcacaagatgtcctgacagtgaacgaataatctacgtttcgatgagtttcaacggcatgatgttacgaccatggaggagtgttgatcatattgctgaagttattacgacctacgatagaaatggatatggcgtatacggcgatggccaaggactggaatgttattgtgattgcgatgatgtcggtacggaatacgaagtgtattcgaataagccaaatggcgaacaaaggtggaaatccataatgagactgtgctatttaaatccacgttctgaattgagacgaattcatattatcgatagactactagctagatgggtattcattgtgaatattccttgcatgaaagaagttcgagttaatgataaaaaccaatttgttgtaacaaaccatgtaattacgtataactataattcaaaaaccgttcctaagggggaagaactgtgatatatgtcacaatctgaatatattatatacatgtagtagtgataagcagagaataaaataaacacagcgagctgggctcgccctcttttatcgtcgactttcgaccaaac

SEQ ID NO: 978 - DNA, 1964 bp, Aedes aegypti
agacgtgtaactttttcgaaaattctacttcaatttgtccatttgatgcaatagtatatgtaatgtatagttttatggtagttgtacctaataccaaatttcaataggtgtcggtgtataaagaatcgatagcaaagtatcttttatttacatatgtgattgtaatataagaacgttagttcgttattgttgtagtcgaacgggacaaattcaaaacaaaaaaaaaaaaaataaatagtactttgttatgggttcaataaaaattaattgaaatttcattatttattccagattggagattcaatttatggatgaagaatggaatgtactagcaattgtttttgattctttaacatactttgtaaaaaatttgttgccaaacaaattctataaatttcgaatacgagctaaaaatgcctatgggtatagcgaacctggccaatctagtgatgctgtcttgattccaaacactgaaaacgaggaaagaacttcctggaaggattgtgaggttcgacaaggcgaggagttttcatcagtatacgaatcgctggaggagcttggaagagggagatttggagtagttcacaaagtacggcatcaactaactggagatattcgtgccgcgaaaattgtaaagtgtatcaaagccactgatagaaagaaagttcaagaagaaatcgctataatgagatctttgcaacatcctaaattactgcagttgatacaatgttttgaagcaacacgagaaatcattatggtagtagaatatataagtggtggtgaattattcgagagggttgtagcggatgatttcacactgaccgagaaggattgcgttatgtttatgcgtcaaatatgtgaaggcgtttgctatatgcataatctttcaattgttcatctggatttgaaacctgaaaatatcatgtgtagtactcgcaacagtcatcagataaaaattattgattttggattagcccaacaacttttacaaaacacatcagttcgagtactactaggtacaccggaattcgtccctccagaaattattaactatgaaccaattggtttccaatcagacatgtggagtattggagttatttgttacgttttattatctggactatcgcccttcatgggtgaaactgatgtggacaccttcaacaacataactcgagcagaatatgatttcgatgatgatgctttcgatatcgtgtcggaagaagctaaagatttcatatctggattattgctgtatagaaaagaagaaagactatcagctacacaatgcttacaaacaaaatggctgtcgttggattccgatgcattaggaaattccaaaattggcacgcacaaactgaaaaagtttattgtcagaagaaaatggcagaaaaccggaaacgctatacgtgcattaggacgtatggcctctttatcagcctcaagaagaaattcgtcttcgttagcaaacactggcgtcaaaccaaatacaagaagcacggaatttactacatgaagaaacgtgtaaaatttcccaaagcttagcaaattgataataaattgtcttccatgattctacgaacgagcgcaaacatgtattacagtgccaatagtgcctatcgaatattccgtcacatttcgtattattattattatattgtagtgcacctgtttttaaattgttgtaatcatatattttattgtcattttagttgtaaggatggaacataaataaataaacatttctcggtatattctctggaatgtgtaataaagttgaaaaaatacaatcagatctcttacattcagtgatgacatccacccacaaggattttgcaatatacgactataaggagctcattattattatgattaaacgagattacaatattttgatatcggtttaagctacattattcgtagattgtttcaaagtttattcaacctacatttcaaggggtatatgt

SEQ ID NO: 979 - DNA, 753 bp, Aedes aegypti
atgggtaacaaacagacaattatccgtataaaggataatacccaactagaagccaggatttattgctgcattttacaaagcatatctggcaaaacttcggcaacagttgcaaaaagttctggaaacagaaaccgaaaaatattaccacccaaagttctggaacatttaccaaattcggttacgtcatttgaaggatgtgaaactgatttaacgctaagaattgataactcgctgccttttacatatgtttggctccgcaatggtattgcaattgaggactgcaatgagttcaggtacattgatcacggtcgtggtgttatatcgctcagaattgtggatccttttgtgctggactctggaacctatgagtgtatcattgcttctgctggtggaacttgtagaacacaatcacgtgtgaaaataatggaaacggattgcgtttctaaatcgataccccaaataatgatgtatccacaatcatatgtagcggaacaaggatcggtggtaattatatgtgcacatatagtaccactaaactgtgaaatcaaatggaaagtttgcggaatagttattgaaaaagactcagataatgttcagatgaaaactaactctgatggactgaacattctctacatacataacgttacctatgaccaatgtggagaaatacaatgcatggcaacagctcccaaccacaccatgacaacaacagcgtccagcatgctcactgttacgccaattttaaacgataag

SEQ ID NO: 980 - DNA, 848 bp, Aedes aegypti
tacgaaagtctccgcgagtgaaacatcaatattacgtggcggtgatttccaacaatatttttctagaattaaagtttaaaattaggcaacatgaacaaacttttccccctgattctcactgtggtgtggctgagctgtatgcacctgagccatggctatttcatcaccgttgatgcccattcggaggaatgctttttcgaccgtgcggaatccggtaccaaactgggactgatgttcgaaaccatcgaaggcggttttctggacattgaagtccgtatcgtcggtccggaccagaaagtcatctaccaaggcgaaaaggaatcgagtgggaagtacactttctccgcttatgaaaccggtgtctatcattactgcttcagtaataaaatgtccacactgacaccaaaagtggtgatgttttccatggaaattggagaagcgccaaagggaaccatcggagcagtgaatgaaggcgaagctggccatacgaagctcgaggacatgatcaaggaactgtccggaaccttgacgagcattaagcacgaacaggactacatgcatgttcgtgaccgaatccatcgctcaatcaacgagagcacaaattcgagggtcgtcatgtggtccgttttcgaagccctcgtcctagtggtaatgaccgttggtcaggtttactatctgaagcggttcttcgaagttaagcgtgttgtgtaaatgaacgactgcagagaggcccagtttttttgattgggtgtgcttaaggattcttcattgtaagttaaattaatttttgttccgtgaatatcctaaacaatgtcgtcctgatcgatgaattttgtttgcgtatcgaa

SEQ ID NO: 981 - DNA, 1190 bp, Aedes aegypti
actgaagatatctgtaccatcataaatcgtaccttatttgcgcaccggttcgctttggctatgataaagatgactgatcgcaatttgttttttttttattttcgctacagtcggcgattgtttgcgatttgtgaaaaataataggttgatggtatgtgtgtttgcccgaaaggctgtcgtagtttgtcgtctacaacagagatagtgaaagccctgatatgattaaattgggtacatcgtcattattcacttgatacgaactgctgctgcgaaaatggtgctgacagaggcaacttctagtaccttcaactattttgcttttggaagcaatctcttcttgaaacggattcgcatggaaagccccagtgcagtgagaaaaggaataggatatttggaggattatagactagactttttccactatgctgcacgatggcgaggcgcgcctgcgacaatcgttgaagacaaaggtcaccgagtgtggggagcaatctggcaaatcaatatagaaaaccttcctgacctggacaaacaggaaggagttcacaatcaggtttacaagcctcttactttgcctattcgtacctcatctggtgaagtgctccaatgtcgcatatatcaactcgtaaaaaatccaccaaaactagaaggtactgaaagtggtcgaccatttgagcggcagccgtcgaaaacgtatatgaatatcatcgttcgaggagcgatagaatctggactaccgtcggattacgtggaaaagttgaaaacaattaagcacaatggacactctggtgatccacactttgaaatcgatttggctgtgcaggataaattgccttaaatattgatgttattctataatatactagctaattgaacgcgaaataattgttttcgactacgcatagcgatggtcaaatgaaaaataaatctcattattacttttctaatgatttttttatatcgctttatctttaggtcagcaaaaaaaaaaccctttagtttgagaattttataaggactatgaccaaataaatttgtaaaatcctctaattttctgtagctttattttcatccttgaaatgttatagtatattgaaaatatgattcaaaattattgtaccattgtttataagaagaagaattctgcagactcctgaaaatataactcaaggagtatactgttcatattc

SEQ ID NO: 982 - DNA, 4214 bp, Aedes aegypti
ttcaaactgacagcataattgaacgaaaatgcaaccgcaacacaacacaacacttttcccttcgctgtgtggatgataaaccgaacgcataaatggtggaggcagagtaagaaaaagtggatttctaaatagaattttcattccgtcaaattcgcgagaaaaagtgttgtgtttttggttaaattgtgtccaatctttgcgaaaagatgtccggaatcggtgaattgcatcgaattgtagcaaaaggctacaattggatgtaaaagtggacttgaaacatcttaatagcaatccgtcgccataaagaaggcaaagcgtatattttttcccgaggctctcacagccgtctgcgattcaacctgtacagtttttggtcttttagctttggtggtgtgcgtgcctgagataaataaatacgggccagtcaaagcagtgttcgtgtgcgggactgcaaatatctgtacaaagcaaaagaacgtaaatggtggcgcttaaattgtgaataaaaaggaaaaatcagttcgctcttagttctgacggcagcaatttgcgggcctattaaaacccggaatcatggttaaaggacgtcgaactcgccaaaccaacccaacgggtcatctactcacatcttcttccgcagtcgacgacacagccagtcctaaacgcaaagatttcaagttcgacaatttgtcacatttcaccagcaatgatacatctgcggccgctccaatggttctacgcggaggtcgtaccaagattaatggaattgctaaatatctgacgaccggtaaaccttcggctccgatagaaagtaaatcatcatccacagcacacaatttcatcgatcttaccgatgataatacgtgtgattcgttcgagaatgtggccagcggaagtggaaacgccttgggaggacttggttttagcatgattcaaagcaatccggcaagcaacattttcctgcaggaaccggtgcttagtttgaatttcgacaagacgcccacagacaagtcccgcatggtcattaaaaactcgttcctgtcaactgaaatccaaagtaaattctcgccacccaaatgcgacccgatgtggggaagtgccgctgcatcagtatcaatcaaaatcgaagcgtcggattacgcactggacttgtccaaaccgacacaagtaacggaaattgactcgacgacgttcctaaatcaagacagcaattcatgtgatagcggtgacagcggagtggtcatcttgccaacaggcaccctggagtcggtgggatcggccgacgggaagcgtcgaaaaccagcaactccgcatcgcattctgtgcccatcgccggtgaagaatccactcgtggctagcccgtctacggcactggcacacttgaacattcagagcaagaggaccacccggaggaacgtgaaatccaagcgaaggcttcacgtaaaagaatcggaaaacgcgctggaagaatcggaagtgatcagttcagtcgatatcaatattctgacaaccacgaccactgagttggataagaaaaagccggtcttgaacgattcggtcaatcctactgcacagcagaataccaacaataaccaaagcagcaaacaaaccgaggttccttcagctgtgaccacaaatgtcggcaaacacagcggtgaggcaggaaccaacacaaagctgaccgatttcttccaagtacgacgaagtgtgagaaaaaccaaaaaagaagttcaatgggaacgggaccgcgatattgaaaaggctattcgcgaacagcgggaatctggtttgaagattcaacactttgaagagaagggacgtggaataataacgacaaggccgttcatgaagggcgaatttgtagtggagtacatcggcgatcttataacagtctcagaagcgaaagaaagagaacagatttatgccgaagacgacaacaccggatgttatatgtattacttcaagcacaaaaatgtgcagcactgcatcgacgccaccgccgagagtggaaaactagggcgtcttgttaatcactctaggaacggcaatcttatgaccaaaacggtttccctgaataaccgacctcacctagtgttaatagccaaagaagatattgcggaaggcgtggaagtgacttacgattacggtgatcgttctaaggaagctttgcagcaccatccctggttggcgttctagagacgtgcccctaccggtcgtaggcaaccctataaagctttttcctattcaaatcgagcaaaaccatatttcagagccaaccacccgccatatagttttgtgctgaaatgatgaatgagcaggaaacagcgaaatactgtaagcattttgatgttcctttcaattcccaattatggtacgaaaacaatagtccacattctagcagggatactcttgggaaacgaaacaaacaactactttatctcgtgcactgtaaataatttaattctaagcagacagtgatgctaaagacagtacagatcatcaaattaatccattttacagaaaaaaatgcataatgctctttactgaagagatttgttggaatgcaaacacttgatttttacagtgaatgtctagatatggctaaattatgtgtcattttttcattttccttttactttttccatatgctttgctgcgtttgtgataatagataaaaaatatcatactttaaacacaataataaaacaggatgaatcttccaacatcaattcattagcaatctcatcatatgtcaaaaactaagttgctcaagggcagctctttcaatgccgtacctacaaagtccccaagaaaatagatggaatgcagccttaacacaattcaaatgaccagttaagtgttcaatacgtactttcactattgttaactgagaattttctgcatcaattggctattttttgcattttgtatattgtgcggcaagcacaaaagatattctttgtacaatgggaaatcaagttttcttggaccgaaccgggattcgaaccttgattgtgcttgtacttatgctgcaaagtcaatgaaaaaaagttgacttgcacgtatttgactgacattggcgtctatcaaatcatgagtttattctacgagtggaataaaggtaagaaaaagtaatatcgactcgaatgaagaacgctcaaacaattactcctctcagtcgagttttgtcacttatcaggggagagctcactagggaagtgagaaatatcgatctcaacaaggtgacaattaagttctaaccctcgactcgaacgtgcacagagcgtccagtggaacgacgagacatttcattctggacgcctctcattcgagtcgagtttggtcacgtgtgagaccgagatttctcgcctcactccactcttaagctatcagaacactatagcaaatattgggcttggattgatacagacccaaacaaatgtttgacaactctaagattttgtcagtgttgaaaccaatgttggtctgttggtttatgcctagccaaatatttgcacattcggcaaagcgtgtactgatagctttagaattcgaataaataaatagcaaataagcccaggccaagccatggattcccacacgctcaagggccaactacgattaagtgtttccatcgtggagtggaaagagaatcttaaaatgcatcatgatatcttagacgcaatattgtttcattatgaccttctctagtgaagtttaggggatgtgtagcagtatccaagaagtcttcaaaatcgagttccagcgccgttaccgtatgctggattctagttgcaacgtaaagaggtgtggtttcactctacctagacaccattcgccgaatatttttttcattgctttcgtactaagttactagcccactgaaaactgccgtactttacacgggtcataatattcgcttctctatacatttgatataactcgtaattaatacgtgtgcagcatacatcattttctaatcttcgggcgcaccttgatgagttcagcattggcattctcaatctcgctcaacgagggggctggttggtcagcagtcagcatcattcaggtgtttattgaagtgctgatactacctttctatcaccttaatcttcttctttgttcttatgtaacgtatccaccgctacagagtttgattcccaatttctagttcttatgatcacttccacagttattaactgagagctttcttt

SEQ ID NO: 983 - DNA, 3206 bp, Aedes aegypti
agtcgttgtgtggaaaacgcatagacaccatcagtgctttttactttttcacgtcgtagaaggaaatcgtaagtccgaatcctaatctcaagctataatttctccgttttgtccaattttgtgttgcttaaacgcttctcgaacaatctcgtctgaaacggtgttttatctcccatatcaatcagtgagagcaaataatcggaagcaaaagagagccacactcggtcgaagtttaatcttcctaattcttaatagtgcagtaattagtcgtcggtttagtttgtgaattgattggaggaaaggatcgcctcgagtggcgctagcgttttatatgactttagaaagaatccaagaaacaccagcactcaaaggagcaccgctttctcccctcttaaggagtttaagtggtacattgtgcatgatttctcaacagcgtagcgtaagtcacaggacttctaaatattccagcaatagacatcggaaactgcaaccatttagagaaacgtgaagatcctgtcgttccagggacactttacttgccgaacaccgtgttagtcgtcagaatccgaatcaacagctaaaataaaagaaaaaaaaatccgtttgcgtcgccagcagtttattagtgaaagcgagagataagtgctgcagtgtgagcaatcgaaatcgcgtcaagttctatcattgtctacgggagcgcagcaaactccacccataaattatttgaaggcagtagccatacagcacagtaaaattcctaatcgagccgtgaaatcagcaccattgcgcgtcagcagaatacacgaatccgtaatccatatacaaatgcttttgatatcaaccgtggaaccacaaatcggagacggagactcaattgtcaccatcatcgacaacatcgtagtaaaacctaacagttgtaaacttaaactgagcggtcccatcctctcgcatcagtgtcagcaaatgaatttggcttgctagacgatataagcttacagggcgacagtaaactggcaggacccgccagaagtccatcacgtgtatcattccggattaaaatcgatcccaagtgagagacaaatcatagttcgttctgagaagagagtataccaatactatcgagattgaaagattttatcttactgattgtgtcacttgttccatctaagagtaaagtaacgtcctatcgccatcatgggtaccgtaaacgtcaaccgcaatgtggcggatgtgttctaccgttataaaatgccccggattaatgccaaggtcgaaggaaagggaaacggcatcaagacggtcatcgtcaacatggccgacgtggcgcgtgcaattggccgtccggcaacgtatccaaccaagtactttggttgcgagctgggcgcgcagactcagtttgactacaagaatgaacgcttcatcgtcaatggatcgcacgacgccaacaagctgcaagatctgctggatggtttcatccgcaagttcgttctttgcccggagtgcgataatcccgaaactgatctgatcgtgtcgtcgaagaagggtaccatctcgcagggttgcaaagcgtgcggattccacggtccattggaggtcaatcacaaagttaataccttcattatcaagaatccaccgaacgtgaacccagcaaaccagggcgcgtcgttgactgagggaaagcgcaaagcacgtgctaagaagggcggcgaaaatggcgatgactcgaacgccgctgacagcactctggatgcttccaccgctgccgatgacaccattgatggccaagctggacgcatgaacggagatgacgatgaggacgttaactggacggtagacacttcggaggaagctgtccgtgctcgtatgcaagatttgactgatggggcgaaaaacatgacagtttcggatgattttgataaaaccgaaaaggaacgcttggacatattttatgagctggtgaagaagaagcgcgattctggtgaactggagaatgttcaaactcataaggaactctttacggaagctggtctcctagatatccaggcaaaatcgacccttgtactggctgaactattgttcactgctaacattgtccaagaagttcgtaagcatcggaaattgctgcttcgtttcacccatgaagacctcaaagctcaaaaatacttaatcggtggtctagagcaaattttctcgctgcatgctgataaactaatggaaaaagtgcccaatatcttcaagctgttctacgacactgacatcctggatgagaagacaatcctcgagtggtcgcaaaaggtaagcaagaaatatgtctccaaggaggtagctgcgcaaatccacgagaaggctcttccgttcgtcaagtggcttcaggaagcggaagaagaggaatcgtccgaggatgaagatgactccgatgtcgagatcgagtatgatgatcgtgccaaaaccgactccctgcgcaaagaacctgtcaagcaagaggtcaagaaatcgaagcctatcgaggaggaagaagatggtgacgatctcaacattgatgaaatttaaatgtgtgttttctcccaaaatcaaaccaacaaaattccctgttctaaatttaaacattcatttttgaaatgccatttaaaacaaaagctgataacagtatcacaacaaccaaaaatctattgcgcaattcagtagcaagtaaaaagtcacaaacattataaacatgattgtttgaagctccataggaagcgacgatgtttgtaaatgttggtatgaacaaacatgtcagataaatagcaagtactgattggtcaattttgagggtaaacgatttcaattctataaaacaaaaattcgtttgtacaagtttgtaacccccattctttagtaataataaatttcaaagttaattttgagcgacacgaatagcaatattttttgacggggaacaatggcttggtttgattcaatcttttcacatttttaatactttatcacaaatttgctctgggtttaaattttatgcatatgttccatttatcacaaaaacttgatgcttttaatagaatgttctattcctacgcataaataaaagaaacctaagcaaacaaaatagggcaggcatcggtttgttcgaatggaaaactgaaataaatatttaaagatacgaataatattgtaatcaaattatgtttatcagcaaaaatacacaattc

SEQ ID NO: 984 - DNA, 913 bp, Aedes aegypti
cttgatacactgtatgaacgcatatatgagatgttcatagaaatatgcaccgagaaaaatttgtcttgtagcgcagagttacgagttccaagcggactgaaagcaaggtggttgctcatcagcaaagcttgcagcaagttttcgggttgcgtggcgcaaatttctgctcgccagcaaagcgggaccacacagtccgacgttttcaaacaagctttcacactctacaatacatcaacgaagagtccgttcagtttgctgcacgcgtacaaaattttggagtgtgctccaaaatggaagcagtacgtggacattaaggtggcggcagttaactcgtcgaagcgtaggcagtcggaagaaaacgaggatgatgaacccatttcaacggcatcatccagtcgtccaatgggccaaaaagcttcaaaaaagttgaagctgcagcagacaccaaatgcggacattggagctgagattgtgaaggcgagcaatcttctggcaaaagcagccgaaaaaaaggctcttttgtcacgagaaaggacgatggccataaataggatggcgaatcatgccataatgtccgtcgatttttcaacattaagcgatatcgcaaaaaagtattacaaaatagaacaagaaagaattttggaagaagcaatgccagaacacacagcaacaggttcgttggacgcaataagatgcgaagaagttagcgacgagcctgacgaggaagattttcagtctcaggagatgcagtatcttgaatacagtacggagagtgagtgatcaaatgattgtcaatgggtgacatttttttatttaattgattttaatttgtttttacgaaaattacagtattatttcgttattcgtttgaatcgtttgtcgttattttgttttaatacactagttgaacctt

SEQ ID NO: 985 - DNA, 1078 bp, Aedes aegypti
atgaagctgtttgtttgccgtggtgtttttgttgtttggtgcgcagcaaagaacatgagtgcatccaaatcccgcggaaaaaactggagtgtagaagaggacgaagccctgtgtactgcgtggttgaatgtatcccaggatggagcaaccgggacgtatcaaaaacttgatacactgtatgaacgcatatatgagatgttcatagaaatatgcaccgagaaaaatttgtcttgtagcgcagagttacgagttccaagcggactgaaagcaaggtggttgctcatcagcaaagcttgcagcaagttttcgggttgcgtggcgcaaatttctgctcgccagcaaagcgggaccacacagtccgacgttttcaaacaagctttcacactctacaatacatcaacgaagagtccgttcagtttgctgcacgcgtacaaaattttggagtgtgctccaaaatggaagcagtacgtggacattaaagtggcggcagttaactcgtcgaagcgtaggcagtcggaagaaaacgaggatgatgaacccatttcaacggcatcatccagtcgtccaatgggccaaaaagcttcaaaaaagttgaagctgcagcagacaccaaatgcggacattggagctgagattgtgaaggcgagcaatcttctggcaaaagcagccgaaaaaaaggctcttttgtcacgagaaaggacgatggccataaataggatggcgaatcatgccataatgtccgtcgatttttcaacattaagcgatatcgcaaaaaagtattacaaaatagaacaagaaagaattttggaagaagcaatgccagaacacacagcaacaggttcgttggacgcaataagatgcgaagaagttagcgacgagcctgacgaggaagattttcagtctcaggagatgcagtatcttgaatacagtacggagagtgagtgatcaaatgattgtcaatgggtgacatttttttatttaattgattttaatttgtttttacgaaaattacagtattatttcgttattcgtttgaatcgtttgtcgttattttgttttaatacactagttgaacctt

SEQ ID NO: 986 - DNA, 3362 bp, Aedes aegypti
atgtcctcaaagctactcaactacccctcggccagttcgaatccccatctgggagccggtggatcggcggggtcatcgacagccactaggaacggcaccaccggccacggttcctcacagctgaacttcgaaaatctacaactggatgacatcctgtgcacggtttgccagtcggtcctcgtcgaaccggtgttcctgccgtgtcagcatcggttctgccggaactgcctgagtgggaccatcgagaagaacaacctgaactgtccgtgctgtcggaagcggttcgggacgtggtatcggaacgcttcccgggtgaataagctcgttcacgagcagctgtggaatgcgatccagagccagtttcgggactatctggacgaggacggaacgggccggtgcaacgggaatggaagcgttggaggttgctttgtgccgcaaaccgaaagcgtcatccacctcagcgagccgggtgagattcgcaaggagtacgagactgaattgcagcgatatcgcaaggaactcatcgaggagaagaaaaaggaactggccgcttccgaaaagtacatcatcaatctctacaagcaggaaggcattatcgatctggtggacagcagtgaccacctgtcgatttcgtccacgactagcactccggaaccgcccgctaagaacaggaatccaccgcaacccgccaatcaagaggccaaagctcacgagatagtcgaagatgacgaagaagccggcccttccggttccgggcatggagagaaagctgacaaccaaccgccaggggttcaaaaccagaccagtgtggtcaccagcagtagcaacaatgttaattctactagtcgtccggaaacatccaagtcgcagtccaacggaagtgtcatatccatttcgtcgacgtcgtctgcctcgggagcgtcgtcctcgtgcatttcatccgcctccagtcggtatagtttagtcaaacagcagccgacctcaacgaaggctcaaagctcgaacgaggtcagcaaacatggcagcaacgtgggcgcagttacgaaaaaggtgttcacgatggccgagctgaatcagaacgagctgtgcgtaaaacccaccaaactgcaccgacgaaactctagtcaagccgtggacgacgaggacgatgacgatggggatagtttgcggtccgagttgaaccacttcaagcccatcttcgccacgacacccaagagttgcttttcgtccaaggcgatcgttcgagttccttccgtgcggccggaaaccggttcgcttccatcatcgaatgtcgaatgttttagtcccagcaaaagtcccttcaagccaatcgacccgacaacgccccgtcgatcggccttctccgtagtaaacgtgagtctgttcactccgcccaccaccaccgatgccaaaacggcgaaggcccagaagcgaaaagtggcggagtctgttggcaagaagcagaaagcagaggctccatcgtcgtcggtcaaggcgaagaaggcgaagtctagcaaaaaggcgaatgtagtcaaccccgacacagaacgtcgtaaacgaaaactgaagttttcccctcaaccgaaagcgaaggtgaaagtggagccttcgagtgccagttccaacgataggatcacgcgaaggtccttgacacgacagcccagtcgactgaaggatctcatcgtcagcgatcaacagcgacgggcagcattgatcgaacaggaacggcgagatttcgaattcgcacaaaagctgcagaagaagctcaatcgcacaaggggagccacgatactggtggtagattcgcttccccgggaagctcccaaaatcgtagctaggaaacagaacagcacctactcgctaaggcggcacacgatggccgttcaacacgtggcagtggccacggaattgccaccaccgccgccgagtagtaataattcgtccagtagaagcgatagcagaagagaggcgccttcccgcaagagaaaagctccatccaaggtgaacgaatcgccgaaagcgattcaagcgccaaccaccccaaagacgatgaagcaaatcaaaaagcctaagcgacaggcagaaactaagacgacaaagacgcgacaaccttccgtgcaagaggcgccatcaactgaagaagtcagcagcgagagcagaatcctacgacggtccacgcggatccgatcctaaatgggggggaggtgttgagggagggaccgacaatctgattctcttcaaaatgtgatgttttctattgtcaaccggatgcggaagcgttgacgatcggataaggtaaatgtgatcatagtgattcaaacacacccgaccgagagatggagagggagtctacgctctctctggaatggatgacgactgaaatgatctaaggtaggtgttcaatatctgtgtgggcgggacgacaaggcatcatggtcaagaaggatgcgcgagtgtgtttggtctacttatatttattataatcattcgtagggtatgtatgtaatatgaatttagggtacagttagtattattcgacgcaaaccgacgcaatcattttccccattctgtttgtttctttgtgtatgaaaaggttttttttttcctataactaatatgcagaaagagtctcgaccccaatgtgtaaatagatgttttaaactgtcgatggtcgcaaaattccttactcaagaattaagaatcaaacaaaacagatggtggttaaaaaaatgggtgctcctttttaaagtttgcggaaactctagaagtgaaaacccttttccactgcaacagaacagaagatagacagaaggtcgcaaaatacgagcggacaaacaatagcaacgaagtgtgagggttctatgaatttcccgatgttcggtagatgtaaaatattagtagtaaagtccatatgtgtgtagtaacagtagcgcaatagcttattaaagataaaaaacgcaaaacataacaaggccaaaatgtgtacacaactcgtgaagtctcaaatgcggtttaaacttggatagatgaaaacctcctcgttctgatgtctcttattctaaggaaatggataaacgtgtttttggcttttagctaagggttgtacaaccatccgtgatgtcaacttcaggaaactacattctggcaaaaacctaccagattattattattattatctttattaacgagatttgcagcccgaggctggccggacctgccagattcataaatattttgtttagtacagtgtttctcatactttttcgacttttgtccccttgaggtcaatattaatcttcttgttctgtataaataaaaatggtgtttatgtcacggcatggcatcggaatttgaaaatccat

SEQ ID NO: 987 - DNA, 696 bp, Aedes aegypti
atgataaatcatgaacttcaagcattcgaacgttgtccccttaggttccctatcggaaccattctggatccgtaccgatggctgaatgatccagaagcggaggaaacccaagtctacgtctacgagaagcagaacgaaattttcaagccgtttttggacagctgggaacaaccgatgcagaaccaggacgtattgtacgtacagaactccctagaagatgaacccaaagtattcctggatccgactgccctgtccaaggacggaaccatcgcgctgccaaagtggatcggattgaaccaagctgaaggtgaggggcgtcagcaccggagaggacttcccggagacgctccaacacaccaagtaacggcttcctgggccaaggacaacataggattcttctatgctcgctatccggtggtggatggcaaagtggacgggtctgaaacggtcgccaacgagaaccagaagctgtacttccctaggggtggcgattcccagggtaaggatgtgctgattgtcgagtttccggaggagccctcgtggagatcaatgcctgaggtatcgaagcaagttggaatcttccgacaacatcacagtaaagttgggctttgtgaaggtgttcaccaagttcgattacattaccaacgagggaagcatgttctgattcagccatgtggccacaatggtcatatatga

SEQ ID NO: 988 - DNA, 756 bp, Aedes aegypti
atggaattcgactgggacaacatcagcatcggggagcccgctttgaatacatccaacagttatttctttcgtgacatcaagatggaaaagggtgacgaaccgaatctggactgtgcggcttcgtccagttcgtcgggaaacagtgcacgtatacatcatccggacgacaaagcgctcctggaagagtaccagcgccaccaggccaagacgagacagggcgaaacgtgtgaccgcgcctaccggtatgcccaagtttacgagaacaaacggaaagccttgcgcgagaaggaggagaaacagctgcaggagatgaagaagttccacgcccggccggcgccgaatttcaagagcgggtccaagaaggagaacgccctgccgaagtttaccattccggtgacgccgaagcagatgaagccggagcgaatcaagaagcatgcgctgcaggttaaaaaattggaggaccgcaccaaagaaccggaaccctccaaagagttcaaagcaaacgatgccaaggtgctcaaggaggaacccttcaagccggccctggtcaagacggtgatcaagtcggcaccgttcgagctgagaatgtcgtcccggctgcaggaacggaaacagatcgatgagcagcggcagcgggccaaggaggagaaggcccgccgggaagcggaagagaaacgattggccgaggaacgggaactgaaactgctgcgcaaacagaaggagttcaaagccaaccccaatccgttcaatcattaa

SEQ ID NO: 989 - DNA, 1350 bp, Aedes aegypti
ggcactcccgcagcagcaaacatgtcctctcccagtgccggcaagcgtcggatggacaccgacgtcatcaagctgatcgagagtaaacacgaggtcaccatcctgggaggtctgaacgagttctgtgttaaattcttcggtcccaaggcgacaccatacgagggcggagtgtggaaggttcgagttcacctgccggaacactaccccttcaaatcgcccagcatcggttttatgaacaaaatctatcatcccaacattgacgaagtgtccggcacggtttgcctggacgtgatcaaccaagcgtggacggccctgtacgacctgtcgaacattttcgagtcgttcctgccgcaactgctgacctaccccaatccggtggacccgctcaatggggacgccgctgccatgtacctccacaaaccggaggagtacaagaagaaggtggccgactacgtgcggcggtacgcgaccgaggaagccctccgcgatcaggaacctaccgaaagcaccgatagcgaatccagcatgtccgatttcagcgaagacgaagcgcaggatatgggagttattacaacggctagccacgatactaacccaattattactattaaaaagctattacagattaatcgggagggaagtgcgccgaagctgccactacttcaaggtggttctggagatgagtatactgtccacaagatcgatttgtcccccaattttgaagcagcggctttgagcagggcagtcagagcacatccagtaaatgcgaccggtggtgccgctgttttgcaatataccctgattcgcgatacgaagacagccaagaaagcgtggaaaaatcttcagaaacaccatcagaagatgtcgctctgctcgaaggttgcagttctgaagcaaatttgcaacaagacgtgtaaggacggtgacgacatgcagcaccagctattcgagctggaagaactgtttgggaagctgtcgtgtgctggactgggcctagaaagccgttcctacgatgacctgaatcttgagctggtaaaaagcaagctggtggatgaagtggccaaacgggaccatgggtcggcggatttagcgatgaagaaaaataagccgctggtgtgtaatttttgcaagcaaactggccacaagcaaaagcagtgtaagttgtatgccaaggaggtggaatcgggaaaaggtcgttcaccgaaagcaagaactgcacgtcatgaagacgcggtaacatttgccctaatggccggtgtccaagcaaattttagtgagtggattgtggaacatcccggcatatgtctggcgaacgaggatttttcaaagacctcgaagaaagcgttgtga

SEQ ID NO: 990 - DNA, 2358 bp, Aedes aegypti
taatttgtgtaccatcccttacctacattatcactatatgaatttgagaccctaaagcataaacaaagtaatcatattctagcacagatataaggttaaccgtgtaattgtgatgcgctgttttaagtggcttaagaactgcatgtgcttagcgaggcgactaattaggtacttatgctttcatttaacccaaaattaattataaatttagtctggagagtattcatcagaagaaaccatttcattttagacactcccggtcaaactggaacgggatacctaacatctgttgtaccgcaaactgccacattctacatgatcgaccgcagccacggcaaaatagaccaaatattgtcctcccttcagaacgtgacgatgaggttggaaactctgccggaatcccccaagaccgtatttggcgtcgagctggagggaaccatgttccgagccgttcgcagtaaaccggactgtggatggccgtttctaaggttgttggatgtgggtgatgtgcttccctttgcggactcgatgatgctttatcagttgaccaaattctatcagaatctgccaccgctggctgtccgttgtcagcttgtggaagtagctgatcaacctcgttgtaaagacttcaatcggtatctcacgagcaacgtgtacaaaaccaggaaattcgagatcttcgcgcgtgacgaggacaatctcctccacgtgaagctcagtgcagttccaaaggtggaccgcaatggagtggtgaagtcgaagcccctggaacccgctcctcctgagtataagatttcggagaaaaccctaactcaggaacagttggacatcctgtacgaggagcccctgaacaccaccaacgtcatgaaggccaccctgggttacgtcccgaaggacgacgtccggatttgtccgttctacgatccggctattcagggttgcttcaagggagcggcctgtcggctggagcacgtggccaaggatcccgacggttggacccgggatcgtgccctgcacaaggctaaaattcgtgcccaactggtggaaccgaagatcggagcgatggtgaagctgataccgacgaccatcgtcagcgtggaggagttctacggccagctggacctgaaggaatgcagcgagggtttgcggggtctgcagcagacgctgaacgatccgatgtacgtgagggacttccgggagatggaccacaagccatacgcccgggagctggtgttcgcgttctacgcggccgatggccagtggtaccgagcggaagtgctggaatacttccacgatgggttggttgaggtgttttatgtggattacggcaacaaggaaaacgttcgactggcggatttgcgcttgtgggacgatcgattcgattaccttccgttccaggccgtccactgtcggttggccaatgttggccggctgcgggatgatgacgttcgggcgacggaagcactcagagaggagatccttgatcggttggtggtcgtcgaagtgctagacatccgctcgtattgggaagtgctggtgtacggagccggaatgcaggacatcgggcaactgatggtacgaaggaatatggcccgcacgaggcaaccgattgtgatcagcgaaaagcacgggctggtgcctgcttagcataagtttagtttaatgatttttgataacgtttgtgttccatgaagattctcgaagttttaatgtgttcgtaagcgaagattttttattgtactcaaaatattccatgtcctagttgtaactcgttaagaaacataattttgaatgagaagtaaattattgggattttccatgtatcacatccgttgggacgggtctggatatcattgcgatgcattcaagtttcacaagttcgatattgtagcgctgcaggaggaatctcatatctaccacgttctgatcgatggatgacatatctccgacattatcgacgtcagggtctaactcgggatgcttatttcgactctgaccactacctggtaatgttgaacatgcactttaaaacgtacggtaccgacgcccgcatcgatatgaccttaagcgactgaagcgacatagcgctatcaatagcaagtattgctggaagaggatttgcgtgccgaagtccctttcgaggactgctggagtttaacaaaagaagccatcaacgtcgtagacgagattattgccggagtattgtcggatacgtcgaacgaaaaagacgggacgattggtccgatgaagagtgattccggaagcgacaggtgcattcgcttactacttgcacaagtgtctaaaagaaaagctaacacctgttagccataggaataagatgggcccccatattccaca

SEQ ID NO: 991 - DNA, 2855 bp, Aedes aegypti
ctcgatgcactcctttacttgctgatgtttttgcctttctctgctatggtcctgccattcataatctctctgtcttcatgtattacacattagcgtttcgtcaagttctatattagtacatatgcactgagcccacattctgggtattcgatggtgatcgcacatttactttgtatgaagcatgtcgatgtgcggtgctgttgctgaggcgtgcagttttaattagtattacagaaaaatagccgcgtctggcgattcaattgagtgagtccattctggaacggcggatcgtctcgtcgtcatcgtctatcgtcttcgtcggggtcgaaggatttcaactctttcccagagtagtagaacttgttgcaattggaggaatttttacacaattttgtgaactaatgttgtattacttgtaacgaagcgggctaaaatgtgttctaggatagttttagtgcaattgttggcggtgagcgtcatcgcgttaagtcaccgaagcgtgggtgaagaaaaacctccactagtgtttactgtagcgagtaatgcaaccgaaggatatttgcgatacattcgttcggctaagtattatggtatagaggtttccacacttggtctgggaaaaccatggctaggaggtgacatgacccgcctaggcggtggctacaaaatcaacctgttgcgagatgccctgaaaccctataaagccgacgatgaccgcatcgtattgttcaccgacagttacgatgttctgtttctggcatccatggagaaaatcatcgaaaaattccgaacatttgacgcttcgattctgttcggttcggaaggattctgttggccagaggaagacctgaaatccaaatacccagtgctcgagggtaggggtacgcggtttttgaactcgggattattcatgggatatgcatcgaaggtgtaccgaatgctgaagaccccagtgaaggatacggacgacgatcagctgtactacacgaaggcatatctggatgagaaacaacgaaatgagctcaaaatcaagctggaccacactgctgtactgttccaaaacttgaacggtgttgaagaacaagtagtgcttgcacttgatgagaatggaaaagaagccttcctcaagaacacggagtattcgacggttccttacatagtccatggcaatggaccgagtaagttggtattgaacggctatgccaattatctagcaggtgcattcgttgatggagaatgcaaaactattaacgaggatctcattcaattagatgaagaaaatttaccaacggtcatgttggcgttgttcattgagaaagcaactccctttatcgaggaatggttcgaaggtatcgctaagataaattatccatccaagaagatggatctgttcatccacaataatgtcgattaccataaaccaacaatcgatgactttatagagaaatatagcagtagttatcgatcgttccgtatggtggactacaccgacgattatgaagagctagctggacgatcgctagctgtggatcagtgccttaagaagcagtgcgactatctatttgtcgtcgatgcggacggtcacattgacgactcggatattatccgtaaattgatagtgcaaaataaaagtatcattagcccaatgttaaaccgtccagagaaagtatggagcaacttctggggagcactaagcagtcaaggcttctacgctcgatcaagtgactacatggatatcgttggaagaaaaattttgggacagtggaacgtaccctatatctcaaccatctatttagtaaaagcatccgttttgcctctggtcagttacgaactacaaggcactgacccagatatggcgttgtgctggcatatgcgagccaaaggaatcttcatgcacgtgatcaacgcagaacagtacggccatttgatcgattctgattactacgatacgaccaaaactcatcccgatttctatcagcttttcaacaacaagcacgactgggaacagaaatacatttcgccagagtattacaaacagttagaaaaagattatgtacagattcaaccttgccccgatgtgtactggtttgctattgcgtcggaactattttgcgatcacctgaaggagattgtggaagcttttggaaaatggtcggatggaacgcataccgacaaacgcttgcaaggaggctacgaagcggtcccaacgagggatattcatatgaatcaagttgggttggagcaggtttggttgaagttcttacagctatacgttaaacccctgcaggagaaggtcttcattggatattatcatgatcccccacgatcgcttatgaactttgtcgtgcgatatcgtccggacgaacagccatcgctgagaccacaccatgattcctcaacttataccatcaacattgccctcaacagagctggaatcgattacgagggaggcggctgtcatttcttgagatacaactgttcggtaaccgatactcgcaaaggttggatgttgatgcatccgggtcgtctcactcatttccatgaaggactgagaactaacagtggaacacgatacattatgatttcgtttgttgatccgtgaatggcgaaggagccactgtcagcgttgggtaggcgcacgagtcaaccgaaattacttagtttatcgcgtcgacgacatatagttgtaataaacttaggggaacgttccctgtaagtcagaactgcatttcagtttcgtaatatttaatgtgccattttgtctgattagcaattttcagtgagcgaaaacatttcgtacagagtgaatgtttatatttttaaaagcaataaaagtatcatcatgacaatataca

SEQ ID NO: 992 - DNA, 3375 bp, Aedes aegypti
atgcaaacgaggaggtcctgccgaatggacaccgccaccaccaccatggacatcatggccgaaaccagaagtagccgaagttgtttgaggcgccggaggaggaagttccgggcatcggaggccaactgttccaactggaggagcgtttggagcagtgtggcgttattgctcatgacgctcccgacgctcaattttgccatagcgcccaagtacgagacggcgtacgcatgcgaggggaagacgcttatgatcgagtgcgaaaatggcgatttgatcaatttgattcgcgccaattatgggcggttttctatcaccatctgtaacgaccacggaaacgtggactggagcgtcaactgtatgtcgccgaagagtttaagggtgctgcactcgaaatgcgctcagaagcagaactgttccgtgttggcgtcgacaaacatgttcggggatccgtgtcctgggacgcacaagtatctggaggctcactaccagtgcgtttcggcagctcagtcgtctacgacgaccaacaggcccagcccaccgtggttgaagacctcgcagccgatagtgtggagtacgtcgacagtgcggaatccggtgttgagtaagttgaacttttccgatccgctggcgggtttcggggtaacgtcttcggtgacgagcagcagtatcggaacaacggcagtcgggaaggtgaaaccgacgacgccttacaagcagcagacattgatggtgaaccaacagtcgccgccgtcgtttcgcaacaagggattcgacaacaagagcgtgaacgatgatttggcaattattaagacaattagtggtgatggggcgaaacgggggaagggtgaaagtgccccggaagatgatgaagactttggtgaagatgaagactattttccgacgcaaacggcagtattatccaacgctaatagagatagggatagcagcggaagtgatggtagcaaaagctacgacgaaagcaatgtttcattaggtggaaaccatcctagcagtaagaagaatgatgataatcacagcgatagcagcagtagtagtaacaactataatagtggtagtaatagtaatagcattagtggaaatagcagcagcagcggtgttgtgaataatgtgctagatgtgagtcacgcgtgtggtccaacgacagcgcggaatctgttctggaatgtgactcgcgtcggggaggcgaatgtgcagccctgtcccggtggggccaccggcattgccaaatggcgatgcgtagcaataggatcgctgacgcccgagcagcggatgcacttgcagcaacaatcattactagatgataataacaaaagtgatattagttttaatagtaaccttagcggtaggaatggtggtgcggcaggatcgaataatggtggtgcggtggccacgtggtactcatatcagccggatctgacgcagtgtcgatcgctgtggctcaacaatctggagatccgggtcaaccagcaggactcgtcgctgatttcgattgccaacgacctgtcgcaggtgacgagcagcaaaacgctgtacggaggagatatgctagtcgcaacgaaaatcatgcaaaccatgtcgcagaagatgcatttcgatatcgaaaccctgcccgaccagcgacagcgggaagcgttggtgtatgaattgttgaatagtgtagtaaaaactggaagcaatctgttggatcagtcccaacatgccagctggctggatttgagtgtggaggatcagatgcgagtagcgacgtcgttgctgaccgggttggaggataatgcgttcctactggctgataccatccttcgggagcggcacgtggtacagaaggtgaagaacatcctgctctcgatacgagtcttggagacgcgtaacttcgtcaagaatgaagtttttccggattcgagccaagaacggtggcaggttagtaacgatcaaattgaattgcccaaagcggcactgatagagaacagcgaaggtggcctggtgaggatagtatttgtggcattcgatcggctggagcaaatcctaaggccacaatcatccaacatccagcagccacgtgttgatcagaacaaattagaacaggacgattcaagctcgactaagaatgaagcgtctgcagcgcctcgacagcgattgctcaacagtaaagtcatttctgctagtctgggcaaagggcgccacatacaactttcgcagccaatacgcatgattctgaagcatctgagaacgaaaaacgtttccaatccaacgtgtgtcttttggaattacatcgaccatgcatggtccgaggatggatgctacgtggaatacacgaacgccactcacaccgtttgcatgtgcaaccatttgactaactttgctctgctaatcgacgccattgacgagacgcaactctcgctcctatccatcatcgatgacgatatcaaaatcctcatctacatcagcatagccatctgtatcgtgatagtcataatcgctctgtttgcgctgaagctcttcaacggagtgttctccaaggttcgccgacggaatcaccagatggccaataatgctgcagcggatttgcatctaccgaaccacctgcagcaccacggtctgatcggtgctggtggtgatttggatgtcagcatccacccacatcagcagtataacgcgtcggcagcggccggtctgatgtccggaccggatggtggtcatttaatgcgtccgggcattggccacaatcatcacaacaacaataaccttgttacgactacgttcaacaatctgggcgctggggtcggtggaccaggcctcggaggctacgaaactactccgcaccatcgcctggccgcgcaggagcgtatcaataacaatgtaaatgccactattaatcacgctttgacatatcgcgctaataataatcaaatcaatttattacgttcagcaaatcagcagccgcagcaaactactgttactaccttacaaaccacatcatcagcatctataatcgcaaccgccggtggtggtcaccatgggccaatcggcgggggtggtggtgctagcataggtggtggcagtagtagcagcagtggtgccgagatggccgtgtacaatctaaccgaaacgggaacggccacgtccacgtcgtccagtgcggcggctatcagtgccagtagcataccgctgctgcatcaccaccatcaccaccatttgcatcatcatctgcatcagcaccagcatcaccatctggctggcgtggaaggtggtggtgggggtggggtcatcggaatcagtgacgttgtcggagttgccggtggtagaggcagcatcagtggcgttagcatcggaagtagcggtaagcggaatctgtag

SEQ ID NO: 993 - DNA, 2259 bp, Aedes aegypti
attgctttaggaacctattcaaagaatatatcagaaatgcataaatcacgacaaatattacatttctgaaaccagaataaagaaactactcctcctaatgaaatctttgctatcagcgtagctgtcactctctagtgacaaaacagtaaaataggacagctttgcgaataccaacagtcgccgttgttcacttccttcaccgattgtttctgcagtcgcaattgatgaatggtaatatgctcttttgctacctatatcgcagggtttttgacctaatctccaatgtttgccataaactatggtcctcaaattgttttcgacgatctgatcagtttgaacaaaggggcccaacgccattgtcatttccatgttgctaggcgtagaaatcatctccgcataactctttgtattttaatttttgtgcgttagttcttgtcctatcattactttcaaatagattttataaaatgaatatagaagagctcccggatgagatattgtgccgtatttttcaatacttggatcggtacgatcgtcgagcggcgatgctcgtatgcagccgttgggatctaataggtttcggaacaggtgcgaacgtagtgctcaagatctatgtctgcgaggaggcctatcaaaggtatgagaattttggcctcatgcggtacagctacaaggaaacgttggaagctctgctcatcagtgatcgagtatatcaacatatttcgctcatttgggatacagagaaaagaaatcaaaaaaccatactgaacattttgagtcgcttcagtccaactgtttacaccttggagatgcactcatgtggatgcgaaacagatctgaggtgggtggcaagtgtcttggggatgcttccgaatttaaaagaattgaatatgaacggcgttttcatcgatgaagaaacgtttaggcgcatcgatatgaatccaatgtactaccttcatacgctacaggacaaacagcaaatttcagcattcgtttataatgcaccggatgtattcgcctgtgtcaccacactgtacgttaggataacgaaggacatccccttattagagttgcttaacggactaagccctcagctggtgcatttgacggtatatatgacaccaaaactgttcgagcagtattctgaggaagaattcccctcgctggaaacactcgagatattttctcttgatgaaaaggtagataagtccatagaactccttgcacagattgtgcttagagctccgaagctgaaacgcctgaagttgctagcaagaaatgatatttctgtgctatcgcatttggagccactttatgggacactagaaaaactcgcaatctacgttgacacgttgaaccccgcgctgcttgaaatgatcgaaaagtttgagaagctagagcatctctggttacgcggcatacctctggtgaatttcaaagagccgaacaacggattaccgatactaacgagcgttcgggtactggtgatcgagtcttcggaaacggtgcctttttgtgacgaattttatcgcgattgttttccaaatttgatagaacttcagctgcagttcgcagatcccgatgatcactgtctgaagattgtggagcatattccgacactgaggcgattgatcatccgaaatccgtggtacggaactgatctccagcattttgtggaattttgccgcaagctcaaggcgccagagtttcacataacctgtttcagtatgtataagggacaatggcactcttcgcagccggttagagaggctaagaatctagagaaactctgcatcaatgcggctagtattgaggtgggcttctacgaacagatgatgaagttgatgccggcgcttaaagtgctccagctcgccctgaaaaatgactgcccagatgaaacggtgagaactctggtcgatcagttccctcgttgtaaattagtgcgagtgctccggcccgatgcgttatttttgagtgacacggactgaagtgttaccgggaaaactctcttacatcagcgaaacttcagctacggtcatcgatatatgtttgcatgtgaattgtgcttaatcttagatctgtaatttgttttaattatgtttatatgttaaattgttggtcatcaaagttttaggtaagtgcgtttcgttagattttattagtgttctaaagcatgtttgttatgattttaaacagtgtcgtcttattcagagtcactcttagatgttataataaaaagcgaaactagtttgatcatca

SEQ ID NO: 994 - DNA, 806 bp, Aedes aegypti
gattcatctatcgggaggaggcagacccgagcatcagggccatctcacaagagagcgatgacgcttgtttgtttcggttcgcgactagcgggatcaacatcaggttgttttcgagcttttgcgcattgccgatctattcgtaaacaaaaacatgtaaagttcgtagaatgaagagtgctggatggcaaacttgtaaacagaagcattctggaaagtccccaaaagtattggagcaagcgaatttttgtctgtgccattcaattccaaactatatctacctggttttctgatgaatattattttcgttattagcactaagtgaccaagcgactgaagtgtgtagtattttatacgttaaataactaaaaatttctgccgaaacatcatccgtgaagcaaacaaattggctgggtctagtgaaagttttacctaggcattccgatgaaaaatgtgaacaccgtataactggcattgcacaagttgacgaatttttcggaacaaatgcgaaagattcccaaacatttcacctgggggctgttgcacgtgttcatccatatgatcatcaaacttgttcgcattgccacaaagtcagaatggtgttctcgagagtccggaagttttgcgcataactcgtatatgctttgcccaatgccgtctgcctgtggatggataaagataaaatattccttccaaatgaataggtttcaaacatggtactcacgacatcatcaagtgaatccacgaggtgacaccaacagtagcactcgatcagcacaaccatgaacagtgaaatgagaaaaaccacg

SEQ ID NO: 995 - DNA, 863 bp, Aedes aegypti; identical to SEQ ID NO: 178

SEQ ID NO: 996 - DNA, 2102 bp, Aedes aegypti
aagacgaagaaaaacaaaacagtgcacaatctagttcggacctgtcctggcctcccgtgtcctgggggaggaagtagcagttcaggatcaccgtaaccggggtgcaatgggttacgatctgacgcgcttccagggcgacgtggacgaggagctgatctgtcccatttgctccggggtgctcgaagagccactgcaggcagtggcatgcgagcacgcattctgccgggcatgcatcacggagtggctttcgcgccagccgacctgtccggtagatcggaatcccatcaccaacagtaatctccgcgccgtgccaagaatcctacggaatttgctctcccggctgaacatcagctgcgagaatgccatctacgggtgtacgctggtcctgaagttggacacactggccacccatatcgaggagtgcgagcacaacccgaagcgtccgcttccgtgcgagaagggctgcgggtttgtgattcccaaggacgagtacaaggaccacaactgcttccgagagttgcgatcgctggtgcacaaccagcagcagaagatgagcgagctgaagaacgagatcaacgatcagaacctggtgataaacgagctgaagcgagaactgaatctggtgaaggattttatgagggcgatgcgcgtgtcgaatcccgcgatgcgggccatcgccgatcagatggagcgggacgaagtgacgaggtggtgcaatggactggcgcgagcgcgggtcacccgatggggtgggatgatttccaccccggatgaggctctgcagttgatgattaagcgggctctctcggaatcgggctgcccgccgcatatactcgacgacctgatggagaattgtcacgagcggcggtggccccgagggctcagctcgctagagacccgccaaaacaaccgacggatatacgaaaactacgtctgtcgacggattcccggaaaacaagccgttctcgtgctgcactgcgacaacacgcacatgtccgaggacgtgatggtggagcctggcctggtcatgatatttgctcacgggatagagtaagacaatccgcggacggcaatcagcgaagcgagcttgcctgtgatgctgctcagtgaacgagaagaaatggaaatgctacacttcttggaaacgttgagattcgaatctttatacactacttgaaacaccggaccccagaaatagaactagattattaactgacttaacatcacttgccaccaccggttttttgaagatggaaaaaacacagaccaacttctcattattttttcttcaaccgtaatttgtatatgcgtaaaaagttttgactgcttcggtgccattttgtttgcaaggacagcacaattttagcttaacgacaaggaaagagcacaatcgcaatgcgggggttggaaagactcctcataggaatattccgaagtgtcaaaacctcttgccaacatataacccagtttaatagtttcaatgcaacgctttttcttttcaatcaattgcatccctccaaacctcaaccttgaatcatatcagtgtgtgtagaacaagaagttggagcgaacggaatatgatctctggatttggaatcccccttgaatcagatttagaacaaacaaaaaatcaacttgttgcgaagtagaaagaacgtgagagagagtaaggatgtttgaaagggccaacacctggacgagagtgggttgaatgttgtagcaatttgcgcgcttgtttgaagtcttagtttttgcgttcgttttacgaatcaaaattcgattgtttgataggaaagtaacaatagcaagcaagtcaaaccggttaggaattgccaaaactattttttttttctgcgctagtgattatgattgcccaaaatgctatgatttttttgagtttaggtttagattaggttctagttttgacttttgtactagcagagagaacggatattagataggatgcgaagcaggaatttctcagttgctttggaaaagaggccgaggaacgagttgcattgattttttttttctagcctgataagtttaattctaatgcttatagtgtattctgaagaaagaataaagaccactgtcgatgg

SEQ ID NO: 997 - DNA, 3217 bp, Aedes aegypti
tgtttaccgatgttttatagggtcctcttcgaatgttagtccggggtttttgtgccgactctcttttaatcgaatgactgaattctatacctgagcacccctagcaaaacacaactcgcgcggatcgcaacgatcacaaccgcgagtaaacaaacaaccgtttttaaaaccgctgaagttcgggaaagtttccgtccgtgttccttgattttcgcgtttaaaaagccggattttcgtccgcgggagacgctgtgctatgtccgagtccgactcgccgcgaagcatccttgcccggttggaacagctcaagcaatggcagcaggaaaagcagcgcgttttgttgcagaatcaaatggcccaacgggaactgctcagccaggaacagcagaaaatgtacgccattctggggctgaatcacgggggagggggaactgaccccttatcggacggtgtagatgaggaggattcggaatttgaacaaaccaacatgcagcgacaagtggcaggggaacggaggcgaagcgctagggaacaacctccggttgaaagtgaggaggagattgagagggaaccagttaaacggaggggcaagttacccgattcaccccccaagaaagtcccgacgaagcccttcctcaagcgaggcgaggggctgaaagctaggtttaaagtcgatcccaataggtttaagttggacaatttgcccaagtataagtatgctaatcttgctaaatctagagcgcaaaatgccaagaaacagaagcaatccgaacaaacgatggacaagtctcaaaaccattcgggtaggaaacccggaattccgagagaagagtcgccgccgagggtggctttggacattaataaggtgcaagaccagaagctaattgttcgtcagccggaagggcaccgaattccggttgatgaaaacggtcatgacgaggagagtgtggatgagacggatgacggcgagcagattagtttacttcccagtttggaagcgctgaagctgagacacgttggcggggaatcgcaggacgatgcaccacccgctcagccattagtccgaccgaacgtgccatggaagcagcaactacagaatgaccctatgctcctgcggcagttgaaagaactgaaggacctcaatctcttcgaattgctcgagcagagactggcttccggcaattctagtatcaattccgacgccagtaccctattgaagctgctggctgacaataccatggacctgtctggacttctgggcctctcggattccactatagctcctccggtcgttcccagtccaccggaagagcccttggtgcaaccggaagaagtgaccgcgtgtctgacaatccatcccattccggatcccaagagacacttcctcaaggatagtgatctgtcgagtagttcaagctctactgatagcgattccgaggatgaggagactgtgcacgtgcactttgcagacgagcaagaagtgcaagaaatagaggaaactgaaaccgatgtcgagtctcacctagaaaccgtgaactacagtcgaatgtccactccgaaggacaaaccgaaccgtgcttcggtggaagcggaagatcgacgactagaacagacggaaaaggtggacgaggaacagaaacgaatcagagaggacattctggagaagagcgaactgctcaagcagcgactggctgagctggagacagaaatcgagagcttccgcaaggagaatgccgagctgatgcgtatgaaacaggaacatgagctggagaaaatcaagcttgaacaagatcgggaagaaatgatggagaagctgaatgacgagcgcatcaagatggaggtttacttccatgacgaacgcatcaagattgacgaagaaaggcagaaggcgttgaaggaagccatgaagccgacgaagaaagagaaagaggagatcctgagactgaaggaacagatagccgaaatgcagaaggaatcgaaagctaaggaggcgaagcatgcgtcctccttgtcacgttttcgttcgcaaataaagaacctggagaaggatctaaaagaaacccagctggaactggaggtaatcaagaaagacaacaagaaactggaaacggagaatgctcgtctcaagcgacagaacaacaatcgcatgctgctggaaatcaacaagaatctggccaagctggcaggtcctccggcggaaccttcgggagaaccacgacgcaactcatcgccggaaaagccgcgaaaatacaccggcattgtcaagatgaaacccatcgaggtggtggaaaagaatgtcgttggtaaggtgacgacagcgaaggtgataagccatccaaggcagagcacagatagtaagaaaacgaaagtctcgagtagtgacgatgactccgagtcggattattcttcaagtgtgagtgaaggagactccagtggtgacaaaggggaccgaacaaggtcatcctattttcgtggcaaggcgaagaaggaactgtttcaaacagagccccaaatggatcagagtcaatcggaggcaccagcggacagaagcccaaaaacggctgaattgatcaacagcctaaagcgtgaagtagtcaacgaggacggaagccgagatatttggtatccgaatgggaacctgaagaaaatttcaccggacggattggtgatacggatgctgtacttcaacaaggacatcaaggagaccaacatgagcgaaggaacgaccaagtactactacttcgaaacaaacacctggcacacgacctacctggacggtttggagattctggagtttcccgacggccagacggagcaccgcttcaaggacggctcgaccgaggtgcacttcccgaacggatcgatccgcacgacgaacccgaacagtgtggacattgccgaggagtggaagtatccggacgggtccacggtgatcatcaagaagaatgacgacaaggtgatcaacctgcccaatgggcaggtggagatccacacgaaggcgcacaaacggcggatctatccggacgggacggtcaagtatttgtatccggacgggagccaggagagccggtactcgaatggacgcgttcggctaaaggacaaagacgggaagctcatttccgatacgggtggcccgggatgatcggcgcattagtacaagtaagtggcaagatctttgttgtagattgtaataaatttttatttttttactatatta

SEQ ID NO: 998 - DNA, 2711 bp, Aedes aegypti
gccatcatcatcagcatcatcatcctccgccttcagtcagttctgtccgaacagtcatacagccagggagagtaaacgcacggtggacggatcgggaaaactctgaaagatatttcgttaccatttggggcacttattagaatctaagtgctatatgggacattagtttgtgttgtgattagtcaaattatggtaaattcctgtcgaagtgcgtagtcgaccccaaagatcctagttcctagcgaagaaaaatcttgagtgctaccacactgaaccgatttcgagcgggtggtgaagaaaaccagccaagtgccacagcaggatgggtctgaaggactgtcaaatagagttggataatccctggaacacgtattatgccggccagacggtcaatgggaaggtcacgtttacattcgactcaccgaagaagattcgaggcatagtgatcaagttctcgggagaggcggaaaccaaatggagtcaaaccgaaacgaaaaccgaccaggaaggcaaacagtatgaatcgacaaccaaccttaccggtcaggaggagtacttccagatccagtactatctgctgggcggcaagaacagcaaggaaatcgatttggaggctggaactcacagctatccgttcacgtgtgcgttgccccccactcttccgtcatcgttcgaaggggaatggggcttcgtgcggtacacgatcaaggttacgctggatcggccgtggaagttcgatcaagatattaagatggccttcacagtcatctcgccggtagatctcaacgcgaatccccgagtcaaagacccattcaagttggagttggagaaaacgttctgctgtttctgctgcgcttccggacctcttagtatcatcgtgcacattcccgtgactgggtttgtgtccggacagacaattcctttgacgatcgaatgcgacaatgcaagtaacgtaggggtagaatccgttaaactggtactccgcaagttgctggctttccacgttcacactccccgtcgcgagacgaagaaaaagaaggaagtcgtgtcggaagtatccgtaggaccggtggaggccggaaacagccaaacgtggaatcagagcattcaaataccgccgctaccgccgtctaatctagtcaactgcgggatcatcgacgtcgattacgacatcaaggtggaggcagtcgtttccggtccccatgccaacctggacggaaacattccgatcgtgctgggaacggtgccgttgagcacgttccagccgccgccaccgtacacggacagtcctccggaggtggacccgtcgatggcgccaacccagccggttagcccagctagtccaccgaatggggccggaggggctctgggttggaacatcgccgatggaggcgaaagcctgtatcccaatattccgccacccacgtttgcggaagccacattcaaggcacccaacatctccaacaagaacgacagcgaatttactcgctttgtgggaccatctgagtacgctccacgctatccaacgtacgcattcacgccatcggccccaccagcggacttgtagacccttgagcacaaaaccattttgtgccggattttgctcgaacaaaaaggtgcagccaggaaaacaaatgtcaaacattttttgttacatattacgtagacatcatcactgaacaatatatatttttttcgaataatataccatattgcaacgatacgaaaggtcaaaacgcacataaagtttaaaacagtctaggaggaacaaattcaccaattcttaatattttagtactgtatcatccacttttgtgactgcaatttacttatttagagaccggagcgatacaaataaaataaattgagttaggtagtcgaacatgaaacagcagagggagtgagatagaagcaatctaactctcataaaaaacacatcacaaaatcattaaactgtctcattgttgactgcttttccctatcttatagaaaaccattatcctcatactattactactactaaccaacatataaaggtgcagcttaccgtctttaccactactaccttcctagccttaccaattttaaacagctagaagtagacaagcatagctcgaataatcaaattcagtaatttgattcggactcacatcacatcattagaaacaagcttgctaccatatatgtagcacgtagatgttatattttacgcagaaaaaaaaactaggaaactataacgacacaaatatttcactttgaacaatcgtcaatgccaaatccggtaaccagaacagaatataaactgtggataacgaaaagccgttctacatcagagtgcctaggtttcaaacgaaactagaacacaaatcagtggaaatgccaaaacatgtgaagtttgaaaataacaaataatcatcttcctaaagaagacagaaaaaaatgaatgagagttagtcaggagttgaacaaaagtgcatgataacaatgatatttttgaactttggtcaaaccacaaaatacgccacactacctgtatgtgaggacagcataccgtcgtactgtaggaaaaaaaaaatattttgctaaggaatcgaacgaacagtgagcataagcaactaagtaggagtccgttttaggtaggttgttagtagttgttgcgtatcataccaattagactggcccagtttagtatgggagaaaaataaagttgt

SEQ ID NO: 999 - DNA, 2731 bp, Aedes aegypti
attgcactttgcgttgttgacattccagcttgcgatgcattgatttcgcaaaaccaaaacagctttgcaggtgtttttttcgctgtaattctttttataatattgcagctatttctagaacttttacaagcataaagttagtgaaagtgtgtccccaatctgtttgaacatgtaaaaagtgactgtatagggaaatccggtgcataattggcagtgcaatatagtgtaacttttgggtggtggtagtgtgaaatctccgactgaccggattgcaaatggagcaaaccaaaaaatgcttggattgggtccacaagttcagtattacggaaacgcggaggcacaaaggatacaccatctacaagatcacttccatagttttcccccggtatcttccggaggccctgtccaacgtgactctgtggaagcgcttcagcgacgtcaagaagctgtacaaagatctcgttcggaaacacaaggaacgtcacctggccggaacggttccccaactaaccgaaaagacctacttcaagcgattcgatccacgagttattgaggagcgcaaacgttacattctggagttgttggatttcgccggagcggaaccggttctgtaccaatcgcatgcgttcgtgaagtttttcgaacgtggcatctcgccggagggttcgcctttcaaaggtggcaacatagtggccatatgtgaagatctggccattccggtgccgaaggagattgagctgatcgatccgaacagagatgaggatggaagcggcgaggacagtgaagaaggacgcgatgaggtcagtagcagtgcgggagaatcggtgctgacagccaatggttcgatgggaggatccatgctgtcacaggaagaaatcggtggggcgatcagcaatgcgacgatggatggcgaggaggaagatgaggtggacggatcgatggattacatcgtggaagctgccatggtgttcagcagagcagttcaggcggaagctaacgggtgctataaggaggcattcgatcgatacaaggctgggattgacaagcttttgagtggagctaaaaatgataccaatgtcacaaggaagaaaatagccaaagaaaaaacttgcaagtatgtttcccgtgccgaggagatctacgagagatttctcctgtatcaggaggacgaccaagttcttcagctaagtccaatttctctggacgacccaagttcgccgattctgttgctggagcgcccccttaactatctgtctcggtacaaagtggttcacgttgtggatggacgagtcatgcaggttcaggacgtcaccgacaagaagttctacatcatgaaaggaatccgaaagcctcccgggttctgtcatgcgatgttcttccctcatgatgttccgtacatggtgcctctcgtagcttacttccagtcagagtctagtgtcttcctattgctgaaactgatttgcggtggcaaattgtgggatttcatcgccagttacagaaagaaggacgattttgtattggaaaatgaagaatctctgtctacagctggaacgaaccggaaagaagtcgaggcggacccaaatgttcaagaactatccaaccagtccgacgcgaatcaatcggtgggctacgattccggattcattgatctcgttaacgattacaacagcaaaaattccacgggagataagactgaacaagaggtgctcgaagaggttgaggaagcctttgaagcggatgaggtagaccatcggttggaaccggaaggcctggacatcacccaagagtacattccatcgttcgatgtcctctcgagggacatggacgtccaagatctggtaaactgtagccaacaactactaaggtctgtttcacagaccttggaaaagtcccaaaaagatcctgacaatatcgattcgattatggagcaacgggaggaagtgcgtgccgaggtcccgaagagaccccagcttgaaactagtcaattagagttaagaagcgctccagacgatggaatgggatttgatcccattccggaaggatgcataaaacaatggatcagcgagctggtcattgccgtggataatctgcacttcaatgggatcatttgcggtgatctaacgatggacaacctgctgctcggcccggagggtcaattgatgctgacgtacttttaccggagggaacaattccccaacacgagcgcgctctcgacggaactgcgtcaggaggcggtgcaacgcttgtacgttgctcccgagcgaccccttcaggccaagtcggacttttggtccgtgggggtgatactgttcgagatgctaacgcgcaacagtttcctttcgtgtcatccggcgggcgtactgtgctaccatgacatccagtttccggaaggggtggacatctccgatgaagcgagggagctgctcgaagggctcttgcagcccctcccggagaaccgattcgacttcaaggagatcatcgccagtgcatttttccacaccatcgactggagcgaggtgaaaagacggggccagatctgatctgctgcaattatgttcgacgacgtactacaagcggagttagtaaaccgacagactactactacccatatggaacaaagtttagtgcattagtgttattcaacgtgttagtatgtggaattacttacgaaaatttcgaatattttggcgatttcggatgtacaagaaaataaatgttgaaaccaaacgga

SEQ ID NO: 1000 - DNA, 1591 bp, Aedes aegypti
cgtctaaatagtgctaaaaccgcgacaaaaccatgaaaatcaaagcatcgaagaaggtgcaacccacggaagctaaattgcaccagctgaagaaatccaaaagtgacatcgtgaaaccgaaggagaagaaatccgccggtttgatggcagctgccgtgactccccacacgtttgccgaaaagaaggtgctggcggtcaaaaagaaaaataaaaaggacaaactagcagaattgggcaagaccaaatcgcagatctcgaccggtcaggttccaccgaagaaacatgaatcgaagccggaaaaggggttgggtaaacagcaaaaagctccaaaggcagatgcttctaaaaagaataagggcaccaaagtggcaaaatccgaaccaaaaccagaagcacagaaggaaaacgatgccactgaaacactggtcagcaggaaggccatcaaaactgcactgaaggcgtgcaagaaagcattggacgaaggctttgaccagaagaagaatctgttcggagaagatttgaaatacggtctgcagattgcctgtgtcaaaattccggatgtgccaagcagaaactgcagggtacaacttcccaatgccatttacaagaaaggtgatgatatctgcctgattgtgaaggatttggaacgtggccggaaacaagaacatgaagagacccttagcttttggaacgataaactgcgtgaactgaacattgacttcattacacaggtgattccgttccggcagctcaaacaggattatcgtgaatacgaaatgaagttgaagctggtccatcggtttgaccgattcctggtggatgcccggataaatggccatgtgtacaatttcctcggaaacaatttcatcaggcggtgcaaaaatccgacccctgttattttggacaaggacgaaaagatcgtcaaaagcctcaacaaggccctgggtagagtcacgtacaaacaaaccaacacgggaaggataaccgaaattcagtttgccacccacaaaatgcccctggagaaggcagttgagaatgctgagtcgcttctacagaccatgaaaacacaatatccaggaggatggcgaaacatccggaccgtctatctgaaaccgatgacggacatccagcttacgttcccactgtatgtgagcaaggaagatcccaacttggttccggtgccgaagattaccggcccgagagagcgcttcgagaagagtatgaacgaaaaattgcaggaagccacaatgaacaagtacaagttccaagaaggcaatttggttcgtgttgattttgaaaaacgcaagacgaagaaggataaacgaacggtggtgcaggagcaaagcgaagagcaagcagaaacgaaggaggaagatgaacaggaagcagacagtggcgaggagatggagctggatcaggctagcgatactgaagagagtgatcttggcgatagcgatgatgaaaattgaactacctgtagaaagaggtaagtatgacccggatgagttatctctgttttcacgtttatgcggaattggagagatttatatcttaatatttttttttcgaaaatatagatttaagagaaatg

SEQ ID NO: 1001 - DNA, 762 bp, Aedes aegypti
atgaatgttcctttatcgccagtattagccgcattaacacttacggtagcgattctgtttgccgtagtctgcatcgtgctggtcaccatatatcgacgacatgctagcaagaattcctccaagaagctaaagtctgccaaaaacgcacatctcacctcgaccccgatagactgccaaattgattcatctgcacaccatcatcaccaccatcatcatcagacccatgaccccaatggtatccagacgccactggtggacggaagtgggactctcgggcgacgaagtccacaaatgccgggagaaccaccggatggggatgaaactgatccggacgttatacccaatcagtacgagcgaagaccaccaaaaaccactcttccgacgcctttatttcggagtccttcagcgcgtctcattcaccgaaacggcggtgagcacttgctccacgatgaggagcgccattgtgatggatccagtctggcttcgctgaccggatcgaacaatgaaagttatgcgaccctcggtcgagcaaacaatagcagtagctcagtgcagtcgacgctaagcccccttagtcatcaaccttcggccacgagtacaacgctgccactgccgtcgattgtgggtggcgtcggcgtcggagtgagcaaccttcttagcagcccagcgtcccaatcgcttgtcacgtccacactcaatgagtaccggtttcgaccggaagtggttacgacatcgaaccgaatacaggaaagttgtatataa

SEQ ID NO: 1002 - DNA, 1857 bp, Aedes aegypti
atggctattcccattacgatggtgagtggtgtgctcggcaagcaggcaagccttccgtgtgacatccgaccattggagcgagacgatgctgtctacatggtgctatggttcaaggaggaagacaacgaaccactttacaacttcgacatccgaggtcgtcagattgcccaagcgcggttattctcgtcggagaaatattttggcaagcgggcattcttccgggcgacgagccatccggcgcagctgttagtggacgacctaaaactctccgatgaaggggtttaccggtgccgtgtggattttcgcaactcgcccactcgaaatgttaaaattaacttcacagttgtagttccgccggatcggcctgttatctacgacgccaggcgacgggagaagaccaacactgttgaaccgtacagcgaaggcagcgatatacagctggtttgtgaggtgaaaggaggacgaccccgaccgaatgtgacatggtacctggacaacatggtgatagacgaatcgtacgaaacgcgtccggacggtacgacagtcaatcatctctcatatccgaacattgggcggcaacatctggacgctcgattgatgtgcgtggctagcaacaccaatctgacgcctccgaataacaaggttgtggtgctggacgttaatctgaaaccggttgccgtacacatcatggtgaaggagaaatttgtgtctgctgacaagcattatgacatcgaatgtaaaagttctgggtccagaccagctgcaaccattacctggcataaaggaggagacaaaattgttaaatccagcaaaaatttcgccgaaacgggaaatcaatcgctgagcgtcctgtcgttcacaccgaaggtagatgacgatgggaaatatttgacctgccgagcggaaaacaccctcatccccaacagtggcatcgaagacaagtggaggctcgtggtgcattatacgccaattgttacgctaaaaatgggatcatcgttaaacccagacgacatcaaggagggtgatgatatatacttcgactgccacatacagtcgaatccgaaaccgtacaagctggcgtggtatcataatggtaatgaactccaccacaacgtcacagccggtatcatattatcagaccactcgttagcactgcaaggcgtttctcgaaacctggctggtgaatatacttgtaaagcagccaacaccgaaggtcggggaaccagcaatcaagttgaactgcgtgtacgatatgcacccgtttgcgcaacggaccgtgaagaactgctcggtgcactcaagcacgaaacactgcagctcaagtgcgaggtggatgcatctcccccggcagagtcctttcattggacgttcaactcatccggtgagcaaacagagctaccggcccggctccattccagcgagaccggcttatcacggcttaattacacaccgacatcggaccttgactacggaacgatatcctgctggggacggaatgccatcggagtacaaaaaacaccctgtgtgtttcaagtggtagcagcagggcgaccttttgcacttcaaaactgcacgatatccaaccagtcttccgactcgctacacatcgaatgcatcgaaggattcgacggtggcctgccacaaatgtttctgctggaactagtggaagtgccagctctcaagctagtgaggaacctcagtttgcagcatcctccggtgcaatttttcttagataatctagagccgggcacctcgtaccgtatcatcctgtttgcggcaaatgcaaaaggtcgttccgaaccggtgatagtggatgatatcaccttcaagggagtggccaagtatactggtgagtag

SEQ ID NO: 1003 - DNA, 673 bp, Aedes aegypti
gaaacctcagttgctctaccggtgaattgttggcggtcgcagacatccagaaaagctagcttgagtcttcctgggcaaaccgagcaagtgtggcgtgatgttgctgttatgcaaattagaactgcaccctcctctgtgacgccaatggatctgaaccggaaaaataccaactctgcatgctgggtggatcaggaggcagatgagcacgatgataataacagtttccgggaatgggtaatgcagttggaacaattgaaaacaacaaggaaactcgttattccgagcatgaagcacaccaccaggaagagttgctgcatctcgaatgaaagcaacagcgtcaataacagagtatgaactttattgtggaaaatacactgaaatgggctgatagggtgccggagcctattttaagcaaagtctttgatgcctttcatgacttaagtctgcgttgcagacaattacagtcacaattgtcagtgaaattgcgatttaggaaagaagtgcatattgccaaacatacaagcttttaccctaaaagttatttcagcaggcttcgtaattgtggatagaagtagacgtgaaaggaaaggaagtttcatccagtctttttttcagcgctcttattgaggcaacgatgaattgtaatacattgttcaaggggaaccaagtggta

SEQ ID NO: 1004 - DNA, 4784 bp, Aedes aegypti
agcagataccgataaaatatagacagtaagtaaattagttttatcgcaaaacagataaaaatatccgcggagcaaaagtgtgtgagcatttttctttcggaaggagaaaatttttgctgctccattaagaagtgaagtgatttttggcggagaagaagaagaagtacagcacgggattccgcgcgtgtgaagaagaagaagagttttcgggaagtgcgtcgtggtttgtttgtggccagcaaaattagtgcattcacgggaagtaggatgcatccgtcgaagaagatgaacgcggcggaattggacgaccacgagaagggcaaattgtttgtcggcggtttgtcgtgggaaacgacgcaggaaaaccttcagcgctactttggacggtatggcgaggtcattgactgcgtggtaatgaagaacaacgagacgggacgttcccgtggatttggatttgtaacgtttgcggatccggacaatgttgaccgagcgctggaaaacggtccccatacgttggacggaaggacaatcgacccgaagccatgtaatccaaggtcactgcacaagccgaaacgtaccggaggttacccgaaggtattcttgggtggtcttccgccgaacataaccgaaaccgatctgagaagcttcttcagccggtacggaaacgtaatggaagtggtcattatgtacgatcaggagaagaagaagagccgcggatttggattcctttcgtttgagaacgaaccagctgtggaaagggccacggcggaacattttgtcaacatcagtggcaagcaggttgaaatcaagaaggcggaaccacgggatggtagcggtaacaataacagcatgaatgccgattcctaccaatggggatcaccgcaagcaccgccaatgggaaatggccaaatgggtggacccccaatcaatatgcagtcgaacatgatgcagggctatcaaggatggggtgcatctcaacctcagcaaggctacggtggttacggagcatcggcaggagcggccaatgcgtatcaaggctggggtgcccctccggtacaacagtggggcaattacaacgctacgccccagcaaactcaaggctacggtgggtatgatatgtataatagttccggtgctggaagcgccggtggttatggttcaggtaattggaattcgtggaatatgccaccaaacaccggatcaaccggatcagccgatatgtactcgaggccacaatccggtccagcggctggcccggctggttcggctggcccaacagcaggtggaccctcgaaacccggttccgaatacggcggtggatcggcgtacggttccggagcagctggcggctacggtggctactatcagaacgaacagaacacagcggccgcctacaacaggccacgatcggcgtacggtgggggtaacgatgcttcatcgcaaccaccctatccagcattttgagaaatgatgaccccgacgacgacgagtaggatgcaacctccgccgccgccacaacaacctccccaacagccccaacaccatcagcagcagcaacagccctaccctcagcagcagcagatctccggtggggccaatccggcagcggcagttgcaccctcctctttcgatcgcagcctcattggaacgaagtcgtaaacgattgaacagaacgctcagaagagtgaatggatgaggcagaagtggattatttcttattattttttaaacttgaaaacaaaactaattatacatatattatataaacacaagaggaagaagttgaaaaagcactatctaagaagaaggcaaaaattataaatatattattactgaagcaaaaagagaataaatgaacgcagagaagggttatgaaaccacgaaaaagcaaaacacacaattggaaagaaggcaaaaaagagagtaatataaacgaagtataagcataaatacacacactcacagaaactgaagtaaacaaaaaaaaaacacgtctatatccttaatataaatgaagaaaaacaaaaaactgaaacctttattgattagtgttagggagtgaagcaaaagcaaaacagaaattgttcataaacaaaaacacacgcagcactcaaactgattatacaaacgttgatatgaataaaacacatggaagtggaaacaaaacctgctaaagttaatcaagaaaattcacacctctcaaacacacatacacttgcacacatacagacagacagtgattggttcggttcccccgctccccgtttacgattccccccaacccctcaaacgggacacagctcactctctcgtttttttttaagaattcaccgatagcagactagacttaaaactaacgtattgatgaaaaaacggagaaaaaaaatggaaaaatgttacttcaatgaaaaaatttatttctttttctaaaccatgtttggggacaccacccggccatcatgttccattcgtttgtcggttttccttttcttttgactatccgcggagtggaatatgtttggtgtttggagaaaacaaaaaaacagcaaaaacccatcgtctcataaggtacctaacattacgcacgtacgttacttcctatcttttaattgaagttgtttttagttcgttttttccatcccactctctattaagattttttttctgtttgtttgcttaggaaacggaacgataaggatgcaactctagtaaaacgttagtatacttcgtaaaactgaaacgaatacttaatcaggtacccataataatagttgagagaggaaactgaaagaggagcagcagaagagttttttttaagacccccgcctatttgttttttcgtctattgtttaataagtaattgtgtagagagagttgacctaggattcaaaagagacaaggtgataaatttttcgtttaattttcgttttcgcgataaggctatggaaacacaaagtactgctctcccttaaggaggttttagaggacacaaacaagcaacgtaacatacatttagctaaaaaaaacaaagtcgaagcaaacgctagtagttgataaatgatgagacttgactttggcaggccaccccccccccatttttctcagtctgccaaactttttcgcaactaattcttaagtttttcgtcgttcgtcggttaaggaccctattctttatgtgcgagaaatttgtttttggtaaatatataggacacacttccctctctgcgaagacgtcaaacacaaatataatgctacacttaggaacaagcaaacaaacaactattaagaggttaaaaaagtaataagtgagagatatttttaaagcacagctcgaccttaatgggtaattgaccaggggtcgggttgatattgatactagtgatcagtttttttttcgttggtaagtgaccgaaagttgcgcgtatttttcggatataaagtaacgttacgatacggttagtctatgtacggaccccacaaaatcctttaatcaacaaaggtcctgttaagcttaactttagagaacaagagattgacgaaagcgagagagagaggtttactctatgatttgttgtttttttttttaatttaaaggataccttaaaatcgatatatttgagatagtaaaaccagaaactagcagaagtaacgcaaacactgagacaaaactgcggtgcggaacgagagaaagagtctagcgataaattattatgggtaagtttgataagatcacatacatacacaaactaaaagtaaagtaaaaagaaaccaacagcaaccatcaataaaattagagatcaaataatgaaaacgcgttgtctgtaagtgaaaagaaatgcaaatttatcttataaatcgtacacatagttgaaaatcacctgattaagagagatagtgaaaagataaaactagcggattatttcttgcgtttttgttttccccccacaaaaagaaaaccaagaacaggttaaggaagctctagaaaaagaaataagttgtacttctaattctaatctataaaatttccatttaagaagcaaccaaaatgcgaaacaagttatacaaaaacgcatatagaattcattgaacaaatctaaactaaaaaaagtaacattaaaaccaagaatcagtgagagagattgacccaatcccaaaacaaacagcagcctctcgaccccatttgtgtgtttgacattgattaaaaactaaaaaaaaagaactttaaataatacacaaagaaaaagtgaaacaattattcttcttcgggacttgtacaaagcagaacgttaagtgaaacaataatcgaactaaatctaaatactgcaaagcaaatctttccccgagccccctccctcaaccatcctatatcgtctatgtccttcacccccacccccttttcatccacccagccccttatttaccctttttttgtatcttttcgcgctttcagcgaggaaaagaggtgttttatgaaacaaagatattttcccctttaaacatttgtgaagtaatcgtatagttttttgtttgttctagacagtagtcacacgtacagagagagaaagagaacgacagaaaggaaaaaaaaacaaagaaaaccttcaaattaagagtaaaccagatttaatctacacacactattttatacaaaaaaaaagaaagaatataccgcaagtcgtttttccttttccctattttatcgtttcggatgagggtgtgaaaagtttttttttctatatttttgcgctattattttattcctgttttatacaacaaaaaaccac

SEQ ID NO: 1005 - DNA, 1551 bp, Aedes aegypti
gtgcactttgtgcggttcggtttttgtcgttctcgttcttgatctcgggctcgatttcgcagatgaagaatttgtgaaaatccagaaaatgtgtgcgactcgttctgagtttaaggcctagctgtgctttatcaaatcatcccaaaataacgttctctcagaacatatccacaaaatggaaatcttcagaaataacccgtcgctaagtcgactcttcgaggaaaactgtacggaatacagcgacgaaataatctgggtactgcaggaagcggaattgaaccgattaactttacgctacatctcgccacaaatagcgttccgatcgaacctggtgaatctgatccgagacgtcggccagcaacagcagctccggaggacaaccgtgcacttggcgatctacctaatggacgcattcatggacaatcataacatcgccaacaacagactgaaactaacggcattgagttgtgtcttgctggccgcaaaaatagaggaaaatgaaccgaaggtcccctctttgaaggacatgaacaaactgctcagagacaagtgccccctgtcagattttgtgatccttgaggtagtactgctaaagttcttcaactggcagctactcatcccgaccaccgccgtatttgccgagtactggctcctgcacgtagtttccaagcaggatttcgcgccaaccgttaacgagaaccagtacttcgaacgacgtgctcgcgcttccgaactcgtgttggagtttctggatgtgacaatcttggacatcacgatgaccaatgtgcgcccttcgttgctggcggctgcttgcatggcggcggccagggccatgctatcggtcaatagcacttggaacaacagcatgatccaactgaccggctatacgtacgacgagatatgctacctgacgcgggcactgatgaatggccgggcatgtctcatctcggacaccctaagtcgcaagcgaccgattctcgactctggatatataacggatccaggggacgacgaggaagatgatgaggtagtggaagttagcgaaaaggagacaaacgcaagctccgatgatgatgtcgtgttcgtcagcaggagcaaacgcgccaaactggaatgaggaaggtaagttcggttgttttgatttagggggtgttttaaatcgaattcgatattaagattgattataagttatggttttctttttcggtggtgtttcgatcattgtttcgttgttacttattatgtagattcgggacctcattacggtcaaaatacaaatctatgatattcttttgatacgcacttcaattaaatttttttgtctgtcctcgaaaatgtttcgttctaaagcaaggcgtttttgttcaaattttattccattacaattattgttcgtgataacttctttgtattagaatcaattcaagatgataagattagaaaaagtaaaatgtgccatcgttgattttacgcatttaagatgaaacatcttggaatgtaacatcgagattgcaccatatctaacgtaaaaaacaacaaacaacagtgcaa

SEQ ID NO: 1006 - DNA, 3823 bp, Aedes aegypti
tttaaacgttaaaatatgtgccagaagctttcctagaaatgggattgccggagtagtggcttttggagaaagatagcattactttgtctgaggcaaatttgttaaatactcgatatgactcttgctctctttattcaaatttcaatatagctttatttaacatgaatcctaaggaacgtgagtgattctggctaaaaaccacaaagagggggttgggtctgaaaataaaaaaaaattaccacgtgatctctgaacatttcaatataatctcaagctcagtggcacacaagttaaaagctgctttaaaagtgcgttgcagcacgccgtgcattagtaatagatatgattcagaaatataaaaacaataataaactgatcgatcgataaactaatattgacttatatcttttttcactagatggcccagcagcagatgatgcagcagcaacagcaacaacaattgcaccagcagccgcaaatgcaccatccatctccgatggcagttcctcagccgccacaggcccaacatcagcagcaattgccacaaacgccttcccatcatcagccaaatcgcttcaacgactcattccgggctacgatgactcctgcgacgccagttcagcatattcaaacgccgcagcttacggtgaccaaagaaacccccaagactgctgccgatcaatctgatcccaagaaagaacctccggttaaaatcgtgaatggtttcttagccgtatgtcacggttgtgggtataccggaatcgaccacgcaaaatgccaacgatgtaaacggctattcacggaaccacctcggagggttcccgagcccgacaaaccaatggtttctcctcatccacctccgttggttcctacggcttcttctacaccgcttcacggtaaaatgatgtactcggcggataagccagggccagggagcggcgagcgggattcgatagtaggggtcaagggcgttacgttaacgaagaaaccgtcggggtcgtccttaggtagcatgctctcaattcggggaatggcaagaggtggcgcttctggtggtagaggtggtcgagggcgtggaagaagtgcttcgtccaaatatcatgatgtggaaccggtcgtatttaccctaagcagtgatgatgaggatcatgaacccagtgataaatccaagaatggtagcaaattagtagcagttccagaacaaaaggctcagacttcagttgttgctgacaaattgcgtgaacccctgaagtgcgaaccagttataaaggaaaccgataaaatagaagatttgattcgcttggatgtcaccgacataaaaaacatgccggatggtttgattaccaatttggagtgccgtactattcggatcgggtcattgaaatatgatactaccgataaggtggtagtgtcgtctcgtggtgttcgtataattgcacctaatgtgaaacggaccaacgagaaatgcatcttggatttgcagctgcaggaaatcgtcaaggcggtagttcacttctcgaaggcattgaacgtcatgttcctgtatactttaccgtcgtgtggtgcattcattcgtgaaagccttgaaatgggccttccggaggataaacttccttatttcaatccagtgagtcgtcaggacgatacccatcgacgtatcaccctagtgatggatcgtataacggaagagtccaaatcaattgtgaagagtattatttcgcatgataaaatcgaagaaatctctgctcgtgatgctaatgatttgctgatgcgatcatgcggcagcaataaaggatctgaaaataattccaacaacattgtgagtggaaacgctggcgatgttacggaaattagaaaaattctcatctatccgcaaggaaagggcggcatttccatcaacactgaggactacatgtgcttggcaattgatcaatacctgaatgacgttataattgatttctatctcaattatttgaaattggagctgctaaaagacgaggagcggagaagaattcacatcttcagtacattcttttataagcggttgacaacccttggtacacggcatcgtggacaggacaaagatcaaaagctaactgctgctcagaaacgacatgcacgtgtggccagttggaccaagaaggagaatatcttcgaaaaggattttatcattattcccataaacgagcagtcgcattggttcctggccatcatatgttttcccagtcaggacatgccactttccatgaacagcaatactcccacgcccatcaagcggaaaaaggccactccgaagagcaaaaacattagcctacaaattggaaataccacgatcacaccggtctcgaagcgagaaatggaagccatcaatctcggcgacgatgaaagtgaacgtgacgaagccgaaggtgatgacagcgagctggcaagcgatgcagaggaaacggacgaagagccaactgatagcaaacagcctatcaaacagccaataattctcattttcgattctttgaccggtgcttcccggagtcgagtggtagctacgctgagagattaccttacttgcgagtacaagagcaaaatgccgaacaaaccggcgaaaatattcaacaagacaaatatgccgggccattgcgtcaaggtgccacaacagaacaacttcaccgactgtgggttgtacctgctgcagtacgtggaacactttttcttggtaagtagctagttatcgcagttgtgatttctcttacgggtcattccataccaaatttccacaaacaagtacagacgtgcaatcgatcaacaccgattttaaccaaattttggtcaaatattcaaatatcaattaatcaaaaaagcaaataaattgtttacccaatagcgccattttgggagtgttttccgaactaataaggtgttcaataaataggtcttatttagttgatcaaatttgtcgaagacaccaattttgcatctcatcactggactgactaaatctgtacgccaaaagctttcttcatatactacttctacatgcgactttggttgaagtctgtgtgccacctggtgagtgaattctgaatgaactttgaagaaaacagttttcttctaaagctttttattttcaagatattggcacaacaagtactgtactatttataggacgctggattttcagggcttctgtcctatttttaggacgctgggcggatatgcgttaaatatcactgcagattgcttgttgtgagacgatctctgccgagttaaagtggcttagatcggaccggctagcaactaaaaacgccacaaaaattcataacatactgtgcaagctttattataacttccgagccacaaacatcctcactgccctagcaccctacttcacttctttctcattcttacgcagtttttcttcctactcacgcttcttctgggtgcacccaaatcatccagatgtcaccgtgatcttgtgatcttccggaatggcctgcttgtggctgttcagctcgcatcgactagttgctcgtatcccttcacagcttcgatctgtggctcgtccaaagatttacacgcacaatcacctgatcttcccatgaaatccagccagcaatcgcactcgctcgcgctcggatcccgaaatcatgcaatccggtcggcaggcgtaatccctcgcgctcggatcttgagtttccgttactccagcaaacagaaaagctttgaagggaaacagatcccttaatatttatcgtgatcaactgtaggatttgtacttacttctgctttagaaagcttttcgtctgtcttcggctgggccttgatgcgg

SEQ ID NO: 1007 - DNA, 1497 bp, Aedes aegypti
atgctagaagatgcagatcacaaggaagacgaacaagtacagaaccagaaggagatgcaaaatttgttacaagggaatcacttcaatggcactatccaatactccgataactttttggctaacaactataacaagatgcaaatgcagctgaacagccgcttcatctcacagatttgttgcccacgacgagcccgtggatcattaccgcatgtccgaatgcgtccatactatatacctcaacggtccagaacaaaaagcgaaaactcagatccgtcaagtttactatatttggaaacgataagagctgtcgaaattgctcaaagcaacccaccaccatcaactctgatggaaactagtgacccttctacctcacacatggacacatccggaaatgcaccagttgttagaactggaaagtgctccccactagtaaaatctaaatctctcgagaatctggtacgatcgattaaaacgatagacggatcacaaccgtcacacgagatggaattcatgtctagtcgcatacaaaatttaaaagtgcaagaatagttcatcatttagcagtactgcatactatcgatatgtaatcagaagataagtgtctacaaaagaacaccagtcgtacggcgattacctaaaaaaaatattttaatattttacactacgattagcactaggttgcagataaacagttgtagcactttgaaataatttcgcatattgcataacacactataaatgctaaactttacataaatatgccatataaacgtcattttatgaaacgatgaatcgcgtattgcaatactcatattgtatattgcagcaccttgaaaagtttagcatgacctaaagttaatatttttcaaatttttgggtgtcaaatcaacgttttgattagtacgtcttaaaaaatgcatgtttgagcaattataattttttattttagtaagaaaaacttttttttcactacactttaagcgatgcttaacattaaagtgcagcaatactcattgagtatggcaacgatcccatgctttcggtggtacattaattgaacaatgataaatttttacctgtttttttgtattaatcgtaacgcttacgcagaatacttatttccgctgtaaagctacttaatttgtgaaacatacatgctcagcgtaaaaaaataaatacatcgtttgattttttgcgccgaactttaacgtttacattacattgtatttgttgaattattgttttcataatgtatatcattattaatttaaaatatagacattgaaaaataagtcgaatgctacgactgattgtctgtggcttagattttcccacgtggagccagatgttgattgttcaaataaaaaattcaaacgtggactagaataatggcgtaactcgaatgatcgatttctcttcatcgatcctctcttctgtgaataagagtgacaagatgtggatttattagcattatttcacttcagaccgcttggcagc

SEQ ID NO: 1008 - DNA, 3414 bp, Aedes aegypti
agtatgcttgaggaaagagcgcgaaatactgacagacccaccgatgtttacgttgttcctcagttgaatccaaacattgttcatgtcgttagttgtttttcgtggcggtttgcgaaaaaattgtgtttttcaccgatttacgtgttattaagttgttatttccttctggagagtgcgcaaaatagttatccatcaaaatggatcaatatcccacggaggaagaggaatttgagttgatgtacggcgatgacctggaagctatgaatgatatggatatcgagatgaatccagccaccccgcgtccatcgagagctaaggagaagccagcagatccacctcgagcatcgacatcacattcgcactattcccgtcctccgctggatagccccagtctctctcaaattaacgaagacagcccactgcgaagtccagcatattcagttatttccaagaactccacaaccatcaataagcgtctgttcgatggggatgggaattacggtcgcatggcttccacgccgttcccgcgattgtctcaatcttcggctacggatccgttggctgaaatccagaacatcggtctcaatacgcgaaagagacgtttggacgccttgtttggcgatattcaagatattgaagatgatggcagtgtgtatgacttttgccagcagggcaatacaaaaaagaccaagacggaagaggagcgggacatggaattgattgaaaagattctggaagccaggaagcgcttccaagcgattgttcatccaactaaatccagcgggttggatagagctgaggctttgcatcggttcaaaatgcaaaatttatcgtattcgttgccaaaatggccgtttgctactgtcgttagaagcgataaagaacgcgtctatgtgcggtttcattctgaggagtttgaaaccaacgcaattaatgagattaactgctttaaagatggctataacggactgctcggagacgccaaggaaagaatttggaaagaggctaacgacataatagccaagcgattggacgcaccagcccgagccattgcacctaacccggatgtagtcgtcgttccggatcaaggcaactcgttgtgggttgaaaagtatcgtcccaaacggtacgttgatctgctgtcggatgaaacgaccaacagaagtctgcttcagtggctcaaactttgggataaggtcgttttcggacgagaacctaaagagaagaaagacgtcaaacaattgaacagcttcaacaagaagaccggccgatttgagtccaatggaggatggaaaaagaagaatcgctctgcgctgaatactgaactggacgagcatggaaggccaatgcagaaggtagctcttctatgtggtcctcccggtttgggcaagactacgttggcgcacacgattgcacgacatgctggctatgtggtgcgtgaagtcaatgcatccgatgaccgcagtccagaggcgttccgtatagcgttggaaagtggaactcagatgaagtcggttttgaatgaggataaaaggccgaattgcattgtactagacgaaatcgacggagctccagtcgccacaatcgatttcttgttaaagttcatatcaggttcggtgtcccagaaaggcggtaaaaagggtaaaggtgaaaaaacagaaaagtttatattgaaacgacccataatttgtatttgcaacgatatgtacgttcctgctttgcgacagttgaggcagatagcgttcgtagtaaactttcctcccacggaatgcgcgcgattggctgaaaggctgctttccatcgccaagcgagagaaaattgaaacggatttaacgtcaatgctggctctagccgacaaatctgggaatgacgtccgatcctgtttgtccatgttacaattttgcagttcactgaagaaacccatccggctgaccgacgtcctgaagagtaccgtcggtcaaaaagatcgtcacaagggcctattcggtatttggtctgccatatttcagatacaacgtcccaaaaagaccctggtggatgctgatagctgcgaaagcgatgctattgtgacactcaccgatatgtctccggcaacccgaatgaccaacattctggacgtgatacacatggccggcgatcaagaccgattgatgcagggggtgttcgaaaactatctgcaccaaaaaatgcccgatccgaacatggcaggagtagctgaagcctgtgattggttctgcttcaacgatcgtatccagcaggtgatcaaccatcagcaaaactactccatctatccgtacctggcgtatggtttcgtcgtgtggcactatttgtttgccagtttagcttggccaaaaatcaatttccctaacaagggtttcgaggtaagtccgtgggggtggttggtattcttggtattttatattttctgagcgtaagaggtgttgaatgaagtcaattactgtggctattaaaacttattatatggtttataataacgaaagcgcattgcgacctgaaaggatgtaattattttctccgcttaatggggaagagtttgttggtggttattatctttgaatgggaccgtgtgcttgctttgcttcttgtgtcgcttctaattatttccttctttcatcattcaatctgcgtggcattttctaatttagtattctattttgtgcccgttatattgcgcaaaagtcgttacgttatgatggtgttgtaggtggaaggggagggggattttgaaggggaactcgtttgctgacggtaaggacgtatcatcgtcacgtacatcgtcggccacaggtagaagtgaaccgcacttttctgtctttgccctcgaggtaaagcctagtggtgggaagaagtcctttggctcgtgacacgagaagctggctgtgctacggtaggaactgaagcatgatgatgttaatagaatgcacacagtttaaacataacttacaccattttaaataattctttttgtagattatgtgtgtagcttgctaggttgtgcttgtattcgatgaatttgggacgatgcgatgccattttttgtccaaattttggaatgttggctcccctatgttgaaaaaatgttaattattgtaaataatatcctttcaagaaatctatccatactcaatttaagtatttcaaagtatatttataatattcaaaactttatctaaattcattttttacggattttcggatttggattttttagtgtcgtttcttgaagatgaatcttctaaccagtgtgaaatctttccaattctagtaacatgattttaagttgtttttatgttgtatctttagaaggtgtgcgaatattttgtcgataaacgttatgctccattgccccaagacatttttccagtaggtatgcatttccattacgaaaacatt

SEQ ID NO: 1009 - DNA, 1629 bp, Aedes aegypti
ggaattgcgttgctgatattgttggcagttttcagtccagcactgtctgcgtcagactttgccacccaacgtacatgtgagcctataagaatcgaactatgccgtggaataggctataacgagacatccctacccaacttggtaggacatgaactgcagaccgatgcagacttcacgctacagaccttttcccctctgatccagtacggctgcagtaagcaactgaagtttttcctgtgcgctgcatatgttccgatgtgcactccaaaagtccccatgcctataggaccatgccgaggattgtgccttaccgtgaaaaccctttgtcatcctatcctgcaaggatttggcttcccatggccttcggcactggactgcaatcgctttccagaggagaacaaccatgaacacatgtgcatgcaaggtcccggcgaaccaacagatggcgttgtaatgatctctaagaacgatcgccccacatgtcaaggattgattaagtctcatctgtacgtgcggcttaaccgatcgggacgttgcgcaccgctttgcgaagccgatatcatgttcgagcaaaacgaaaagcactttgcggaagtatggctcacatcttggagtgtggccgctctctttacggccattatagcgaccctctgtctaattctatcgactaaacgatgggacaagattctgatgccgctggtcatcagtcattgcctggtcacggtcggctgggcagttcgctggctggcaggacgcaatgcaaccgcttgtggctacgacacacaacttccgggcgtttcgcttctgctaacggatggcctcatgacggcgccatgtgcggccacgttcctactgcgctactacttcggcatgtcagcagctgtttggtgggcgattctgtgcttgcgttggagcaaatcggttcgccggttgctgaacaacgacctaagtggcgatccgcacgcagagaaaaccgaatcgtcgtacaatacgctgttccagttggccgcttggggacttccggcgctgcaaactgtgattgtgctggtggttcgactggtcgatgcggatgaactgtttggttcatgcttcatcggcaaccagtccgaccgtgcgttgctcggattcgtcgtagtcccgctgctaacctactgggtcatcggatcgggctatctcttcacggcgtacctccggaaacgatcatcttccgcgctactggtcaacaacctacccgtacacatcaacggaatgggcaagttcctgttcatctattccgttcctagcttcctcatgttggtgataatgttctacgagttcgcctaccgggagaactggctaagtgtgccccacccctcgctggaaccggtttcctcgatgaaggctcccatctggccgtttatcctgcgagcggtgatagaactcctagttggagttttggcctccgcgtgggctgtaggtcctcgaatagccggtctgtgccggagtaagatcaacaaccaggtctacaaacaaccgcagccaaagttcaacacctccccgtactcggcggcctcctatcagacggtggtatgcccccagaactcgttggtgtccgtttcgatagggaaactgccgccacggcacgcgagg

SEQ ID NO: 1010 - DNA, 2503 bp, Aedes aegypti
atggcacatggtgtgctaaaagacattcaagaccagttccaaatcggtgatgacgagggcggtctgctgcagacggcattcgtgctgtcctacatgatttgcgccccaattttcggctacctgggcgatcgttactcgcgcaagtggatcatggcgctgggggtgcttctgtggagcacgacaacgctgctcggttccttcatgaccagtttcgggtggttcatcacattccgtgccatggtgggcattggcgaggcatcgtacagcacgatcgcaccgacgatcatctccgatctgttcgtgggagatttgcgctcgaaaatgttggctttgttctactttgccattccagtgggatcgggattgggatacattgttggctcggaaacggctaagttcttcggttcgtgggcttttgcccttcgtgttactcctattctgggcatcattgcagtcgcactgattgcgttgattcgtgatcctgaacgaggacaaagtgaaggatctcatcacatggaagccacctcctatcgggaagacatcaaggatattgtgcggaatccatcgtttatgctatccactgccggttttacttgtgttgcattcgtcgctggcgctctggcctggtggggaccaaagttcatctatctaggattggtttcccaaccgggcaacgaaaacatcaccctcaacgaagtatcgttcaacttcggtgcaatcacgatggcgaccggtattattggcgtgccgctaggatcttacctgtcgcagcgttacaatcgtaaatatccgcgggcggatgcgtacatctgtgccatcgggctgatcctgagtgctccgctgctggccggcgcgatgctcacggtcaacgttaacgcgacgctggcatacgttctaatatttttcgcagagctaacactgaatctcaattgggcaatagtggcggatattttactgtacgtagttgtacctacacggaggtccacagcggaagccttccagattttgatctcacacgccttcggtgatgcaggaagtccatactttgttggagtgatttctgaagctatcaagcggttactgcggctatcggccgtcggtgttgctgctgtgtttccgccggatctaaccagctactcgcaactggcggagaatgtcacgacgacctctactagtacaacgacgaccacccttacccctcttccacacgcagccgacgaagacacggcctcggttcagttccgtgccttacagtatgccctgttctcgaccagctttgtggaaatcattggcggtgtgttcttcctcctgacggcgatgtacatccttcgggaccggagaaacgtggaacgagccgtggcagaaagccaaactgccaggtcgtccgcgcaacgtttggacaattcgacatccagttcctccgtctccgattgataatagccgtagtaggtttaggtaaagcaatatcacacacacagataggaccacgccatgttttggtaggcctacgccaccgtacaccatcttctcccgcttgtttttctcgaccattcatgacagaggaagtgccacgattctcagccccgcatcgggcatccactatgcctctagtacggaccatggggtcatcggactaaacccttctctcaatacagagctacacggagtatcaaatattactctacgaacaagaatcacaacatccttaccctacttcgcacccccgaagccatcgaccgtatttgtaaataggaagaatccactaacggttcgcacccagactgagttccctaagtcttttcaaactcgttttaccattaccagaaaagtaacgcgttaacggagcaaggtggtcaatgttgggtagaaacaaatgaatgaaaaacactcataaaggactgatactaattttagtgtaaatttagtgaagcaatttgataactaaaaagaaaagtaaacggagatttcctatttcctttcatgtaaattctctcgtctaattttggcgtttgattgagttttaccggcagcagtatgttagggaagcaaactatgaaaaaagtgatctgtgagaacgtgtcctttgaatgggtgtttttgatgatataaacaagccgaagccaattctcactcgttcagaacatgtctccttttgcgaaagaagaggataacgcgatatatgtagttagagacttctttatttttggtctctgtaggaaaagtatcgacagagaacggctataattgtataaaagaattgattttgtttattatcttttgaaaaatgtattctatcatatctgttgaaatcaattggagatttttgaacgttgaatatgtttcaggcataggttagcatacaactaaatatttattgattatttaggagtagacagattgtggatagtcgtaagcggtattaatttttcctgtaaaaagaatggagataagttatacaaaaatatcacaaagataaatagaaaaatcagaaacttttataact

SEQ ID NO: 1011 - DNA, 858 bp, Aedes aegypti
cccatactccttccggtacgtgaatgccttctagtcaaggttaccgtaaggtagcatccgagccggccgattcggagcttgagattagccggaacgcctcctcaaacgacacagcaacaatgcccaatcaacagaaatcggtggccgagccacagactgtagtgaccggcaatcctgcgggaaagattccggccaccaattcccaacagaggctaatgccacccgattcggacagtgtttcctcctcgattgatgaggatcaagaagcgacacatggcgggggcgatggaggcggtggcgggcttcgacacttaccaccgggccatcacgacgaagacgatggatcggtgatagtcagcagcaccggcaccggaagggtttcccggacggcatggttcaccgtgatagtgctgtgctttgtcaatctcatcaactacatggatcggtttacgattgcaggtaggtggcagggctgtttgggggcggggaatggtttgttttatattatgggtgatctaatggctaatgagggaacaaaacgattgcattaagaatttaataagtcacacttgttgattgtttggtttgtgcatcatttttaatagatgttcagtttagcatcatcaaatgtttattttacctgcatagtgcaacgacagtcaaagctagttctacgacaacttatattgcgacaaatctctataacaactttcccaaaacctacctatgcaacatataaacactcccttatgatattggcttatctttaaaaatacaactgtaccaatcactttgttttgtgtttttttttttcgttattgtagtacatgttatggtcaataaattaatctaaattat

SEQ ID NO: 1012 - DNA, 1350 bp, Aedes aegypti
tcacaaatcgcatcaaacgccggcagagttatagcctcattaaaaaaaggggatctaattcacccagttttccctaggactagtatacattttagagttggcaaagttttcgagccaaaccaaatccgtatcaattattttcctggaacgctcttctaactattgggtgaatcatatgcttcaacaaatggccatagtcttttccaggcacattgaacggtgtctgagatactgctacggagggatgtaaaagtgcgaattacaacaaatccgctaaaacaatgtcataaatgtataaagtcaaggtgattcacgataggcattcagtccttgaacaacgatcataggaagtggtgctcaaagaaagaagagagtttttatcaaacaacgtcgttactattttgtcgaatgatatcaattcaaataaacgatcggttcatgatctttgaggatataagcaggaaacatgaagttctccaaaaaggtcacgtttgtggtgctagtatcaattgttgcatgcatcgaaagtgcagttatcaatgaatataaggaccattcacttgaaacgaatctagcatctgactctttgaacaacagtaacgatttgagagaaactttcaggccttcaacagctgcccctaagtccatcagtagctcacaagctgaacaaggactggaacatccgaaacgtgcaaaacgggccatcatttttcgacccctatttgtttatcgccaacagcaaatcaaaaagcaacgtctgagggagatgcgacaacaacaaaggcaacatcagatggatagcaatgctcagcgattggcaacgcagaagccaaaatatgcctacaggtatccctactattacaactatatgggttagtgtgcttcacaaaagtttattttccaaaaaaaagtccagttccaacaagacgacgcgcaaaagcagggaatataattaatattaatagtgttagtgaatacttctacgctctcagtttttgaatggtccaaatgtatgcaacgtgtcgcgcttatatgattgaatcatagccctataatatcgatattataaatggcatgtaatcatcataaatgtagtccaacctgaagagcaattagtcatgacgtcatacttctctgattagcactacggcgtgaattagtcgcgcgattgggacatcttccgatctacgtacattggtggataagcagaaaaagcgaaaatagcgcccaaggatgtgataaaaattaatcttactattaataaccttctaagcagctgttccaaagcaatgattatcaaactaaatctaaaccctctctagttgaaatattaaacttaataaaaaataa

SEQ ID NO: 1013 - DNA, 685 bp, Aedes aegypti
atggtgtttctgttcctttaccccatatttcagttggtaagtttttacatagcaataggtggagatccaaaggaccttcgattaggtgtcgtaaacgacgaggtgaacaacatacaggaatgcttcaacagatctcttatcaccacatactatcatgatgaatatgactgcgatttgtacaaaatttcctgtcggtttctcgatcagctaaataggagcgttgcgatacaggaacattacgagtcatttgacgatgcttacaaagcagccaaaactgggaaaatatggggtttcatttatttttctgataatttcactgagtccctccaagatgtaagagataatgttcgagacgccaaccctggatctttccatacttcggaaataaaggtctatttggataaatctgaccagcaagttacattttttctcgagaaaaagctgatagagacgtacaaggaattcgcagaaagagtaatgtcggattgtcacctaccgaagcagttggcaaatattccaatcacatttgaagaccctgtctacggatcatttcaagatgaattcaccgactttatggctccaggagttgtcatgacaatgatcttttttctggctacgctcatcacggcaacgatattcattactgaccggctcgaaggtgtttgggacagaacgttagtagcag

SEQ ID NO: 1014 - DNA, 3848 bp, Aedes aegypti
gtaatgccgagtttacagtgtatcgctcgattctggttttatttcgtgtttgtgcaaatttaactgcgggtgtgcaaatgtctttgagaaaccgaccaaattgttttgacagtgcatgcaacactgaaacatttcaacgtgactgtctcgtctgttatgatacaactaaaaaagtttcactgttgccactgcatttggcgcgcaaccgaagttcttcatcagttcgatcagagtgcggatttccgaaaatttagaagttgaaaaagtgcgtgatttcggtgatttccgtaatattttcgatcaaagcgtacaaaatgccatttaatcgctctcccatgcgatatggccacatagttgggtacaccaatgtggtctatcaggagaatggcgatcggattctcagtgttggatatgacggtgatgtccgaatttgggacggtgtgtttgacgacgatgcggccacacattgtgtggcggagaacgtttgggccacgctccagtacgatgaccggctgctgattgccaacgatctgaacagtgtccaggcttataagtatccggaactggaaaaggacggtatcgagtttcgcttcacggccttcgtgaccagtctggttcggaatggacagtatctggcagctggttccgaggatgggaaaattaagatcaagccgactgaggaaggaggtgtggagttcgacctcgaagaattgcccggcccggttttgagtatggggttgagtccgaagaatctactagcggccagttgcggcgacggaaagctgagggtttgggacttggagagcaagaagctgttgaagaccgtggatggcctgcggaaggcgaagagtttcgagggaaatgtgtattttgcaactcccagttttgaaccgagacgtggcaacgtattggcctatcctaagggcaacgagatagtggtgctgaacacggccacctgggagcaacagaaggtcttgaagcatacaacgttgtcttccgacttcacgtgtggtgggttttctccaatgggagagttctttgctgctggcagcgctaaaggagaagtagtgatatgggatttcaaaactggagtggttataaagggagacgaggcgacgattgattcctttccgctgatcggactaacgtggaatccaaagaacaacggcgaattgacaatttgtgacgaccagggccaactggggaatgccagtggcatatgtattgacgatgatgcagatgaaggaaacgatcttatggaaatggccgaaagggaggccaacggcgcggaagatgatgatgatgaggatatcaatgatatatactcgaaacacgtggccgcgcaaaaaatcttggccgatgattcggatgacgaaaccagcatcaacaaatttaagagccagtacgaaatccacggcgacaaggataaaccccttggtgccgtatcgcttcctggagaagttgacgatgaagacgataacgacgaggctcgatctgcggtgagcggtaggtattctgcgaagtcctaccccatgcagaaatacttccaatcaggatccacgcccgatcatctggagcatcgttatttggtgtataatcacgtgggtatcgtgcgagctcattccgacgagaaggagaatgccatcgaagtcgagtatcacgattcttccaaccatcacggaatgcatatggttaatttcctaaaccacacaatggccggtttgagtgaatctgtcgtggctttggcctgtccggctgggacggacagtaaagggagcaagttggtgtgcgtcaacatggttgcctttggcaatcgagaatggagttatactatgccggatacggaggagatcattggtgtagctgcttccgataaaacagtcgttgtggtcaccgacgcaaatctgctgcgagtttacacttcaaagggcacacagagggaagtgatatccattcctggtccaccagtgtcccttgcagcctacggagatcacattctaatcgcttaccaccgttcagctgcgaccgaagaccaacatctcaatatgatgataatcacgtgcgtcaattatcgactgcgatgccgagacgtgccaattcctctgtcgcccggatcagaacttcgctggatcggttactcggacaaaggttcaccggtaacctacgactcggaaggaattatgcgtctgtacctttcgagttccaatttgtggatgcctgtttttgacgccacaaaaagcaaatcagtgtcggatagtgtgttcattgtgcacgtgttcgaatcgattcagcaagtgcagattatcgtttgtcgtggcgccaagtatcccctaatcaacccgcggcccattccgatgaatgccaccttctatgtgccagcgtgtgagcaggataccgaaaaaggcttgatggaggccgatttgctgcggagcatgtacctgaagtacgacgatgcggacaaagtgatgaaggaaactgcgatcaagctgtttgcgatggcctgtcgcgccgaagtggaacaacgagccaaggacctgatagaaacgattgcctccagtcagctgattccacttgcctgcaagtatgccagaaagatcaaccgagttcacttggcggagactctgtcagcgctgcactccacattccaagatcaggagaagttggatgaacaatacgagatggaaatcgcgcgggaaaatgcctccatggtcagcgaactggagcacatcaatctggaagcagtaaccaaaaaggataacaccccaaaaatcaaacccaaacccctcacgaagcgtaagaatccgttcaagaaagacgaaagtgtaacggccagtccctccacgcccaaccctctagggcatctcactgccaacgcaattggtttcccttcacctagtgtatcgaaccgttcgaccacccctagcaccccctcaggagtaagctccacaaatggacacgatggcgattccgagtcggcggtggagaacagcgagaatcaaccgaccaacggcggcaccagcacccctagcgcttcgtccgggcagaaattcatgccttggtacgagagcaagaaggaacagctgagagaggagaacccaaccgtaagcgaatccgaactgatcaagattggtttacggcagttcaaaacgctcaacatctacctgaccccgccagccaacggcgagaagcggaagcgggacgagggagaaccgggtgagtccggagtgtccaagctggctaaattcgggtttttcaagaagtgattaccccctgtttttagctgtgcgatagcgtctaagttaagtacaataatgaattttatctcaagaaagagcgtcatcaattatccgaacgttcacagtttctatttcggaagggattaaaatccattaatttgttttcatttcgtctattaatcgtttctgtgtgaatatgtaccccttttaataccgtgtaactgaggagaagaaagaagggagagtcagtgaggacagaacaataaccatgcgacagatctagaaaatcggacaatttaacgttttgaggttttattaattgtttagctggcagtccttacatttgttgtggaaatatacaaaaaaagtggaacaattacaagtttcgtggttttattttaaatgtagacgtttcaatggaaggcgtgaaaagtgtgaaattgacatgactgttaaagagggagaaaaggctgttgaaattaaacggattgtgattccccatacatcaaagacgtttcattcgaaattcaatgttttctggaataatatactgtaaagtgccgtaattgagcgcagttagggaataaaacatttcaaatggttaatgaaaaa

SEQ ID NO: 1015 - DNA, 1473 bp, Aedes aegypti
atgtctgctgccactttggagccgcgtgatttattcccatactccaatttgcggaacactccctacttcccagctgtttctggttgcagtcgtcagtcattaccgcacacgatcgactgctgggcacgggccgccagggaacacatccaggaagtgctggacaaatggacacagatcgacgacgagatctgggcaaaggtgatcgtcttcgagcggaaccgccgggtggccaaggcctacgcccgggccccggtcctcaccatcaacggctcggacgacggcttcgacggcatgagaatcggtttatgtggctttgacaacccgatgcgcgatcacaagacagacgaggtcaaacgacacgttggacagggagtcaaaatcaaaatggacgacgccggtaacattctcatccgtcgctactcaaagagcaatgtctacgtcaaaagcacagccaaccagccaaacgaagaaacagccatcggagcggacattctgaagcttcccggacaggccatcgagagtgaaaagatagttaagttattcgatatgaaaaagttccagtcaaacgtcaatcgggagctgcggcgtgcctatccggatcgtcgccggctcgagacccagtgcctctcagcgatcgcgttcgtcaaatcggaaaacgacatcctggactgcccgatctgggtgctgatcatcaacgtggtggccatggatatgctcaagagcaaactacctccagtgcaccgcccggtggacatcaagaaccgtccgcgtatcccgatcccggacgaggacccgtacagtgtggccggcaatggcggcggcagctcgggtagctccgggttcggggccagcggcagtggcatggtcggtgcctcccgggatcacctgatgggcggccagggccaaccgatgggacagcgccgcagcgagaaaccaccgaagctacctccgcgggacaatctgtacgcgtcgcacgagatggtgaagcccgactatgacgacattgaggacgagaaccgcgtcaagctacagcgaggaaaatcagacaaaggcaaagacaacaagaaatatgacgatccctactactgcggacttcgggcccgtgtgccaaactttgtcaaatcgtccaaatcgaaggagaacaacaacaacagcaacgtagccaacaataatagcagcaacggcaaggacaacagtgctaacgccgtttccaaacgtctctcgattgctcatctacagcacccttcgtcgctgcagtcgttgcaccagttgcaccaaatgcatccccatcacaacctgatggccgctcaccagcaccaccagcagctaatgtggcacgccagaagctatgaaagcggaatcgataccgacgtggttgagtcaccctatagtcacatgtatggccgtgtcccgttgccgacgaggggctacattccggcaccgcgtgccatgtacattggcgaatgggattag

SEQ ID NO: 1016 - DNA, 812 bp, Aedes aegypti
aaatatcgaatacataatcgtcgttcgctgtggtggaccgcgatttcagtgaaaaattcagtgttttcagtagataaacccgattctaaagcgcggacagatgtcccacctattgcgcagcctgggccggctggccatcagcaactccaatcgccttgttccggcgctgaccgctcttccggcgacatccacaaatcagttccacacgagcagcacgttgtccaagaagtggaacggccacagcaccggtcccaagcgatggctcgagtacaacaaaatcatttacccaccgcaggaagctgacgagaagcccaggccagctttcgtctgccaccagaagaccaacatcaagtacagcccgaagaagatgtggtacattgccagtttcgtgaggggaatgtccgtagatgaagccatcaagcagctgtcgtttatcgacaagaagggtgcgaccaccgtcaaggaagcgatcctggaagccgtggaactggccgtcaagcgccacaatgtggagttccgttcgaacctgtgggtggcggaatcgttctgcggcaagggccgggtcttcaagggattccggcgacatggtcggggtcggttcggagaggtcgagtacaaacactcgcactactttgtccggctggaggagggaagcccgccggagaactactatccgggacaggagcagaagagtggcgaccagatgctgcaggagtggctggagtccatgcggaaacggaaggttatccattcgttgtaaagcatttgcgggaataaagagatagtttcgaattcaaaatgagtttaggtac

SEQ ID NO: 1017 - DNA, 1734 bp, Aedes aegypti
cgatgtagaagcaagtcgagcgctttagctttcccacctgagtaaatctattctcatacttccctatccgatacctttcacagctgtagtctatacatcgtcgtttaatattccgatatcagaggaaaaaattgtgtgaagtcattgacgaaggaagcaaaacctgtgttcgtgtagctatttagaagaaaagtgtgaagttcggaattgaaaccaatcaatcacgggaaacaccatgccacagttctacaaagtagaaatcaacaaaacagaatgggaggtaccgcagaagtaccaaatgctcacccctgtaggaagtggggcttacgggcaagtctgttctgcaacggacacccaacacaacgttaaggtggcaatcaaaaagctggcgcgccctttccagtccgcagtccacgccaaacgaacctatcgtgaactccgcatgttgaagcacatgaaccacgagaacataattggcctgctggacgttttccatcccggaggtaacacactggactccttccagcaggtctacctggtcacccacctgatgggggcggacctgaacaatattatacgaacacaacgtctctcggacgaccatgtacaatttctagtctatcagattctacggggccttaaatacattcacagtgccggtattatacacagggatttgaagccgtccaacatagcagtgaacgaggattgtgagctgaaaattctagactttggtctggcccgccccacagagaacgaaatgaccggttacgtggcgactcggtggtaccgggcgccggaaatcatgctcaactggatgcactacaatcaaaccgtggacatttggtccgtcgggtgcatcatggccgaactgttgacgggtcgaacgcttttccccggcacagaccatatcgaccaccttacacgcatcatgttcttttgcggaacacctgacgatgaactgatgcaaaaaataactagcgaagaggctagacactacatccgatcattgcctaaaacggaaaagcgcaacttcagcgatgtgtttcgtggtgccaatcctcttgccattgacttgctggagaaaatgctggaactagacgcagataagcgtgttaccgccgaacaagcgttggcacatccatatttagagaagtacgcggaccccaccgatgagccaacgtcttcgctgtatgatcaaagctttgaagacatggatctacccgtggaaaaatggaaggaactcgtcttccaagaagtacttaatttcgtccctcaacagcatgcacatattggcagtgatggacagtaactcaccattttcccttcgaaggaatcctactgaaagaagtaacaactggtcgaaaccgtgtaggagctacatattatgtctttaaatactacaaaaacacgctaatcaatcatgcccccattaatccatatgttaaatccaactttaaagagaacctttcatccagttgcacggtcttacccataataacttctagaagctataaataaagactcaaatcttaagaatggaagtgatttgtaatgtgaatagtgaacaacaggtagtattgaatggcttcattggcagggatttatttctaaaagaaaacatagaatcgattttacattacaaataatgtataaaccttgagatggtattttcatcgattattgattatattatgtaagtttcaataaataagaaaaatgggaaatagctac

SEQ ID NO: 1018 - DNA, 3591 bp, Aedes aegypti
ttacagatatcgggcgcaataacactagccatggaggaggtgaacgatatctacttcagtaggcatggccataagctccagttcgaggtagcggaaacttatggcgaagaggtaactagtataaggaaaacagctgatctctggacaaaagatgtgataggctatatagggccacaggaaacttgtattcacgagggcagaatggcggctgccttcaatctacccatgatttcttatttttgtacccacaacgaaacgtcaaataaaaagcattttcctacgtttgccagaaccaggccccccgatttgcagatatcaaagtcggttgtatcgctactgattgcttataactggactcaggttactttcttctatcggacgtcggaaaactctgagtacgatgcggtggcggaaacgctgaaaacaacgctcaagaccaacggagttcgaatcaggtcgacacgcacctggagtacaatctaccatcatggctattcaccaaatcctttcgaccgactggtggaggaaacttttatagatactagaatctacttggtgctgggtcaccacgatgaacatatcggcctgttggtaagcctgaagcgcaaagggttattgaccgctggagagtactttgtcgtaggtgtcgaccttgaacagtatgatgccgccttgccaaagaagtatatgcacggactgctgcagactgcaccggaccaagatgctgttccggccctacaacactacctcggagtcgttccgtcggctcccgtcaaatttgaagaattcgctgttaaggtaagcttctctgacagggtaattaagctgttgataccttgctcttcgaggaccttgggagttaacaaatacctggagcgaccaccgttcaactaccgcaacccattggtttacttcggaggcgttaaacagattcgcgcggaggcagcttatctctacgacgcggtccatttgtatgctaatgcgctgcttcgagtcctgctagccggcgagagtccgaaaaatggaaccgcaattatcgaagccatcaagggtcgagcttacttgagcgcaatgggttacctgatacatatcgacgagaacggtgatgctaccgggaattatactatcttagccagaaaacccatcccttcagctacctcggagagagattacggactgtttccaattggacgttttagcaccccaaatgctgacacgattccggtaagttgcgtcgttcgtgacataaaactatttgatgccatcgattgggtgggatatgggcctcccgttgccgaaccttactgcggcttccaaggcgagaagtgtattagttacaccggtgagatttcggctgccattgccggtggcgccctgctcctgctgggtgtcgtctccctggtgctctatcgaaactggcgctacgaacaggagctggacagtctgctgtggaaagtggactttaaagacattgaaatgcacgaaaatgagaaggaaaatgccggccaaaaaatgacgagggtaagtgagaatgaccgagccgaactgaatccctctagaaacactcaccctctgatccgaaccagccaggttagcttgagctccaacccggacacggacttccgttacacaacgattttcactccgatcggaatgtataagggccaactgtacgccatcaaaaaggtccgcaagaagagcatcgatatcacccgggagatgaagaaagagctgaaaatgcttcgcgacatgaggcacgacaatctgaacgcatttattggagcctgcacggatccaccgaacatttgtatcatcactgaatactgcacgagaggaagtttgaaggatgtactggagaacgaggatgtcaagctggacaacatgttcacggcttcgatggttgctgatattctgcgtgggatgatctatctgcatgattctccgcttcgatatcacgggtctctccgaacatcgaactgtttgattgattctagatgggtggtgaaactaagcgatttcggtttgttcggattcaagcaaggtgccgatattcaggaagagaaagagaaagccgagagcaagtgcgaaaaacttctctatcgtgcccctgagttgctacgagctggaccagtttcctgcgttcctggatcgccaaaaggagacgtgtattcattcggaattgttttgtatgaaatctttacccgtaagggtccattcggtgaaatcgaatgtacccctgctgaatgtttgaaacgagttctgcatccgctggacccgaacaacccctttcggccagcgattcagccgttggaaacttctttcgactgtgttcgggaatgtttgagagaatgttggtcggagaagccagacgatcgaccagatttcaaaactattagaaataagctgcgggttttacggaagggtatgaagccaaatatattcgataacatgatggcaatgatggagaaatatgcaaccaatcttgaacagttggtcgatgagcgaacggatcagttgcaggaagagaaaaaaaagacggaagcgctattgctggagatgcttccaagaccagtggctgagcaactgaaaagagggcataaagttgaggctgaaagctacgatctagtcacgatttactttagcgatattgttgggtttacatccatgtctgcggaaagcactcctttgcaagtggtagattttctgaatgatctatacacttgttttgattcgatcatagggcattacgacgtttataaggtcgaaacgataggagatgcgtacatggtggtatcaggtttgccaattcgaaacggattgactcatgctgctgagattgcttcaatgtccttgcaacttttggacgccgtctctgaatttaaaattcgacacagaccaaacgatcgtttatatttaagaatcggaatccattcagggccagtgtgtgctggagtggttgggctaaaaatgcctagatattgtcttttcggagatacggtcaacactgcttctcgaatggagtctacgggtctacagctaaagattcactgtagcttgcaaaccaaagaaatcctggattctctcggaggatatcatttcgaagatcgaggatttattcctatgaagggaaagggtgagcaaagaactttttggctcgttggtgaagatcctgaagcgagagccaagcgtactcaggagcgcgcagaaagacgtggttcacgagcgctgaataaatatcttggaatgctcaaacagtcgaacaacagcaacggtgttcgaagctcgctcaaaacccgtgcagtgataccacgaagctcactgccacgctcatctagtctagaatcacctaagagattgcgatttgccagtggatccatgttggaacaacacagatatcaccacgatgacgccctgatggaagtagtctccgacgccagtacgcggaaatccgacaatagcctagcggaaaccgaggacttcacctcttcttgcccttgcatcgataaccttggactgaataccgaacggttccttgcacaatcttgccctacggttacaacgccattgctcactaacacagttgctacttaa

SEQ ID NO: 1019 - DNA, 1520 bp, Aedes aegypti
atgaccgtagtgaaagcggcgccgaccagcggcggcttgaagcgggagatgggcttgatgtccgccattaatgtcatcatcagcgttatgatcggttccggaatattcgtctcaccgacggctgctctcaagtactccggaagcgtaggattttgcctggttgtgtgggcagtttgcggaataatatccctgctaggagcactctgctttgcagaactgggaaccgtcgtaccacgatcgggagctgagtacgcatacctcatcgaagccttcaaaaagaccaacaaattctggggaccgttaccctccttcatatgtgcctgggtctacgttgtagtgctacgacctgcagaaattgctgtgataattctcacattcgccgaatactcaattctacctttcagtaatttactcgggttgaagagcctccctgaagaggatctgcataatcttatcaaactgatagccctattaggattaggtgttatcacttatattaatctaagcagcgtaaagttatacgttacgatcaacaatatttttggattttgcaaagtatttgcatgccttatagttatttttggtggtatctaccagctagcaataggcaatacggagaacttgtccaggggatttgctggaacaaacttcagccctgggcacatcgcattggccttctacaacggtctttgggcgtacgatggatggtctagcgtcaccacgatcaccgaggaaatcaagcgacctgaagttaatattccacgatccatcataattgccgtaccgatcatcaccgggctgtatgtgttcatgaacatggcctacatgacagtgctttccccggaggaaatgatccaatcggaagccgttggactggactttggcgatcgtgtgcttggatcgttctcatttctcattccactaggagtagcattgtctacttttggttgcgccctgagcatccaatttggcgtaactcgcctctgctacgtggccagccaggaaggtcaaatgctggaacctctttcgtacatccacgtgcgccgtgcgacaccaactccagcagtggcaatgcagggtattctagcgttcgccttcatattggtgggcaacatagaggaactgatcgaacttgcgtcgttcctcatttggttcttttacggatcagcgttcatcgcattgctgaccttacgcaaaacgcaacctgacacacccagaccctacaaagtgccattattcgtgccaatcttcgcgctcggagtatccatattcttatcagtggtgccaatcatcgccgaaccgtcgcccaagtacttcttcgccgttgcgttcatcttgagtggcgtggctgtctacacgccgttcgtttactacaaaattaggcccaagtggatgaataaactcacctatctcatccaggtgttatttgaggccgtgcccaccgcggagaaatttgaataacatctattgctgcgcatttttataagcttttataataaaagacataaattttacgtttt

SEQ ID NO: 1020 - DNA, 5211 bp, Aedes aegypti
atggtggggagcaatcttctgctgccgcggttgctactgctcgccgtcatgttgatggtgacccacaaagtacacgcggtggaaggcaaattgcagctgtgtgaagtggaaaccggacagacgaatataatcctagatatagaagagagtcgaggcaatgttactagtcagccaacaacgccccccgagttgcccatatacggtgatccagaaagcgagatccaactggacctcaattttcccaaagggaacccaacgttcacgttgaatggcaaatcactacagcttatccatccgctggatcgcgatgaggagaatctgagccatatagtcttccagataagctgcaccatccgatcaacgcgtagaaggcgcaatattccgattatagtgcgagtgtcggatgtcaacgataatccaccgatgtttatcaacacaccatatgaaaccgcagtgcccgagtccacgcccgttggaacgaccatcttcaagaatgtactcgcccaggacaaggacgctggcgtcaacggcctagttgagtactttgtgattgaaggctcgcggcagaacatctcggatatctcaccgaacacattgacagcagctgacggctacggagtatttgccatcgcttatccgcatcaaggacaggtcaccgtggtgaaaacactggattacgagcgcattcaacgatattacctgacgatagtcgcctcggatcgagcacgcaatgcttccgaacggttatcggccacaaccaccttgaccatagacgttgcggactcggacgaccaggatccttctttcatttaccgtggatgcgtattgttggatggtgcttgtttgaatccagaatatacggcctcggttccagctggaacattgcaaggcgttttgaccgtggttccggagaggatacaggccgtcgatttggacaccatcagtgcaccgatccggtactcgttcctcagtggaattcccggtaactacggtgattttttcgaaatcgattcccaaactggagtgttgaaacaaaccaaactggtagattcatccgtaacggcgaaaaaatttgacattatagtgaaggctgaagaggcatcagaaacaaaacggtttgctactgcaaaactgaccattcacgtaaaaccagttgatgcataccctccagtaataagtataacgtctaccgaaggttatgtcaatgaaaattcacccattggaacaacagtaactgattcgaaaggagtcccaatcaaactctctacgactgatgcagatttaacatcagaagacgaacgagtcgaatatatttatgaagttacaactccctcatttatagtatctaaaaatggtatcctacaggttaacgaagagggactagacagggatcctcctagccaaggaaagtacagatttcaggtggtggcaagagaaactaatggtaatgcggctagtgcaccaatgagcttgactgtccatctaaatgatgttaacgataatgctccaaagatgaccatggttcctccggtaagtcttactgcaggtgatggccggcggttggtaactaaagtaactgcaactgacaatgatagtggagaaaacgctgttattacctattcaatcttccatgtttcaaacaatggaggcaataaatttgccatagatcccaaaagtggagagattgagacaagggcaaggttaaatgccggtgaacagtatagtattacagttcaagcatctgacattggaggtctttcatcgcaagccattgtcgaagtatctgttacgcctggcccaaatacgaaacctccgagattcattaaacccgtttacgatgtacaagtcagtgaaggagctgaaatcaattcaaccgtaatagtagtcaaggctgaggatcctgagaatgatcctgtgaaatatttcgtcaccactggcaatgacctcaggcagttttcaattgggaaggagagtggtgttatcagcgtgattcggaaactcgatagagaagacttgacccgttatcaattaataataagagctgaggatagtggcggactagctagtagtgctacggtgaacatcaaagttacagatatcaatgacaaaaatcctgagtttgacgaaaatgttttaccatacattttcaccgtagatgagggaagagataatgctctaataggaacggtacatgctacagatgctgacgaaggaatgaatgctgagattacttacacaattccgtcggatatcccatttaaaataaactctcgaacaggagaaataagaacgaagtcacagctagattacgaaaaacagaaagagtacaaattcgtagttactgcgcaagatggtgcaccagaaccaagattgggaacggccagcgtgactgttaaggtacgagacatacctgacgaagttccaagattcatggaatctatgcttgaagtaaagattccagaaaatgtgccagatatggcagtaactactgtaagagcatttgatccggacacaaaacccgaaattacctacacattgaaaagaggaccaggagatttgttcaaaatcgatgcccgaactggattgataaaaacaattcgtggattagattacgaaaaggacaaaattcacgaacttataattggaactctggaaaacaacggcactaaccctggagattacattaaaataattgttgaagtggaagacaggaatgatataccccctgtattcgtatcgatccctgagccgattaatataaatgatgatcttccaattggttcaatagttggttctatgcctgcagtggatggtgatggatcatcacccggaaatgtggttagatatgagatggttggtcgaggaaaagcgttgaaatacttccaagtagatgcagattcgggaatagttcgtatacgagatgagctgaacaaggaagatgatacagaatacttagttgatgtacgagcatacgacatgggagaaccacaacttagctcagtttctactttgccaatctatgtaagccatattccagcaaatcctaatgattctgcggagtcaagagttgatgccggaggaataatcaaccttgaagtgcaaggtcttgctttcagcgatgatagctataccacaagtgtaccagaatctacaggaatcaatgccactattaaactaattcaaataatcaactcgaagaaagccaccaaacacaatggaggcttcagatgtgaaataatcaaaggaaatgatttcaatatattccgcatcaacattgaagatcatgcttgcgcactagttttaaatgggccattggactatgagaagacaagtagtcataacctagaagttcgacttgtatcgaataaatattttgtgaaccagcataagaattttgcacaagttaaagtcattgttcaagatgataacgacaatatccctatgtttcaatttccgacaagctatcatcaagacgtacggaatgatacatattatgctgtgataagtcctgaagctgatatggacacgcatctgataacagtaaaagcaattgataaagatgctggtgtttttggtcaaattaaatatcatatttatgatgaaaaagtcaacgaaataccaaacgatgactcgccaagttcattcttcatcatcggtgaggacaatggaatgttgaagacgcaaaaaagtttacaaggtgttaaacaaactccattaacgtttatcgttgaggcacgtgataacaacggagatccattagctggcgttgtgcacaaagctaaagccagggttgtagttaacttaatctcagatattaatcgaatggcattggtgttttccgattcatctcccaaggatattagacgtcatgtacgagcgttggaagaactgctgcacgaaaaatctacaggccttataacaggaatcgaacggttcagtacaagaaagattttgaacgaaaatggaacaattgaggaggttaatggagctacagatgtttggttctacgctgttgatccgaaatcggagcgaattttggctcgcaattctagttctgtaatgaaaacaattttagcaccaacaattttgtcgcaaatcaactttgaagcatcgagcattgcaagagccactgctcaaggcatttttggtccagttgaaccgaaacagcaaatccagaaggttaaggcagcagttgtagtgaatgacgatgtttttccatatgcgttgattgcagttgcagttgtgatactcattctaggatcaattggaatcgtttacatttgtatttcgtggtcaaaatataagaatttcaagcaacgtatgcgccaatataatgctccacctagtcctgttcgctatgaccccgttattataaactcccaagccccggcagccgaaaatcaaacatccctcaaagaatatgaaactcaagttcttgctatggccgttcctgtagacgaaggcgacgaccttcagctagactttagcgccaagaatcacgccttcagtttggataatgttagctacattacacacaaagaaaatggtcaacacagtcctacgaactccgacgcgacaaccgctgttgtgggtacattacaacggaacaacaacaacaataccaaaaataataataacctgaatataaataatcggcaaaacactctcaatcgaaaccttgagatgaatcgtaacaactacctaaatccgttaggttcggtaagcaatggaagtgtaccgggtacgttgaccttagggcggataaaatccgagagaaacaattacatcaacgggtacggggacacactgaaccgtaataatctgtcaatggcccaaaacaatactttcaatacgttgggtcgaacccaccggaacaataacaatagtaataacatcagtaaagccaatcatcaccaccacatgcatcacaatggtaccgtaaacgggacggaggttgtgactaacacgctgggaagaaacaatcgctacaacgatgtgccaatcagcaatccactcttccatatccgagtgctcaaactgctcatatcgccccatcgccaaaatggagatcttcagtctcagccacagctcaaccataccagtccttcaaacgaaaatgttacattcggaaagcgagactacaatcaactgtcgttctcttacctcaacgacctggatcgatcggatgccgaaaccaccactgaactgtaa

SEQ ID NO: 1021 - DNA, 1289 bp, Aedes aegypti
atgatcatcatgcgggccctcgtagcaacggttctcctgattacggttgttctagtgtcgattgtcctgattaacgccaactcgagacacgtgcggagtggagcgacgattacccgaaacgatgacggagatttggttgaggtggataggacggaggccgaggtgattactagtgggtcgtatgaagatgaactgttgggaagtaatcctgagcaaaaccataagacctttgagtttgaggattcacttacggatagtgtgaaaagttccgagagtagtactttgattaatgcaatcagaaaagcaggtgaagagtcggataacgaacagtcgaacaccagcagccaagtggaattgaatcaggcagcggagtcggaggcattagccgatggtggagaggatgaagaaattgtagtcctacacgagactcacaacatcgatccagttcaatcgttcgacgaagtagtgtacactgaagaagtggctgtagattccaagagcactgaatccttcgatgaagtaacgggtcgttcgccgactactcccgaactgaccacggaggatgtttactatgtcgaagatgccccagccgaagcaaaggccgagaaacaggaagagcaggaatctgaaaacacatatcttgagccacacacagttaacgatatcaagagtcttccgaaagaaaatcaatggggaagtcgaaaaacatcacctgctacagagcgacagactccgttagggtacgagcccgaaagctacatcgtggtggatgaagatatgttcaagtcaacgaaagccgaattggaaaatgcgttcgcagaacagggtgatctactagcagccagttcaagcattagcagtcgaccgttggaacgaaagcagagggctgctgtgggtaatcctgaaactatcgtactgaatcgagctccaatcgttccccacttcgacgatgagtatcgggagccggtaaggatgccctcacatgttcccgccgccaccaccaaggccacgatatgtccattcgatggaacgcggtgcccggccaagctaccccggactggagtcgatctacaatccacacaattgggatgcacacaacatgaacctgctccgttttccgcaatgctcggcctgtcagcggaagcaggttcccctgtgccgcagctgcggaagatgcagcgaatgttgtctgcacagcgggtgcacctgtggctgtctacattcttagtgtttggatgcacctatacctatgtagtttttttttaaatataagtattgattgttgactt

SEQ ID NO: 1022 - DNA, 285 bp, Aedes aegypti
atgaagattctttttgtggtttgtggaattttgttggtgacgttggccgcgcaaggccgaccagtatgtgaagagtgcgacgacgaagctccgttggcatttccggatgaaaatgtgctgaaaattgttaaggttccacacgtcaaacaggaacagtccttcgaagaagctgcacctggatcagacattcaagaaacgaatatcattgatgctcccgtcgtttgccctgagggtcagaagccagaccacaatggaaagtgccgcccagtttggaacggaaagtaa

SEQ ID NO: 1023 - DNA, 2593 bp, Aedes aegypti
cgacgtcatctcaaccgcacagggccgtgcaagaaaactgcgggaaactgcaataattacacatcaacagctcgctcgactggcagactgcaaacgagacgtcgtcggacacggaattttgctcttcgagtcttgagtgctatcgcctgctggaaggagaaagtctggctcccgtttgaaacagagggttttccccagtaattcacgtgcaattccggacattctggccgggaagggatttccggctccgtgcgcttcgctggtgtgagaaagattgtgaaacgattcgggcttgagagtggtgggatcagatctgagtcaaggacgaataatacagccagtgtgtttaaaaggagaagttgccacacaagaggacaatcatgaacataccgaaccaatatctggagaagactgaagacgttgcggaccaggtgatccgcaagggtaagcacgtcctgccacatgtggcccggctctgtctgattgcgaccttcctcgaggatggcatccggatgtgggtccagtggaacgaacagcgcgaatacatggacatgagctggggctgtggcaagttcctcgcgacggtgtttgtgcttatcaacctggtagggcagatcggaggctgcgtgatggtgctgggccggctaaaggtgaccatcgcttgcggcatcctgttcttcatcgtcgtactgcagaccatcgcctactcgatcctgtgggacatccagttcctgttgcgaaacctggctctgatcggtgccctgctcctggtgttggccgaatctcgcggggaagcccgtagtctgtttgccggcgtgccatcgctcggcgagaacaaaccgaagaacttcatgcagctggccggacgcatcctgctcgcgttcatgttcatcacgctgatccggttcgagttaagcttcctgcaggtgctccaggacatcgtcggatcgatcctgatggtcctggtggtgatcggctacaagacgaaactgtccgccctgatcctggtggcgctgctgaccgtgctcaatctctaccacaacgcctggtggtccattccggcctacaaaccgctgcgggacttcctgaagtatgacttcttccagacgctgtccgtgatcggtggactgctcatgatcgtctcgctcggacccggcggtgtctcgatggacgaacacaaaaagaagtggtaaagcaagagccagaaacgatgatccgtctatccatcccccgcctcattgcaccggcaaatcgttgatattcgttccgtcatcgtgtgagagacagagaaagctagagaacactgaaacactataagagagagagcgagagacagcgcgaacgaaacatttttttgatttgataggattttttaatataaaaaaatattttattgaaattttgtatcgattcatccatcacacacacgtcgaacgaaatcatccggaaagagaggacacgcagacaacagcaccacctaaacggaagaaccatcgactttgtgatagatagacacgagacagagagagaaagagagcgagagacacttccatcgaatgcatgctaaaagcgctgcgccagatccaagactacagactattcccgaacacttgatgaacgttgagttttctgcaatttcgtattatggccactaggtgggaacatttattttctgtttgttccgttgagaaaaagaaaactgtgcatgatgaaaaagaacaaaccaactataattattaagagaagggaaaagaaaagtatattaactaaataaagccacaaactgattagatttttaccttatacaacaaaaaacccgaaccggctctctgtgtctttcaatggttttttcagttccacattttttgcgtccaacgaacatttgccttctctcttactcgcggggacccggtttcagaaaccgggggtttcgcaggtcctaggaaaagtgcattccctcccaatcaaattcatacgtcgtactttgaaggagtcttcaggtgtgtcggtcgggattaggccgaaccacttggaaactttagttagttactataatcatcaactagcagtaaatagttaacgttgcagattattataaatatgaaaattcagcttaattattgcgattaggtatgttgtatactatactagctgaaccgcacatgaatgatgatgccaataaatcttttatgtccatatgtcacaacattcggaatcgtctggattgggtattttatttgttccaaattcaaaatttaggttttctagagacccctttggtttaatcatgatttctgtaaagatcgttcagatcaagcttgttgccttttctgtttcggctaatgacccatttcgtccagtagttgttctctttcttagattctgaatacatattagccaactggtcagcttatccgatcttatcgtgatgattttagctttgaagtattatttccagctatttaatgcttttatgctgttgagttgcatccttagcttttctcagcgtcattcaggtgttcatgataatgttgccctcaccattcgagcatcacacgtttgtcttgagatattcatttcatttatttagtta

SEQ ID NO: 1024 - DNA, 1654 bp, Aedes aegypti
gagctgcttcatataaaatacgctttattttctctcgaattattgttaatttaatttattttaccgcttttcatttaaaagcatttagttgatagttcagtacatactacagtgttgcagtttaattattagaatacgaaatgaatgctattattgcgctgtgccatttctgcgaagctcatggccccggcgcggtgttttgcacccagaccttgcgcgaaaccaatatccagctgttggacatccacttcgataccgataggaaagggtgtgccgcctgtaactcaattggtaacagcatcgggttggttagcaaagatccggacagcaatgcccacttcgtcagcagtcaagttccggtcatcaacgagactatcgaactggttaagaaagctgccttccggagcatcagcagcgaggtgagttcgggggcgtcttcatcgtcccacggcaatgccggcgaaggaggagggggagggctagtgttcttcggagatgcccaccgaggtcacgtgttgagtcacaccttccacctgatggactcggaagcccgtggatttagcaagttgttttcgatcgtgattctgatgaaggataaaatgtttctgctgaatatacaaccctttctggccgattgtctgaacaaaatttccaaggaattgcaaggatatgccaagacagttcacgatgaagaactcagagcgcaaggatcacaacgggcacagaggatcactcagggctatgcgagtaatccttccagaaccagatcgctagttgaattaacggggaaggaatcgatatttgcatacttgcatgctcacttcaccttcgtcttgtgggctggggcaagatatttaacggaaagcattacgcttggaagcccatcggttccagcttggttgggacgggacacggaagaaggtttcacgatggttcaaaccgaaaaggaaggttacctgatgagaaggatgggctacggcaagacggaggacgatagcgatcgaatcgacgaacgatccaaggccaaatattcgttgaaagctttccgacagatgctgaaaggggactttcaatcggtgtgcttctgcgtcattacgggtatccagatagtgattcgagcaccgtacataaaaggcgcttgtttggcgagcaatctgaaaaagatgctaccggaacctatgcacaaattggtccgcacgcaagcggaatcctacaaggctgccaacgaatgcaggataattaatctgagtcaagatgcggtcgctccaaatccatcggccggaatcatgagaatcgacctgctggatgatcgagaaaacgtagccgtttgcgtctgggatggcgatctgcccaaaaaactgccaacgctgcttcagaaaatcgaccaagctatgagagaggaactattcacggatttggtcctggacaaacaccttcgagcgttggttgaagagtggaaaaacaaagtggtctgcatccggaagatgagctccaaccaggacgtggccaagatgaagaaaatcctgggcatccagccgcaggaccaggtgctgatcaactactggcacagccacttatgacgacacactgcgagcttcgatttcgtggaatcgcttttcttatgttttcgattcaatacacacataataaaagg

SEQ ID NO: 1025 - DNA, 1320 bp, Aedes aegypti
atgatgactgaaacgctgaattctaataatcatctcagccaaaagggcgagaacaaaatggatgacatgggatggaaagccaaactcaaattaccgcccaaagataatagaattaagacaagtgatgtaacggatactcgtggtaacgagtttgaagagttttgcctgaagcgagagctgctgatgggtatcttcgagaaaggttgggaaaaaccgtcgccaatccaggaagcagccatcccgatcgcactagtgggtaaggacatcttggcgagggctaaaaatggtaccggaaaaacgggcgcgtacagcattcctgtactagagcaaatcgatcccaccaaggattatatccaggcattgatcatcgtgcccactcgtgagctggcactgcaaacatcacagatttgcattgaactcgcgaagcacatgcatatccgggtaatggtgactactggtggaaccaatctcaaggatgatattatgagaatatatcagaaagttcaagtgattattgctacgcccggtcgtattctggatctaatggacaaggaggtggcaaatatggccaactgccgtatgttagtattagacgaagcggacaaactgctgtcgcaagacttcaagggcatgctggatcatgtcataatgaaattgccaaaagagcgccagattttgctgttctcggcgacattcccactgagcgtgaagaacttcatggaaaagcatctgcgcgagccatacgagatcaacctgatggaggagctcaccctgaagggtgtcacacagtactacgcgttcgtccaggagaggcagaaggtgcactgccttaacaccctgttttccaagctccaaatcaaccagtcgatcatcttctgcaattcgacacaacgtgtcgaactgctggcgaaaaagattaccgagcttggctactgctgttactacatccatgccaagatgcagcaggcacatagaaatcgcgttttccatgacttccgatccgggctgtgccggaacctggtctgctctgatctcttcacgcgaggtatcgatgtacaggctgtgaatgttgttattaatttcgatttcccgaaaatggcagagacctacctgcacagaattggccgatccggacgtttcggacatctcggtatcgccatcaatctgatcacctacgaagatcgatttgatcttcaccgtatcgaaaaagagttgggcaccgaaatcaagcccattccgaaggtgattgatcctgccctttatgtgcctcgaccagaggatcaaaatagcacacaggaagaacagaacattagcaaataa

SEQ ID NO: 1026 - DNA, 321 bp, Aedes aegypti
atgagagacaacaaaacatcgcaaaacggccgcgggccgttagtcatcgactgctgtctgaaagccggacggccgccatcacaaacggcggcagctcccaacccaaccgattcatcgtccagccagccgttcattatacgattgttggcatcgagtaaagaactactcctgtgtctgagcaaaatcggaacgacgcatacgactgcatcaaacctgcaggaacatttcggtgttcgaaccatcctttgcgggacactgtcctccgatagtgctaatctgcaaccgcccagacgcgttgtcggcaaaactgtgatcctctaa

SEQ ID NO: 1027 - DNA, 1332 bp, Aedes aegypti
aatggtgtaccacatttttgaacgagctttgttttagcgcgcgtagtttattttcaaacagatcgaagtgtccgaaattcttgttttattcgattaatactgcattaattattcagtttagtgaatcaatattgaattttgtgttcgctaaagtgttccccaaaaccccgtgatggatcgcgaagaggttcaaaccaaaatgcagcgttcgttgcgcaagaaaaagtacaaggagctcctggaggagggcgctcagctgggactgagggcggaaacggccgatccggtggagacgttccaggccgtgcagaaaatcatggaaacgtccaacgcgctgcaaaacgagggtcgcattaaggaccgagccgagaatgccaccgaagtgctgatggatgcccaggtgctccggatgagtcacgatgtggtccacgctgccatgcagaggatgggcaattcggagttctcggacgaggagttcgtggggattattttgtccagtttcgattccgagcagggtatcgagaattgggaaaagctcacgcgggaagcagcggccgtcttccacatgtccaagcacagccagtcattgtacggtgcattcgaacacgaacccgtggtagtccaaaaggaagccaaacagcgcgctcaaaggcaacgaaccgactacggggaggccaaaaaaccagacaccgtggacaagctccagaagaaggaaaaaagcgcccaaaagttgaatctgatcttcaaccagattctgaaaatctacgagcagcgacgcaaaccgataccgtactttgagttgattatcgatccagaggatttcatgaacacggtggacaatgcgttccaaatttcgttcctgatccgcgacgggcgagtagctctgctgaacgaccccaatcacgatccgatcatcagacccacgactcagaaagaaaacgaacaagctcagcggatgactgaaacgacacaggccattctcggactgaacacaagaaagtggagggaaatgatcgagcgtttccaagtcgacgaacctttgctgatcctaaatcgtgaagagctgaacatgacccaatcgcagaagtaaattaagcatatctaacttagttcttagtttttaaagaagataaatcaaaccttcattcctttatttgctgtttatactctggattaggggttcgttgatgtgaagttatgtcaaggaatcgaattcgcaatatgttgagttttatttagttcgtcgctatacctataagtattttaaactccagaactgttatgcattcggataagatatgttatagaataaaccacaaaactacccaagat

SEQ ID NO: 1028 - DNA, 1791 bp, Aedes aegypti
ctggagcgcagacaatgtcgcccaccggccaaaaatagccgcactacagtttagtgtccgaggaaaaggggaccagcgagggcatttgtttttgtttgccacagctttttctgcttgctcaccatcttaaacaacggagcgcattgtagctggatcgatttgtctgagcccaatcgctttcggtcattcccggaatggaaaaataaacacaaacaaggtggaagttaatctaaattgtagccattatcgtattttgaaggaaatagtgtttgctttgtcgtcgttttccggaacaaaatgctgcaaagcgagaacagaggtgcacgcacacaataggtagctcacaagccagctacgtttgtcacaatcaaatctagagcattgaagggttcagtgtctataaaatcgagtgataagatctagcaagggtttactggaaggattaggtgtttttagtgttgtgtatggcactgccaccttcagacacggagacggtcacggaatggagacgcatggcaaaggtcgccgcacctcggatgatattgtttctgatcactgtcgtcttgtacttttcactgattggtctcaccgaacgacgaaccatcgaatccaccgttttgaaatgtctacccatcgtcagtttatgggtcttcgtcctgctgacgggatttgaacttaagaaaagccaccgctacaagcacctgatcctggtgggattgatattttcctgctctggagatatactactcaactatgacctcttcgaggccggtatggccggtttcggtgtggctcaaatcttctacatatcagctttcggattccagccggtacgaccatggtttggcctgcctctctacgggctaggtgctgcagcagtggcccttatgttccacaacttgccaacgatcatcaagatttgtcttccaatctatggcatcttgctattgaccatgtgctggcggtcgctggccagaattgattcagctaagaatatccttcgaatggcctgcggtctcggaagcgtgttgttcgttatatccgacagtattattgcgttcgacaaattctactctccggtgagcaatgcacaattcgccatcatgataacctactacgtggcccagtttggaattgcgctgagcgtcatcgaacagacaagccctgtaaaaactgccaaatccccaacacccaagaaaagccaaaatggtatgaaacagaagaaaatttcctaaggagttaagcataacgactagttgcgccatctataagcatgatcattctgttcccattcatttggaagcatgcccatacagacacacattaacacacacgtgaacacatacactcacatatgtgaagttatcgatgaaatggaaaatggagttgaaccattgtaaaactaaaatcgcttgttgaacgtgtagttttgattaaacaaaacaaagaacaaaatcatagactgtgatctattatcttccctcgaacattgaggatcctctaataccaccaccaaaatttgaatgtttgcaatgtaaaatagataacgagataatcttgtacagaggtttccaaatacgactagaaacataacagaaacaaagacataatgcgtaaaaaaacaatgcagttttaaatattcttagatgtaaacccaagtaatgaaaagtatccaactaactttatgattatcagtcgaaactgtagacaaaagagactgtaaatgttgtttagaggttacattgttttaccgttgaagaataaatatatatgacattaatgttcctgaat

SEQ ID NO: 1029 - DNA, 1944 bp, Aedes aegypti
atggttgataaaccgaaaatcgacctcggaacggaggagatagtcaacccgtcgccaaccatcagcaagggaacggactgtggcagcccgccgcacgtggtctacctgacggaaacgttctacatcagttccaagaagaataccgtcttcgaggtacgcctaaccgacaaagggctcagcctcaaaaagcaaagcaatggttcgaccaaggaacaaacgatcccgctcaaagatatcattggctgccgctgcctccgaagtaaacggaaaggcaagggaagctcggcttgcgcatgcacttccatatcggggaccgcccagctcaaagtggtcgaagaaaactccggcgagcaggacgaatccgacgtcagtgcgtatctctacatctacgcgtacatcctgaaacgaaaccgacggggtggatttcgggagcgcacaaccataaccctgcggtttcgttccttcgacaagtacgaggacaacaacaaggaagcacagaaatggcgagccgcgatcaagtatctcgtcgcaggggaaacatccatcaggcccacatatcagccgaaggaaacgcgcaaaatgctggttgttctgaacccgaaatcgggttccggcaaggcgcgggaaatgttccagcaacgggtggcgccggtcctggcggaggcggaaatttcctacgatctgcacataacgaaaaaacccgactgggccagggagtttgtccggaaccgggacatctacctctggcgggggatagtggtggtgggtggggatggcatcttctacgaggtgctgaacgggctgttcgagcgagaagactggcagacggcgatcgacgaattggcgatcggaatcattccgtgcggttccggcaatggactggccaaaaccattgcgcatttgtatgacgaacccttcgaaacgaaaccgatcctggcctcagctttaaccatggtcaaaggcaaacattccatgttagatatagttagagtggagacacggtctcaaataatgttctcattcctgtcggttggctggggcctaatctcggacatcgacattgagagcgagcgactgcgggccatcggtggccaacggtttacactttggtccgtccatcggctaatcagcctacgtacctatcagggcaaggtgtcgtacattccggcactagttagtaatatgaatcggtcaaactcgttgccacgggaaggtggtggtggcggcggtggcggcgtaggattactgaagcacagtataagttacaacaccaccctggattgccatgactgtagaagtgggggaggtggtggacctaacgatagccacagcaattgtgatgcctgcgatacaaattttagcgacgtgctatcgttggaaacgggtagtaatctggatacgttccgacctcggatcgacagttggtactcggcaacgtcccggaagagcacgtacttttccaccgtggatagtatatatgagagtgaccgtgcttccaacgaaggtgcccctacaggtaccaatgtggtgcagatgtatggaccaccttccaggcttccagcactgactgcgtccctgtccgacagctggaaaaccatcgacggggagttcgtaatggtgcatgcggcctaccagacgcacctcagtacggactgctacttcgctccgctgtccaagctgaacgatggcatcatatggctactgatcatcagggccggggtaagtcggtcccagttgctgtcgttcatgctgggcctgagcagcgggtcccacattccaacgcaggccaaccagtacatccagatgattccagtgacggcattccggatcgagcccagtgggtccacgccgggtcacatgaccgtggacggcgaaaacgtggagtacggaccaatccaggcggagatctttcctagtttagccaaagttatggtaccgaaatga

SEQ ID NO: 1030 - DNA, 2421 bp, Aedes aegypti
atttgaatgaacccttaggtctaactgaacgaaaataactttatttttgaacattgaagggcagtgaggaaaatttctttcttctgtaaggaaactgtaaatttgagaatactttttcactgctttctaccaatttcacgtgctggacgtgaggcgactagttttgattaaacttatattttatataggattgtaaccaaatagcttcaagatcatattcacgtttcatataacatccgctagttgataacatctgtgcaacaagtttcaagtggaaaccatgattggatcatacccgaccaaaaagcatcccgaagacgatctttgtaaattgcaccacaaaatatgcaaattattctgcctgaattgcgcagaaggaatttgcagcgcttgtatggacattggagaacatgacctccaccaggtgtccaatttagccgtcgtttacagtgaaaagttatccgtcgtcaagtcaaaactggttcaggcggaaaaatatcacaacggccttcgttcaggaaccgcgtccgcttacgaacggaatctgcgcttgctcgaaaaggaggaagccttccatcggaaggaaattgaagcgatcgccaaagaggctgatctgcaagtatcgcaaatgacgcgtatccgtaaggcaaagctcaagcagcagctggaactgacgatggaatgtgaccaaattttggtggacatgcaaagcaaggtcgaacagctctcggcgaacgagttcctgcagcagtctaagggtattgcccagaagtgtgataaactcattgctacaccggacgacgtttcgctggaaagtgtggacgacattgaatgccagctgattccaccctataaatttcaacagttcgtgtatcctgcattcctgaagaccaagaccaatgccatatatgacttcgtgatgaaatccgctcacggggtggagtggaagttgacaatcactaagtcggcagtcgttcaaatcaaaccgattcccacggattcccagatactgcaataccgccacatattggttgtagttatgccccatcgcgattacaccaaagaaattcgtcatacatttgtgttggatggtaaagccgctacattcgatttggtaaaaacggttcaaatcgcggacgaaggattttgcaactatttgggcgacttggttatgaagattggcattcggccgcataatttgctgattgagaaacaactgttagtacatcaatacacacagaaaaaggacgcctgtacaagtttgcaaaaacgattgcaatccattactgacgaatacgattacaaacatcttgtcatgaacttcaatccaaaactgaccaacctccagaaaggcgtgttcctgtactcatatcgaatccgggatgacgaggccagacagtggtgtttgagcgtaaagttgaagtctaacggcgttgtcggggcgtatatcgaactcctcaagggatctcccgtcaactgtagctatttcatcgagttgaagcacagaaatcccctgaaacagctgctcaacactacaaaatgcagatattacaacatgaatggccgtaaaagtgcggcatggggatgggaaatgatcgcatgggaggatctgagcaaagacgccggatttcacccggctggtatgttgcacttccgtttcggtgtgcgtccattgccagttatcaatgtggtcgcataactagtgttctcgacattgactagataaaattcaatcagatgaaaggtaagtgtgattctcgctttttattaacttcatatttgtttctctcatttcgtgacacttgtaagataaaataagatataaaattaccagaataaactaactaaatctttcaaccaactagcatattgatagcctttggtcacctaataaaaaagtgttcataagttcactttcttgcaaaatgaaaacaaaaacaaaagtcgtgaaagtactatatttaacacggttaagaaaatattgaatcccacctatgacagcatagcgtcacgtcatttaccagcgtattgtagggtttccattttcgtcggttttgggcgatacttctccagttgcgtcgaaggtttacgggcgccaggtcctcttgcactacgtacagcaaacgtattcgtggtcttccacgaagtcgtcgacctctacttggttccttgttgaatattatttttgcaatcctttcttcccacgctcgcactacgtgacctgcccactaaagtctgtcgtttcctagtttcctgcgccaccacacaccgttccctagtttcccaccgagtattgtccacaacactttacgcttgaaaaaaactatagttagcatgcatttgcaatgaacttgaaagttgaatttcaaagaatagcataatcttaaagaagaataaatcattgatatacaaataattagc

SEQ ID NO: 1031 - DNA, 2126 bp, Aedes aegypti
aaacaaaaaaagaaaagccaaacagcaaacaaaagcctgagcgacctttgttttgttttccccccatcgagctgtcaaaagttggctttggttggttggtgatgctggccgtgaaaaattttctccgcagagaaaaagtgttgtgaatagtgttaaatcccccgcaaaaaagtgaccatgtcctgcgtggaaccgtgcctgacgtgtttccgcaagacggacaactacctgcgcatcacggacgacgccaacgacgaggatgtggagcgtattgtgaccacccatttttggttctcggaaacggaatgtgccagcagcgttctctgcaccagttgctgggagaagatcgatgacttccacaagttctactgtgaggtgcgtcgggttcatttggacagcgaggtcagcgacccggccatcggcgtacagatcaaggtcgaacctctggagggtccagtgacgacggtggcgaagatcaaacgggaagataccgcggatgaggcaaaggaagatgatgatgaggatcgtctggatgagaaagcgaagccgtttgaggaagtgaagaacgaggatctggatatcgactcggaaccgattttggaaccgccggtcaagaagaagcgtggccgcaaaaggaagaacgtcgaggcggaggtggtgaaggagataaaacctgtggaagttattgtggatccagaggaggatcctcccaccgaagatgactccgattgggaaccgccgagggatgacgactccggagatgaagttataatcaaatcgaagcgtccgaaaggagagaagaagcccagaagaaagtacgcaccaaggaaaccccggaaagacgatgaagatcgttccatgattggcaaaacgaaggaggacattgcccgggaggacgagttcattcggaggtattgtccgatcttttgcgacaaatgcaacttcaattcggacacgtttggagagctgaagcaccacacaacgaccgtccacaactgcaatccgatggttgtctgctgcgatcacaagttctacaagcgatcgttcctctaccagcatgcccagtaccacgaagacccggacaaattcaagtgcgaagtttgctccaaacccttccacagtggtctggcgctgcgactccatcaagcttacactcacgtgaaggacgaggagcgaatctacaagtgcgacgtgtgccaggccagtttcgccaaggcataccacctgacatcgcatcgcttgaagcatacctcgatagcggagaagcgcttctactgcgtcgagtgtgacattgcgttccgcaccaaccaatcctatcggacccatctgcactcgaagcacggggcggcagcgaagtacgtgtgcgacatctgcgcccgtggtttccgtcagcggtccgaccttctaacgcaccagctgacgcacagtgccgagggtttggagcagctcaaaatccagtgcgaacgctgccacaagtggatgaagaacaagaagtcgatctggactcaccggaagatctgccagagtacggggccggtggcgtgcgacatctgcggcaagatggcgcccaatccggcgcagctcaagagccacaagaagtacatgcaccaggaccagcgggtgcaccagtgcagctactgcgagaaggcgttcaagcggccgatcgatttgaaggaacatgaaacgatccacaccggggaggtcctgtactcgtgcaacttctgcaccaaaacgttcaactccaattcgaatctgtactcgcaccggcggaaaatgcatccggtcgagtacgccgactggaagctggcgctgcagatgaagaagcaacccgccgaagtgcaagcggccacgatggccgctgcctcggctgccgcggcgacggcggtggccaatgctgcgatcggcatgccggaactgccgccgttcttgccggggctgattccgggaggcgtgctagcacccattatgccgccgcattcggccgagagtgcggattactcctgagccgaagggaaccgtaagtagcaataagattagattttttttgtttgtgtgagcgtatttcttaagccgagttggtaagtggatcgtgtacataatataggagcttttcgtctctaatgcta

SEQ ID NO: 1032 - DNA, 1470 bp, Aedes aegypti
atggattccctccctatgttagattctacaaaagaatcacaactgaccatcagcaacattatctgtaagcatttctggttcgaggaggatgccctgcaaacggccatcatctgtgagctctgctggcagaaggtggaccaattccatcgttactatgaggaggtaaagcagctccatgatcaactggcgcaacccaacacggtttttatcaagcaggaacagattgaatttgaggtggaatttcttagcgatcctcagaatcagatagaccagaaagtagaagcaggacagcatgaagtggatgatggaatctcggatagaggcatagagtctgacatagtagtggaacaagaatcacttttttgtgaagaaactaaagttgaaattcaggaggaacagaatgaactgtcgatgaaagctaatagcaacggtaaaaaaatcactaaaagggagatggtcaggaagcgagtagaattgttgaaccaaaagagacaaaagcaggatgattttatcaaacagcacaaaccgtacgaatgtgaagaatgtcctatgaaatttgaaggcttcattgcgtttcgtcgccatatgcaagcagctcatggcaagtcctacatagtatgctgtaacgtaaagttcattaatcagaacgtgctgcatcagcacgtccagaaggtgtttaacccggaaacgttcaaatgcgagttttgcggtaaaacgtacaatctccggataggatacattcgccacaaagagcgagtacatcggagcgaaattccctcgctcatcaattgcgagcaatgtccacgatctttcactagacaagacctgttcgaacggcacatggcccgccatgaggcgtcgacgaaagagaaaccaacctgcgatctctgtggtaaatccttcaagactcgaacaaatctaagactgcacatagattcccttcacgagaagaaacccaactacatctgtgagatttgctcgaaaccctttgccaggcggtggatgttcctagagcatcagttgtcccacgaatacaccgaagaacagctgaaaaagcagtgtcccatctgcaagagatggcaaaagaacctacggtactggaagaaacacatgggtcgacatcgaagcgaagggcagcacaaatgtgacgagtgcgatcacgtgtcgatcaatttggccgccttgaaggagcacgtcgaacgacgacatctgaacaatacgtcctgcgtttgcgatctgtgcggtaaggtgtattcgcacccggtaacgctgaaggaacacgtggccaacgcgcacacgggggaaccgctgtataagtgcctgttctgcgaaatgaagttcttttccaacgccaccatgtactcgcacaggaagaaagctcacccgcaggagtggcagcagtacaccaaggccagatatggcaataaagaggtggacgaagccggggaagaaggcagttcgactcaatag

SEQ ID NO: 1033 - DNA, 1470 bp, Aedes aegypti
atggactccctccctatgttagattctacaaaagaatcacaactgaccatcagcaacattatctgtaagcatttctggttcgaggaggatgccctgcaaacggccatcatctgtgagctctgctggcagaaggtggaccaattccatcgttactatgaggaggtaaagcagctccatgatcaactggcgcaacccaacacggtttttatcaagcaggaacagattgaatttgaggtggaatttcttagcgatcctcagaatcagatagaccagaaagtagaagcaggacagcatgaagtggatgatggaatctcggatagaggcatagagtctgacatagtagtggaacaagaatcacttttttgtgaagaaactaaagttgagattcaggaggaacagaatgaactgtcaatgaaagctaatagcaaaggtaaaacaataactaaaagggagatggtcaggaagcgagtagaattgttgaaccaaaagagacaaaagcaggatgattttatcaaacagcacaaaccgtacgaatgtgaagaatgtcctatgaaatttgaaggtttcattgcgtttcgtcgccatatgcaagcagctcatggcaagtcctacatagtatgctgtaacgtaaagttcagtaatcagaacgtgctgcatcagcacgtccagaaggtgtttaacccggaaacgttcaaatgcgagttttgcggtaaaacgtacaacctccggataggatacattcgccacaaagagcgagtacatcggagcgaaattccctcgctcatcaattgcgagcaatgtccacgatctttcactagacagcacctgttcgaacggcacatggcccgccatgaggcgtcgaagaaagagaaaccaacctgcgatctctgtggtaaatccttcaagactcgaacaaatctaagactgcacatagattcccttcacgagaagaaacccaactacatctgtgagatttgctcgaaaccctttgccaggcggtggatgttcctagagcatcagttgtcccacgaatacaccgaagaacagctgaaaaagcagtgtcccatctgcaagagatggcaaaagaacctacggtactggaagaaacacatgggtcgacatcgaagcgaagggcagcacaaatgtgacgagtgcgatcacgtgtcgatcaatttggccgccttgaaggtgcacgtcgaacgacgacatctgaacaatacgtcctgcgtttgcgatctgtgcggtaaggtgtattcgcacccggtaacgctgaaggaacacgtggccaacgcgcacacgggggaaccgctgtataagtgcctgttctgcgaaatgaagttcttctccaacgccaccatgtactcgcacaggaagaaggctcacccgcaggagtggcagcagtacaccaaggccaagtatggcaataaggaggtggacaaagccggggaagatggcagttcgactcaatag

SEQ ID NO: 1034 - DNA, 1581 bp, Aedes aegypti
atgagtagcgctacaatctgtttcatgtgtggtcaaaattctgtggagttacacctggcaacagacgactcaaggctcagtatcagcaatattatcagccagcatttctggtttgaggaagatgtcctgcaaactgtcatcatttgtgagtcttgctggcagaaagtggatcaattccaccgcttctaccaagaggtgagacagcaccatgatcaattgatgcaacccgacacggttttcatcaaacaggaagagattgagctcttggatgaggtagaggaagagggaagaattcaagagttttgtacagaggatgtagtactggaggaagtagggatcccgttcgaagaaaagagtgaacttgaaagcgaatgtaagaaactaccagtgagaacgaattctaaatcgaaacccatctcctcgagagaatccaaacaacgggaagaagacgatttcatcaaacagcacagacctttccactgtgaagattgtcctgtgaagtttgagagtttcgccatgatccttcgtcatacaatcgacattcatgggaagccatacattaagtgctgtaacgtacggtacagaaatcgaactttactattccaacacgtccagctcgtgatcaatcccgatgcgttcaaatgcgaaatttgtggcaaatcgtacatgttacattccacatacgtgcgtcacaaacaggaagttcatctgaacgaggatcaattggttttaaaatgtgatcgatgcccgaaacttttctctaagcaagacctgctccggcgccacatagccaaacatgaaaccctggagaaagagaaagccaaatgcgaaatctgtggcaagtgctttgggacgcaaatttccctgagggatcatatacaggccattcacgagaagaaagccaactacatctgcgagatctgctcgaaaccattcaccaaacggcaagtttttctggaccatcgcataactcacgaccttacggcagaccaactgaagaggcagtgtccgatttgcaaaaagtggcaaaagaatcccaaaatctggaagaaacacataacacgacataaaagcgagggagcattcaagtgcgatcaatgcgatcacgtttccattaacttggtggcgttgaagtgtcacattgaacggcaacataagaaaatgcggaagttcgtgtgcgatctgtgcggtaaggagtattcgcgtccagttacgctgaaggagcatgtcgccaatgcgcacacgggacaaccactgtaccaatgccaccgaaggttcctcttcacaaactctttcaaaaattgggccacgacgcaatcctacgacgaacatattcttgatgaagtcgctcaaattggcaccaaaatcgcagtcggctgccaactttttcaaacgggtagcccattcgaccaccgtctcactgtcgccttgacgtgcttcgaaaaatctggaacgctctcgaaaaaccaccaccgtaggggtaaaccgctggcgcatcaattcgcagagctgggcaaaattcttggtttctggcttgtccggaaaacacagattcttgataatctggtatacctccattga

SEQ ID NO: 1035 - DNA, 1584 bp, Aedes aegypti
atggccggcggtagctgttttacgtgtgccagaaaaccggacaaattcttcgaaatcgaagatcgtacggaggaatcgaagcccaacatctgtctcattatgtgccagcatttttggttcaagggcgaagaccttctgaaagctatcatctgtgaggtatgctgggataaagtcgagcaatggcataggttctaccaggaggtgaaggacctgcacgaggatcggcaggattcgaagccgctttcggttttcatcaaagaggaggaggatgagattgatgagcatttgattcgaggaatttgtgcggatgtgtcgtttgaagaaccgatggacgataaggaggactgtaagtctgaaatcgacgatcgatcggacgaaatgccatcgatggttgaggatagtccccctacaacaagaaagcttcgaaatacgtccaaaaaaactgcaaagagtaaggtatctgaacccaaaaccgtccgaaggaggagaaaggtgcctttggagcaacagaaagcagaggacgattacatcaagcagcataggccatttgtatgcgaggagtgcggcgaggaattcgaggggtttgatacgcttcgtaagcactcgatcaaggatcacgataagcaacacattatgtgctgcaacaatcagttcaaaactcgaacattactccaccagcacgttcagaatgtgcttaatccgcaagagatcaaatgtgaaatttgtaacagaactttcaagttccagagtggatacaatcgccacaaggaggaggttcacgctgatgaacatctgctgatattcaagtgcgatcggtgcccaaggagtttcccgaagcaaaagctgctaaaacggcacctcaaggagcacgaaacactggagaacgagaaggccaaatgtgaggtctgcggcaagtgcttccggacgcggatccacatgaagcggcacgtcacgcaggttcacgataagactttcgagttcatgtgcgagatttgctccaagggattcatgaagcattcggaactcaaagcgcaccgcgagtaccacgaactttccccggaggaaatgaagaagcaatgccccgtctgcaacaagtggctaaagaacctgagatactggagacgacatgtaacccgacaccagaatgagggagcgcacaagtgcgagcactgcagtcacgtttcggtcaatttgctgtcgctgaagcagcacatcgaacgcaagcatggcccaaagatcaagaagtacgtgtgcgatctgtgcggcaaggagtattcgcggccggtcaccttgaaggagcacattgccaatgctcacaccgggaagcccctgtaccagtgtcagttttgcgacaagagtttcttctcgaacgccaccatgtacgcccaccggaagaaggaccacccgcaggaatggctgcaggatcacaaggccaagtatgctactgcggagcagggcgatggaatcgatggaaccgtgaactagcatttgtcatgggtttaggtacctgcttgttgaagtggctgaggtatcatttttctttatttatcattaatattacattgaataagagaaaaatgtagg

SEQ ID NO: 1036 - DNA, 2736 bp, Aedes aegypti
atgaaggcgggttgggttctgttcggggcgtttctcatcctggccggagaggtgtggagcgagttggaacctccacagggaccacaggagacgagcgcttccggatccgtaagtagtaagaagcgcgatgctgaagcagaggaggagacaggtgaggtgaaggacggttcgaaccagaggaaatcggcggaaggtttgctggaggagctggttctggagcagtccgggaagaaagggaacgaaaaggccgagtttgacggcttcagcgatgagttgcactttatgcgttcgacgatcaagatagtgaaggcaccggatttgtcgcaggataaggaaagcaggaagatgtcggagatgttgaacgagctgctcgatagtcacgagcggatgatccagaagatcgagagcgagatcgacgagatcaatcggctttcgccggaggacgaaggggaagtagtgttgagtccggaacagttggaagcccaggaagcattcgatagggcgatggtggtgctcaacaggaccaaggtggacaagctgcaggggcataagttgatggtggaggcggccaataagggtcatccactggcaaggagtcacgtggcttgggctcagctgcttggtcatccggtgcacatggacacggaggctgcgaaaaagacgttcttggaactggccgaagaaggactccccgaagctcagatgggcctaggctttatgtacgcaacgggaatcggattcaacgtgagtcaggccaaggccctcgtttactacactatggcagccctgggggataattcgtgggctcagatggccctcggttatcggtcctgggccggagtaggagtgccgaacagttgcgaaacggcgttggatttctacaggaaagtagccacgaaggtggccaatcaggtgacgtttgcaggaggactagctgtccaccgaatccggctgctggatgagatcgaaaacacgggcccaagttccggaatcttggataacgacttgatcgattactaccaactgctcgcggataaaggagacgtgcaggctcaggtgggattaggacagctgcactatcaaggcggtcgcggcatctcgctggatcaccagaaagctttgcagtattttagtcaagcggcgaatgcgggcaatgccgtggccatggcttatctgggcaagatctaccttgaaggaagcgacaacatcaaagcggataatgacaccgccttcaagtacttcaagaaggccgcagatctgggcaatccagttggacagtccggattgggcgtcatgtatcttcatggcaaaggagttcctaaggacaccgtcaaagcgctgaagttcttcacgcaagctgccgaccagggttgggtcgatggtcagctgcagctcggaaacatgtacttcagtggcatcggcgtgaagagggactttaaaatggccaacaagtatttcaacctagcgtcgcaatcgggtcacgtgttggccttctacaacctgggtcagatgcacgccgtgggcctcggaatgatgcgatcctgccccactgccgtcgaactgttcaaaaacgtggccgagagggggaagtgggcggaaaggttgatgtctgcctacaacgattatcggtcctaccggttcgaggaagccttcatgcagtacactctgatgtccgagttgggctacgaggtggcccaaagcaatgccgctttcctgttggaccgaggggaaatcaatctgttccagaaccgcgacgaagagctgatacgggcgctgcaattctgggggcgagccgcagctcagggctattcggccgcgcaggtcaagctgggcgattaccattactatggactgggcacgagcgtcgacttcgagacagctgcttcccactaccggatggcttcggaccagcagcacaacgcacaagcgatgttcaacctcggttacatgcacgaacagggattgggcatgaagaaggacatccatctggccaaacggtgctacgatctggcggccgagaccagcaccgatgccaaggtgcccgttgccctggcattgatgaagctgcagctgatcttcaaactggaagcactccgagattccccgttcaccattctgctggatttggacgacaacatcgcctccaactgggatctctatctcatcacgattctgacggtggtgctcggggcagcactgtacttccgaagaccgcttccgccgggagcggccaactacaatcaaccggcagcggctgcccccgtggaggcggcagcaccagcagaagaggaagctccccttttggatcgacctgccgctcccagcaatacgaatccacgtcagcaacagcagcgcgaagacgcgccacaatgatcggatgaataagttgcttgaggtggatatacatcttgattttactatactttaacccatccattttagtctgattccgtgtttgttttaagaatcatccgtttttgcgacttcggcgagaagcgagtcaatgctgtaaagtttggtaaaatcagaaatttgtttgcactttcgatttgctttactctactactgcttcgactttacttgaaatgcttgacgagtgtgtacagttcggttctatgaaaggagttggttgcgttgaaattggtatgttggttacacattgagatgtagcagtccgtatctgctgtgagagcgtacgtagtagaagtttatgtgaaatatacttagtgtacgata

SEQ ID NO: 1037 - DNA, 1526 bp, Aedes aegypti
tttggcatgaagttaatgatttttatttatttgtaaaataaaatatatacgaaatatatattagaattacttttttttcttgctccgctttcgcgatcccgcaaaatctccgcactccgtcgtaatacactgcgtcgacattttttgtgtctttcccgcgcgctattgttttgtgttttgccattgttggtttcttcgacactttttttatgcattatttttcgcttttctttttcatctggaggggagtgccttacaaaaactaagaaaacctaaactgtttcgctttagttgtgttattacttcttttttccaaaatctctcgcttctattccgtctttctgttttgtgtgtgtcagttgtggggaatcattagacttcaaagaaggatgcacttcgatttaattgttgtaggctttactcctaaggaaaaaaggaaacatttaagccactcgtgcaaaaatgttagctctcttactcagagtcactaattgtattttttttttattaaatataaatctcttcctattaactcgtcctcccgcagttctcttactagttttaatgcttagcgcccttcggactcctctctcaaattggggaggggaaaattgccgaaggaagccattgtggaaagaatttaactccatattataattgtgaggcagacaacttcttttcttccagttgaaatcgtgtataatcatcaatagaactagaacaaagtgtaaatgaacaaacgtaaaaggggtggtggaaaatgcgaatggactcttacgaaacgatagagcgttggaaaatgcaaatggaaaacgttctgtcgaatcacatggaacaaaactaacaaaaataagaatgtggaaaaaaaacaagaattttgagttttataatcctacgatgcaccgggatttttttctttacctaccactccttgaatacttcagacctaacctcctaacccatagctgctggagaaaggattatttccaaatgcatatcagaaaatttgtccatctgacccatatttaacctttttccaacctcaataacgcctattccacttcagatcacattttagttcgccttgatcgaatatgggttgttctggtaactctggcgatggcatttaccttgttccagagttgccagaatttcttaatatttgtccgaggaaactaaaatgcaacacaaatgtgaaatacattcagggaaaacttttaagtttagaaggtctattctgacgaaaaagatcctctactaagccgagcaaacagacgcaattgcatgagggggttttctacaactgcagtggtggtgtgagtgaaatgattatccatcacaaaaaagaggattgtatgattgtgtgggggattgaatcgaaacgcacttaccaggtgattgaaaatgcaagatgcatgttaaactccacggggaaaattcgtggaacaacaataggttctcattggtttaccaaaaaaaaaaaccttcactgttaattgttttgtgttttctatcgttttcttttt

SEQ ID NO: 1038 - DNA, 1488 bp, Aedes aegypti
atgaatccaattttggacagtgggacatgttttctttgcttacgaaatcctgaaaattccaactggacaccagatttcgaaggagattccaaattaagcatctcatatctaatcgtgctgcatttttggtttcaggtgagggatatacctattctctgtgaagtgcagtgtgtgatatcttggcaattgcaggaagacgaattgcggggtgccgtcgtatgccaatcatgctgggagaaagtgaatcaattccatcaattctaccaagaagttaaaataagtcacgatcagttaaaatcccaatcgctcccgacagtgatcatcaaacaggaagcactggacattgaggaagaacagattgtggaaactaacatcagtacagcgacggtgaaggatgtggattggaagccagtgccggttaaaacggaaccgtgcgaagagcaaaccgaaccacccgttgctcaggagaagacgaagagaaagttgaaacccttctcacttgatggacgttccagatttcggaagcaactgaaggctcgataccggaaagcacaagacgacgtaatcaagaagcacatgcaataccagtgcgatgattgcgacgtgaaattcgagagcttttgtacggctctccagcacagaaaaagggaacacaatcaagcttcggtcaagtgctgcgagcggcagttcaagacacgttccatgctgcaccggcacgcgatgaatccgggaccgtttccgtgcgagacgtgcgggaggattttcagatttatgactgggtatcagcgccacaagaaggaggtgcatgatgaactgaacgaagcgtccttcaaatgcaaccgatgctcggaagtgttcaccgatcaggacacgttgaaacgtcaccaggcggaacatgaacggtcagtgtgcggggattgtggcaagcagtttcgaacgcgcaatggcctgcagaagcacacgaaggccgtccaccaggagcccacggattacatttgcaagatctgctctaaggggttctacaggcgatcgctgtttgtggagcatctgaaaacgcacgagaagaccccggacgaattgaaggaacagtgcgaggtgtgtaaaaagtggctgaagaaccatttatcgtgggagaagcacgtgcagcggcatcagttcgaaggccagttcaagtgtgacgagtgcgatcacgtgtcggtcaatttgctttctctgaaggtgcacaagaaacgacggcacggttcggacaaggaagaataccagtgcgagttgtgcgataagagttatacgcgcaagcaatcgttgaaggaacatgtggcaaatgcccacacgggtgaacccctgtacgagtgccagtactgcctgaaggggttcttctccaacgctaccatgtacgcccaccggaagaaggatcatccgcaggagtggctgcagaatcacgctactaagtttacgagtagggaggggggttccaacgacggtcaatga

SEQ ID NO: 1039 - DNA, 1454 bp, Aedes aegypti
atgaatccggaacttcatcctaaaatctgctttatatgctgccaagcctcgaccaattggtgcaccacggaagtgaccttagaactaaattctagctacattatctgccagcatttctggttccaggaacatgaactacggaacgccctcatctgcggatcttgttgggagaaagtggaccaattccatcggttttaccaagaagtgaaggagcttcacgagaagttaaaatctcaactgccacccattttcattaagcaggaggaaatccacattgacgaggatctagaacacgaaagctatgaggatgtaacaatgtcgaaatttgaggattcttcgatgatatccgaagaacgtgaagaagaacaaccttccaacgctagccaggaaaggggacaaaaacgtccgtggaaacattccaaaccacggataacgctaactgccgaagaacggcaagctcaggacgacgtcataaggcagcacatgccctacgtctgcgaggaatgtgacctggaattcgatagcttttgcgtgaccgtgcggcaccggataaacgtccacgaccaaacgtatctcacgtgctgcgacagacagtacaaatcgcgagccatgctgtacgagcacgctctcaatccgggggccttcaagtgcgagttttgtggcaaaacgttcaaattgatccatggataccaccgccacaaaaagcagcatcacaaggacgagacggaactgctattcaagtgccatctctgtccggaaagcttcgcccaagaggtgatgcttaggcgtcatttggttgaacatgacccgaccaagtgcgaagtgtgtgggaaggaattttccaacaaatatggcctacagagacacatcaaggattatcacgaagagcagaaggagttcatttgcgacgtgtgctcaaaagggttctcccgccagtcgatgtacttggagcaccggaggacacacgatttgacgccggagcagatgagggagcagtgctctgtgtgcaacaagtggctcaagaaccaggtttgcttggagaaacatatgaaacggcaccggacggagggagcgcacatatgcgacgtttgcgatcacgtttcggtgaatgcgttgtccctgcgggtccacaaagtccggcagcatggcccgaacagcaagaaacacgcgtgtgacatttgcgggaaagaatacacccgggtgatgactttgagggaacatattgccaatgcgcacacccgagaaccattgtacgagtgtcggtactgctcgaagaagttcttctccagcgcgaccatgtacgcacaccggaagaagcaccacccggacgagtggctgaaggatcatctcacgaagtacggtaccggtgaggagggtgcgcacgaagagggtggcagttctcaagctgttcaatgattgcggttcatgatgtagaaataaagacttaaataatg

SEQ ID NO: 1040 - DNA, 1401 bp, Aedes aegypti
atggaactgagtggaatgagagtagcttaccagagatgggaagatgtcctgcaaactgccattatttgtgagccttgctggcagaaagtggatcaatttcaccgcttttaccaagaggtgagacagcaccatgatcaattgatgcaacccgacgcggttttcatcaaacaggaagagattgagctcttggatgaggtagaggaagagggaaaaattcaagagatttgtacagaggaagtagtactggaggaagtagcgaacccgttcgaagaaaagggtgatcatgaaagcgaatgcaagaaattaccagtgagaaccaattctaaaccgaaactagaggaagtagcgaaccctttcgaagaaaagggtgatcttgaaagcgaatgcaagaaactaccattgagaacaaatgctaaatcgaaacccataacctcgagagaagcgaaacaacgggaagaggacgatttcatcaaacagcacagaccttaccactgtgaagactgtcctgtgaagttcgagagtttcgccatgatacttcgtcatacaatcgacattcatgggaaggcgtacattatgtgctgtaacgtacggtacagaactcgagcattactattccaacacgtccagctcatgaacaatcccgatgcgttcaaatgcgaaatttgtggcaaatcgtacatgttatattccacatacgtgaaccacaaacaagaagcccatctcaacaaggatcaattgattttcgaatgcgatcgatgcccgaaacgtttctgcaagaagaagctgctccagagtcacatagcaaaacacgaaaccctggagaaggagaaagccaaatgcgaaatctgtggcaagtgcctaaggacgcaaatttccctgagggaacatatagaggttgttcacgagaagaaagccaacttcatctgcgagatctgctcgaaaccattcaccaaacggcaacttttcctaaaccatcgaataactcacgatctcacggcagaccaactgaagaaacagtgcccgatttgcaagcggtggcaaaagaacacgcaaatctggaagaaacatttatcacgccataaaaacgagggagcatacaagtgcgatcattgcgaacacgtttccattaacttgctatcgttgaaggatcacattgaacggcaacataagaaaatccgtaagttcgtgtgcgatctgtgcggtaaggagtattcgcgtgcggtcacgctgagggaacatgtcgccaatgcgcacacgggaaagccactgtaccgatgtacgttttgcgacaaaaaattcttctcgaatgcctccatgtactcgcacaggaagaagactcacccacaagagttggaggtgtataacaggaccaagtttagcatagagcggagaaagtggtga

SEQ ID NO: 1041 - DNA, 1456 bp, Aedes aegypti
ctattctgcagttggactgattgcaccttttttgaacgatatatacatatcgtagtttacagaaaaaatatgatacgaatcatctatcttataacaccgtacttattctactgtgcctcggcgcaaaacattgtgtgctattatgatagccatgctgccagctatcccaccccactttcaccagatgcactgagcccagcaaagtgtacccactacacctacattggaatcggattaactacaaaaggagaaattcggcttttgaacgaaaactttgacacagagactggtttcttgtttttccaaaaccttcgcacagccgactccaaattgatgattctacttgggggaatttatgaaagcagtgccacattttcgacggctgtagcctcttacccagataccctcatcaataatatagcgctgtttttgacccgccacaacttcgacggtatcgacatagactggcgctacccggccaatcggggtggtcaatcatccgacaaggtcaatttccagaagttcatcatccgacttcgtgccaggctcaacatgataaataagctattggcggtttccgtttcgccaaggaatgccgtgttttctaatgcttacgatagcaccacgctgagcttgtatgctgacatgatcaacgtgtatgcattcaattttaccgacggggtggaaatatggaccaacaatgtagctccgatgtactccgataacaccagcccaataagtgtgaactcatcaatcgttgattggattgcgaccaaggtgcgaaaagacaaactcaacatcgtagtggccacttacgcccgcacatacacgctggccagggcaacccgcacaaccgtggcatcgccaattagtggccctggacctgccggatcaaacacccaaaaagcgggctatctagcgcagtacgagttgtgtccgcagaaaacaaattatgtaaccgtggcagacgatagcaccaaaaccgtctactacacgaaggacctgagctggatcagttccgagacgagtgacactctggccgagaagtactcctacgcggtgataaacggcctcggtggagtggccatttatacgctcgattgggatgattggaataatgattgcggaatgggagagttcccgtccgttgctgtggcccaggattatttgtactccggaacaaacgacgcttaaaattattgattttacattcggtgatgttgataaattcgcttatttgcatcacgtttgaagttcccaataaagtttatataagaaactccatatgcatggatgaaagcaactgcaaattatgagtcctaataaaaaccattgagactgtttgattacagccgccaacgttctcaggaatttgcttagattactgctctacttgatgattcgtaagaaactgaataggtagtgactttaggataaagacttcttaggttttttt

SEQ ID NO: 1042 - DNA, 6338 bp, Aedes aegypti
tttgtttttttttggttaatttttatttccgtttgcatcatttgtactaaaagtagatgtaaacattacattttcctttgaactagcaacactgttcgtctgcaacgtctgtcaagctgtaaaagtcgcaaaagtagaggcaaattgtccaagcattgaacgttaaaatttgtgtttagtttgaacaaattgccttaagcatttcaatatttataaatcgagaattgaaccaatgtgaattgatgatcaatagattgctgcataatttccaataatgggtgagacaaacggagatgttatacaatggaaaaagttgtggcaactgatatccggaattcactacgaaacgccgaatgccgtcgtccgggaccggctcatggacgtttccaaacagctcacagatggaattctgatgtatcgaaaggctgccaacgacaaacagtccgaagaacagttgaagaaagccatgaaggaacgtaaccagcagaagctgttggcttttgccaccaaattgtatcagtatttggacatagatgcattgcagtcgtggaacattctttgcttctatcttgttaacgaatatcgtggtcccgctaatgcattggcagattatctttccaccgagagctcgatgttgactttgctgagtgacatctggtcctattacagtttggaacgaatggttttactaaaggttgtcaaaaatctgctggagttctacaattcgggaaaccatccatactcgaaggaatataaagtcataatcgataagattggcatggccaatctgcgaaaatcgtacatcaatcagctggaaactttgatcaacgaatcgatgcccgggaagctgattccgggagatatgtttaacaaccaagcaaaaatggtatcatggtccgagcggaagttacgtgaaatgaatgagattttgcacataattttgatgatcatccataacgatggaattagcgtggaagacttctgccgtttgttcaagctattcaaagggcatgcattcggcaggcagcagcagtatctagactccactaacgaaaatcatggggatttggtgaagcgaatcacattcagcgagttggcgatcatctgcgaagcgttggatctgaccgagaagccagacaaaacagattgggctgaaggtgtcatcgaggcgctggacaacgagctggtcacgctacatcagttcccagagcatggtcctctgctgttgatgtggatgctattcaacttcaggatccctagccacttggaagacgacgatgtatccagtcgataccgtcagttcggatcgagagctatccagttgggagttttcgaatatcttcatgcgttggtcactcatcgaaccttcaaagatcacagctttgtttgccgcattacacggaaggcgatttacaaccagcttgcctttctttgtcagttgttcgattccgacggatcagtagctgatcatgcgaaagttatagatctcctcagtgaactgatcagcagtccctcaatcgcagcggacttttgcaaaaacgaactcaatcccattcgatctttgttcgatacatccctagaaaaattcccagtggattttaggcccttggctacaatcgcccacgctttggcttcagccggctccaactcctacaaattcatccacgggcttctggaaagtttaccagtctatagcgaggtgtacaatccggacaactacgagctgcgttcttcgcccacgaacgaggatgaatttgttctggcccatgattatgtaccgttccggaggattgggtttaaggttccacgcgggaccagcgtagttgtgctcgataagcgatcccacacgatggtgcactttagaacgaaattcaacttttacgacgcattgcaccacgagataaatgaattgctttcggatgctttggcttatacgcagcttaatgacgagaggattcaacgaatcatggcgggtatacgctatctagctgttgctgtaaaacgtgtcaatcagccacatgaaatcagctcggaaatggtccatcctacggagatggtcttcgatatccttctcaagttcaaggttgtccaaaatcccccagtcgaactgctagcagagtgtatcaacgtttgcgctgccctcgtgccgttatttgaaccggaaatctacgcgcgggtcataaatctaaacatacttccaactgtgaacaatgccaacctggactttaaggattacgccgctggaaccagtttcgaatctagtttgattggattctacttggtgaattgcgagaaaaatgccggaaagtatcgcatactgttggcttatctgaactttttgaaaacgtacaccaagctgggtaagagtaacatttttggggtagagctgcccggattgatattccttctgcgagaagtgtttccgcatgctcacacgtggaggtttgagaacgaagcagagcgacaaaaagtgtatgtgttgatcatgcaatatctttttgagatccttcagctaagtccggaaatgttaaagaatgactatcccagaacggtacttcagaatgtttgtgtgtacagcctgctggatctggacaacggattgaccctgttaaagtttgtcggtgttggcaatggatacttgcagtcgataatggaaaacgaaacaagttggatgatggcccaagagcaaagtatgaatcaactagtgcaactgtcgatgactattttgatgcagattctacgactcaaacggacagtgattgaagatgagaaaatgttatcaccgttagaatccgctatctatacgcaaccgaagcaacgagatacgctacgcatcattccggtagtcacgggatacatgaacaatatattcaataggagacttcccatattatcctgtagattgctcagacggttttctatcgaattcaaaatgtctttgctcgcatgtttggatatcgaaccggatcaaattcggttgatctttctgcaacgtttaagagatgatctggaaagtgataacctcaagatagcagtattggagttcgtggaagcgtgcattcacaagcaaccaggattgacggaagctttcttcaaagtccattatgataacgttgagcaaaggctatttcttggtgtgaaaccgggaaagaaaaagaacatcagtgatggcataccgacttatatggaagaatatctggaagcaatttccagtgacccgaagaagctggcaagtccgcttttgtcccgaatcatgtcattgtttcatgctctttggaagaacaacatgcaggtgttatgcaaagaactgctggaaaagaaaactttctggccaagtttgtgtaatcctttgtttgggaacatcagcgaaaatgttaaagcctacagtcagctattcaacatactaggaatagagctgttcaaaatcgatagcccacgtaaggttgatgagaatctgaagaaagtatacgaaaaatttctcgattatgacgtgttttcccgttgggttcgagctgttttcgatctaccgaaatccagtggagaaatatgcgatgatagttcctctttcgcatcgccagtaaccgatgagactcccgaatggctcagtcgtttacagtccttcaaagatttgatagttctgctgctaaggaaaaaagataccggtatcgtccttccggaccgcagcaaacgattcctagccgatcagtgtctaaacgttttgctagatcgtgcagagtatgcagaagatctccgcccgttcgttattcttgcagaactatatcttatagttctctcagactacgaacacaagtataccgataacactgagcaggacaacgaagttttgcagaagattcaaaatctgctcaacgctcttgccattaactataatgaacttcatggacgagcaaaggagtctgttctggcgattgccataaaggcagtagaattacaagccgatcagctaattgaacactcgtcagtcatctcgagcgttacccgatccgctgtcgaagtcgtctgccaagaagttcataacctagaagtgtcgacaaaggccgagataaaagctccaaatgctaagatcgcaactcgtggacacataccgctactgttggctctaaacttgctaaagaaactcattctcatttatgaagaaaacggaagctccgcagccaagtggcaatgttggttcattagaaataaagtgttcctgcgattgctcagcgtaacgaacgtaatgtcacagatgcactccaaacgcaagatcaccgaagaagtcttggaacttttagttgtgctggctaaaagtggatgctcgggcgagatgctacactgtgaaattggagattatctgtggttgaaactcttaccaccgaaggagctgctacaaaggccgtacacgatgtctaatgaagccgaaaacaagtggaaatcacaagattggtggccgatttacaccctaggtattgagttggtgcgggtactgttggcgcaacacaaataccgcttcctaaaggatgctttgttcttcgccggcatacacgaggaattcctcatcgattctttgctgttggccaagcaatcaatggagaccaaagcggtggcgttaattaaaggtaccctagagttgctggtagagctggtcaactacgaaaaggagtggagattggaacacggtcagagcttaatcaatttgatgagatgcgttcaagttctaatggatcatagtgttgcgttgctgtatcgtcccaaaattctcaaaagattagctgaaggcccatcggcagagctgtgtaacgaacaggacgaccccaatgccgttgatacctccgataagctggtcactgccatgaacaacgtaatcgagattgtcacactgtgtgccaagtgcctcttgcgattcagtccaaatttgttgaatctactttgtgacgttgatttcttccctgggcagtggtacccgttgatcgagattcagtttggagttccgaaaatgaattcggataactattcacagctcagctttggaactgtattaagagccgtgtgcatattcaccaaagttttaaatgtgcaacattatacgttccaagagcacccactcaatcaactgccagccggagaaactgattttgtggatggcacgtcaacgttgtctaacgcatcgttagctcgtctcaacaaatctgccataggtggcagtaatggtacaactcggcagtcgagccctcgtacaccattctccaagtcgctttctatgacatccgtctccagtttcacctcgacaaatgctattgccctctccaacgagcttcttacacatttggattcaaaactctgcatcagtggcttagaatttgtgcttaccttactcgcttcacaaagtttgcttgctttaaaagatactaacctatcgcaacgagagaaacaacttatcaaacgggagcttagcactgaattgctgattttccatgatttcgtaaagaagcgcatcctaaaggattcaaaggaaatccttactcgtaaaaagtatggatccgtacccatctacaatgatgatgaaaatgaaaccgacgataaaagcaacaccgagatcaccgtaaaatcggcgccgccaactgtcgtgccaaagaaaccggaccgcagtcattcgatgcgagtgaacgtggttttgaagcagcatttacaacaggcagcttcaacgccgctcagtccgattgctcactcttcgacgcggatggacccggctttgcataaaccgtcctcgtctactcctgcaaccgcaccgcgaggcatcttaaaaccacccaatgcaggatcggtcaaacgagtgatgtttgacgagggcttagagcatactaaaacttttgcctatgcaggcccagaagacgagcccatcttctatgaaccggaagattgcaagtacacgggattgtcgtacgtgaggatagtcgaggaggattacctacacctgttatcgaacctgttctcgatgatagctcaaagtgaaaattagttattttttgacaatgcaacaatgtttaaataatcatcaaaagggttaataaatttcttaatttgccaaatcggtatagtttattttatgtgaaagacaaaacggtattagccaatggtcacagattatattgcataggccaacatttgcgaaattgtttatcataaatcgatatcattcaaagttgtcacgttccaagatccgactctcaaatcgttgtcctttatacattgccccggatctgttgccataaaataaattcgtttggtggacctcgaccttttcctcaataggccctaaccagggttgcgctacctac

SEQ ID NO: 1043 - DNA, 2858 bp, Aedes aegypti
gaatcaaaacaaaacagttgcgtcgtgatacgaaatttttgattcattatcgaaaatttaagtaattttcatgaaatatcgtaatattaacaacttgcataaagtttaattgaatcaaacactacaacatggatgaagacgatgacacttactgtaaattcggaactcccttgccggcatatgaagaagacgagattccgtcgaagaaacccgtatctgtggaggaccaaatcgtgctggacgtgaatggtaagcgtcgctttcatggcgcattcacgggaggattttccgccggttattggaacactgtgggctccgaggaaggctggaaaccaacggagttcaagagttcccgcaaggagaaggcttcggctagggcacagaacccgatggactttatggacgatgaagatttgggcgagtttggtatcgcacctcagcgggtccaacccaaggcggattttgcccattcgagcaaaagcggtggtaagcgaccgttggatacgagaaactggaatggtccgattccgggagttccggtgttgaaatcgttgttggaaccagctagagagaagaccgctgtccgcatgttgaaaagaatgggttggcgcgaggggcaaggcattggagagaggcagaccagaggggaaaagcaaaaggccaaggatcggaacgataaggaactgtatgtgatgaagatgtatggatgtgaattgccggggtctgaaggaagaggaagaaatgcagacgattccgacagtgggagtgacgattcgtcggactatgagatcacttttgcaccggatgatttcgatccgttgttagctgcttttaaggataattgctttgggttgggctattcaggacttgaacgaccttcagctggtgcccaaaggtttaatctgttcgatacattggaaatagttgaccggaacaacaagaagctatcgatccgaggtcaagccttcggtgtgggagccttggaagacgacgacgatgaggacgtctattcgaaggacgacatgtcgcggtatgacttctctttggaagataaatccaagaagccagcagctatcaaatcgtccgcacatttgaacgattgcttggaagggttctgtccttcaaagaaatctgtgaaaggtgttaagaaggtgtttcgcgttaagattccggaaggcttcacacctcgaaactggatgcaacgtcgaacaagatttgaacctatggatgaagcgaaggaacaacagcttttggaagccaacaagtacaaaattcaaggtttgggccgacacgatctgaatcccgaaaaacgagccaaaactttaggagaaaaaccgttggaaaagcctcaagagtcgaagggcacagcattacttgatttgatcaataaacgttgcgactcttttgtgggaggaaatgtgctgaacgctgaaaaaactcaaactgtatcagaaccaaaaattgagacaaaatccttacagtttgacatcaaatctcatacggaaaatcttggttccactaaggaaggtttcaaaccattcatagcggaaccggaaaagcaggagaggtatgagaagttcctgtccttcaagcctaccgataaactgaaaaccagagaagagctgctaaatacgcttcagcctcttgggatgtcctcatgggatcgcgagagggaactcaaggaattcgaacaggctcagcgcatgtacagaccactggatggtttaatgtcggatcgattcgtaaccgaatccagtataattgcagaaaaggaagttgtggatccaaaaaagcaggctgacattcaaatgaagcgcgttcgtacaatgtggaagccccataaagatctctgcaagcggttcaatgtggaagaacccttcggaggaatgatggaagaggagaaatcgaagcccaaaacgaagttctccgttttcgactacctggaagcaccggtaaatcggaaatcggatttcgtgacacccgtggttataccaaagcgagttgagaaacaagaaaagcgtcctgaatccgtgcccatcagggtgtctgcgaaagattttttcgcgggcaccgaaaccccttcaaccagttacgaacagcgaagttccttgggagaaacttccaagccgcaaacacattctgctaccgtaactaaaccggttaagcgatccgacttggagcagaaagtgctggatagtgttaacaagaagcctgaagaaaagaaggatctcttcaaatccatcttctgtagcagcgatgaagaagatatgaatgaaaaacctccagataccgaccaattgccaacctcctcgatgaacgagtccgacaaactgaagttagtcgaaagcctggtggcaatcaagcccgcaagtcaaatgaacgttctacgcaataattcgcctcctcgaggaatcttcaaaagcatcttcgacatcaagcgaccggaaaatgaagcggccacttccctaacgattgcagtttcggacggttcgtcctcgagttccgaaggtgagccggaggaagaagacgcatattatggaccaaaactgccaacttccagtgcagttgttccttgctcatcaacgacgaagcctccacagctcgatcagttggatgccaaattactggaaatggtgcgcaagacaggatcgtctaagcacgccgttgaagagtgggtcgaaaaggataagtcttcgtcgaggaaaagcaaaaagaagaaagataaggagcacaaaaaggcgaaaaagcacaagaaggagaaaaagaaacataagcataaggatagaaggtaacgtaaaatgttcgtgtaaatatcgatagatttttggaggaaattaaaagtttgaattatacgttta

SEQ ID NO: 1044 - DNA, 979 bp, Aedes aegypti
catcagttgaaaagctccgcgtaggaacagtcattttgatacctacagctcgcatatattgtgaacagtggcaaaactggttcagtgctcaatcgtcaatcgtttatttaacgttaagtgtgattaattgtgtgattagtccagcaatgtctcactttgaagagcttctacaatgtccatataatcgttcgcaccgcatcttgcctcatgctatgcaacgccatatgttcaagtgcaggaagaacaacgcttccaagaaattggtatcctgtccgttcaatacgatccaccttgttcctggaccagagctgaagcttcacctggatagctgtccagatcgtgcaacgttcgatctgtacaaatactgcatagcgagtggaccttcgagctccaacagcagctacaagaacgatgaaccggagctgatctatcatgaatccatcacgactcaggggcctggaaaatctcttcaggatgacgacgagtgttgggacgattctgctgtgccggcgtacaacccgcagaagtactgcaaatcagccaaaattatacgtaaagcaactctgctgagaccttcggacaaacaaaagttctaccgccaggaacatcagcggcaccgggagctggattcggacaggaagcaaagcaaaccccaaacgaatcgcaagaaggatcacattccgttggacagatcatcgttcaaagagtatcgtgggcctgttccggagtcggaatattccagcgaggagcccaagatggctccggagaaaactttgcaggatgatggtaaaggcagggatcgaccattagagaaaaagcaggatacacaccagcaaaaggttgatagcattggtaatgatattgacgaaatcagtgcacagttttcgaaaaagataagcgtgggatgcaaataatatatacaaactgataattgtataataatgacaataaatttctataagtacacatcataaacttg

SEQ ID NO: 1045 - DNA, 8455 bp, Aedes aegypti
cctcagctcaagtcgtccattgtgtcaaaggtgtaaaaaacgacgtcttttcaatttcgcgtagaatattgggtgcacaaaaatgtaacttttcccggtttaaatctattttttagttgcttttcaagcggaatcgcatcaagagtttccggtttacaaaattaacatcccgaatagaaatatagtgaactatctcaaatattccggcaaagtaacctccagagctacccatattacataaaataccagacgtcgtttcggataaaagaactttaagagacgaagattgccaaactgcgtagtgctgttgaaaaaaacggtaaatgtcttagagaagattccttcggataggagaaccagtaatcagttgattgttgttgttcggatgagtgctaagggggaagcatcggcccaaacacgttccgtagccaccgtagccgttttgctcggctccttctacgcctgcgatgaccgatgagagcttggccagtgaacatctccggaaccggcagtggcagaaggcgaaagatatatacgatcaaatcttggaatcaaatgattcaaaactaccaaaagagcgcattattgcatgtctttacggaagaacagaatgctgcttggaacttaaacaatatgacgctgtcgctgaggattgccaacgtctgctgaagctgctgaatggtacagatcgtgtaaccgactcggccagtccaatcccgtcgtcagcttcgtcgtcctcatcgacttcgtcaagttcttcgacacaaaacaatgcaaccggtacaaccgagtcaaaagtaagaaagcggctgattcattccttatttaagcagaagaagtttgtcgaagcggaaaacattctacaagaatggtctgacagccaaaactctcaccaggacatctgtcgatatctggaacgcctgaaatccatactgaaaatggcttccgccaattcatcaccacctacaccaacgttaagcggagctgaacaagcatcacaacctgctatgcaacctacgactgcaacagacagctcatcttcgccgtcatcaccggaatctaacgccgattcctccacgacaccaacgtcaaccatttcgtcgctttcatccatcaacgacgaatatgagcagattgaaaccaaactggaaaccctcataatcaacaatctccctccggatcgatacacaaaacagttgaaccaaatcgaaagcaacttgcgtgctacatcggcaaccaacggcgaaagcaatggagatgacagtaatggcgattccgctgggtctagagagcaacattccagtgggaaggaatcggactcaggcgaaaggattgatacgaccgacgacaagtccacatctaacgggaatgatgaaagcagcaagagtgacaaagaccctggatcgaatgaatctgcgaccagcgaaattcctacgtcaacggaacagggaaataccgctgcggccaagtcaccaccatcaaactccaccaatgtgaacaatttccagaagcagctggataaaattacaaacatcagttgcgtctactgtacgctcacctttgcggaccggtcggaactgcgggcgcattgtcaaaccgaaagccaccagaacatcataatgtcggatgaaggtcgcgactggaaatggcgcccgcctccacgtggctacactgcggaatcgtacacgttatgtgaaaactatctggagaaccaaatttgtcactacggtaatcagtgcgtcgaagcccatggaaacgacgaactgaacgagtggaaggaacgtttccagtaccgtacgaaaaagctggaacgtgcccgagataaggaactgtatggcaagagctataccgagcagttgttggagcggtgggtacaggcgccaagtcccgacaaagtgatgaaagagaaaatcgaaggtgtggaggagtcctgctcgcaggatctagtgacaacggtgagctccaaagtgagcaaacgagaatggacatttgtgttgaagacaagacgactgttgaaggcggtggccttgctgcaggatgctcatcgtaaccactttatcataaagcaaatctttcctggagaaccaaggagtggaagcgttggtaagaagatgggtcaaacgacagccggcaacagggtggtcgaagcggaattgatgtccgatcaagaatgggttgcttcgtcggaagttaaacacaatgatcaagttaacgaaacaggtcccatgttagagcatagggtgaaggttgtgtttaacactgacatctatggaacgttccgacaggcggttgttttcgacctaggaagcgaaccagtcctggtgaaacatctttgcgtagatgttgttccagttacagaggtagataagatacaggaaattcgcaaagacatcgtgatgtctacgtcggaacgatgggacgaaacaaattcggagatgattgagttcacgaccaccatcatcccacacatgcatactccggcctatgctgcagatgctgaacgcgagaaggatttattggcgagatatcctctgccgaaagcaacgtcctttgtactgacgcaatctaccatcacagaaaagaagctgactaagaacaactatcgcaatcgtatccacgaactgttgtacgtcgaagagatcgcacgttacgaacagatagctcggtacaatctgacgacaagactaacaatagccactaactatttgctgacaccaagcggaatggccaccagcacagctaagtattcccattcgggtgaactatttgcgttaatgaagctaggaaaagatgtttcggaagacacctcggctgggcggttaatcctgaacaattgccaagcggtcctaattgcttcgaaggatcccgtgccatctggagaaaagcgtaaggtttacgaggccgttattgaggacaaaggaaagaacatgatatacctcaaagtatccgcaaaggctgtcgctggtcttggattgaaagctgatacagaattcgtctcagacatacaattccaacccaatcgcctaacctattgtgagtggcatcatgcaattgataagattgccgatttccgaatcattttcccggacatctaccttgaaccgagcattccgtggacaccgcagcgtcagtgggacgcctcactggatccgaaactgaactccaaacaaaaggaagcagttgtggccataacgacccccatcaacgtggccttgccaccgatcctcttgatcggccctttcggtacaggcaaaacgtatacgctggcacaggctatcaagcagttgctgttgcaaccggagtcgaaaattcttatctgcacgcactccaactcggcggctgacctgtatattaaggactacctgcatccgtgggttgaggaaggcatggaggaggccaaaccgttgcgcgtgtactaccacaagcgatgggtagctacggtcaacagtattgtgcagaagtattgtctaatcgacttgaacatcaatgtgcgcaacttccgtcgtccgacggtggaggatattctgaaacatcgcatcgtagtcgtaacgctgaacatttcgatggaactggcatcgctcgacttgccaaagggacattttacccacatcttcctcgatgaagccgcacaagcgatggaatgtgaagcgatcatgccgctggcgcttgccaccgagaaaacccgcatcgttctggccggagaccacatgcagatgtcaccggagttgttctccaatttcgccaaggaacgcaagttgcatatttctctgctggagcgtttgtacgatcattacccgaacgattttccttgtaaaatcctgctgtgcgagaactatcgggcacatgaggcgattatcaagtttacgtcggagctgttctacgagcagaaactgattgcatcgggtaagcaaccgagacatgagaaattttacccgctaacatttttcacgacgagaggggaggacgtgcaggataagaattcgacggccttttataacaactctgaggtttacgaagtggtcgaacgggtttgtgagttgcgtaaaaagtggccaagttcgtgggggaaaatcaacgatcaaagcataggtataatgacaccgtatgcggatcaggtgtttcgaattcgttcggaattgaggaagcgacgaatgggcggaataagtgtggaacgtgttttgaacgttcagggcaagcagtttcgagcgatatttctgtcgacggttaggacgagacgaacttgcaacactaattccagtgagagcagcaaaacatccgaggatgttgattatgggttcttgagcaattcgaagcttctgaatacagcaatcactcgagctcaaagcttggtagctgttgttggggatccagtggcgttatgttcgatcggtcgttgtaggaaagtttgggaacggttcatcgagatatgccaccaaaataagagtttgtttggaattacgtggaatttgttgcgatcgcagttggatggtgttgaattgaagaagacgtatgtgttgaaccctttggcgccagagttcatccctcgggcattacaagctgaagcatatctgcgcgagcaggcagctaatgtaacagggcaattccaccagcagcaaacccatcatgcccaacatcctaacaattatcaccaaccaatcaaccagaacttcccgagtgggcatggtggaagtggcggagggggagttaatagcggttcaaataataacatgatgcgacagattattccacagcagccattgcctcaacagcaacctccgtttttggggcacgggccagctcacagtggacatccacctattccacagcaaacacaacaaccgttttcatatcagaacccaatgttcttttatcagcaacaacagcagcagcaacaacagcaatcgcaacaaccgccactgcgaggaccaccaccccatcccaacgccctgggacctcctgtaccgccaaatataccccaaggaccagctgcatttcccccgaacaatccggcgaatctgtggagcgcacctggaaccggtgcacattttcctatggtaccttcgcccggtggtcgtaacactccaccaggttggcgacttccacagaaaaatgctgctcaaccgattcgtcctcagttggctcaacatcagcatatgcaactaacggccagcggcggaagaccgctcattcaaccacccttgaggagtcctgtatcacaacagcaacagttatctactgttccacagatgccttacctccaacagccccaaaataagaacttgcaaaactttgctccattcactcaccaccaggcacatcctccgactcttggccaccaccagcaacagcagcaaccccaaccccaacaacaacagcagcagcaacctcaccagctacatcagaatcacatccgtcccatccttggcggtccaatcagccccagctcctatcaacaacagcaacagcagcagcagcaacaacaatcccatcaatcttcgctctattctcagcaagatccttacctaaccaatatatcgaacgatataatggccacaataacagcaagagcttcgcaactgcaaataccatctgcacatcctccacaaaatttgctacatcagcaaaatcagaaaatcaatccactacgaatggacgatcgtctcgacaaagatatccagttcctgcaaaacgtacatttcccggataagtacggtcaagcgtctcaacctcttcaacaacaacagccgccacagcagcatcaccaccaacagcaacatcaaccccattctggcgccgcagcagcctccgcttccgatttcaatcacttgctaccgcccaacatgagcttcctggacgtggcactccagagtaaggaataccagtacatttggttcatcaagctcacggaaacccacggtctcgatgctgccaacaagttcattgaaatccttcgacaggttccaaacctggccactgctgcaggccaccacaatcaacagccacagaagaagcataacccgttgataccttcgcaagctgacctgttcctggataacatattgaacaccaacaaggacgtcatggccccgacaaacattcagcagcccacaatgcatcaccagtcgcagaacgcttccgtttcgaatgggaatgctctcctggcatgccaaagcggagggaagagcctgctcgataacgttgatctgtttggaaatttgtcatcgtcgctgcagaacgacatccctctaatcggttccaattcttctgcgtcgtcttcgcagcaatcggtcccactgtatcgtcgacaagctggccaaaactaccagaacagtaccacttcttcgtccaatgcccagtccatagcgtcctcaacaccggacctgttggacaaccacctgcagcagtcgctcttcgacgcattggacaataaactacatccgaacagcagcagtatgatgtttggtggtcagaacccatcccagttcggagctggcgatcactcgaacggtttccagggattcccatcgatacacaatctagcggcaggactaatgcagcagcagcaacaacaacaacagcaccagcaacagcacaatctcaacagtcgcgagttctggcatcaactgcaacagcaacaacatcaacatcagcagcaacatttgcatgagggccgtggcaattccgccaccagcaccgtcgaagagctgctaaatcgtcaaaatcaaacctatgccagtgtgctgagtcaggctggcagcaagtcgggcgcatccaaggatggcagcggagcgaacgatggcagcggcggttccggaggggtcccgttcgccgccctgcgcgatctgggccggaaaagcaacgggttctataactactttcagtaggcgcgaagagcgaacggggacgagaggtaagtgatattttttcggcgagatatatgaagtttatggttgcgcgcgatatgatcattctctattaaactttaataactatagacgatgtaatatgaagcaaacggggtgatagacgcgcgaaggagtatattgtaggaatagaaacaacaatgattgttgaaatgtaggaggtaatcatcaaaatcaagactggagcgaaaaccagacaagtctggtagtattgaattacaaatttcatttaattttatcattttgagttaggattaaaattatcgggtaagagcaaattaaatcttgtatactgatgaaccattcttgcaaccttttttgattgggaaagcaaaaaaaacacgttcgagacatcgagtgggaaaattattttcgaatttcttctttacggattaggagcgtagggtcgaacatggctaatttatttggcttcttgtttatgatgatttcctctcaagttcgaatttttacggcgtgactttgagaacaagctttgaaaagtgatgcggtaatcattgaaacggtcagaggacaattcgggaagttaggaaacgtagaaatgcaagttcataaaataaaagaaaaaaaaaacaaaaaagttacaaaaaaatcataaaataatacaaaaatccaaaaagtttcgtctacttatatacaattatataacacattacattaaataatttatgaaatgaaaaaaatatgataaaatctaatgaacgtataaaaaatttctattttacttatccaaacgtttcgatatttagtcatactttagattgaagtgtttcgtttgattttctattgactttcaatgaaatttactaatatatacgttacgattcctattttttaacgcttttgattctgttctccgtgcataactacctactacacactaagcaaacattgaatgccgagggcttcagcaataacgtgatagctattcatttgcaatattccccctgctgcacatcaatctcaaacgtttagcagtaccttcacacacatatatatgcatacagaaatgggggacaaaacaggttaatggggtatttttctatttttggcgaagaacaatgcaaagatgtccaaaaatgaacttaaaaactagaagagatcgttcagcaaattggcgttgatgagtttgacactcctcaaatgagagtcaatattttttataggattttacagagtttactaagaaaacatattaaagatattagaaattgtccttctagaaacttcggacaaattaccagaggcgctatttcgaaaaacaaaaaaatccacagacagtatcgccatctgttgattgcatgatgaagcttcaaatgctcagccacaaattgcacaaaggtgaccaagattcaattggttgtccgacatttcgcggtgtacctaccatttcgcggttagtaccatttgcggtatgccatttcgcggtccataccgtttcgcggtgttggttttcctacgagtggaactgaaattttttggcattatcgctaataacattttcatcggtgatt

SEQ ID NO: 1046 - DNA, 845 bp, Aedes aegypti
gaaagacagaatagaacactgttgaaaacattgaaaatcagttgcacgatgggacggaattggcgtgatgatcttcaagatttcctgcactcttatcgggcaacacctcacagtacaacacaatattcaccatctgagttactgtttggctggaacattcgtgacaaattaccaggaactacaagaccagtcagcatcaacaaagcaaaggaaaacgacaaaagctcaaaggaaaaaggtagagtgtacacagattacaaacggaaagcaaaaccgaataatgtcgatgtgggagattacgtagtagtgaaaaatttcataaagaaaaataagttgaccacgacattccatccggatccacatctcgtaatacagcgtgatggatcaagattacacttgaaaaacacaaaaacaggtgttatctctaaccggcatgtaaaccacacgaagcgcataataagtgcaaaccctatgttgaacgatgagaaatttgaaggtttattttcagaggaattctccatgacgtcagaaatcaaaagtcctgccattatgcattatgtcttccaagaatcccttggaatcaacgggaaatactggagaaccaacgaccacggtagctggacgaatcgcaccagacaagagtcataagcgacctatggaaccccttcgtagctcttctaaacgatcgaagcatctaccgaaacatttattagaatataaactttaattaaatacatttaaactttgttaaacgtagggagaagatgtaggatctaagcaatccatgatttataatatgtctagcttccgtgaataaagattcattataagttgttccacaaacc

SEQ ID NO: 1047 - DNA, 2433 bp, Aedes aegypti
atgactcagtcataccgtctgagatgccaagaagtgcaaggtgtactgcaggctaggctgcaagatgaagatcatggtaatagtacaaaatcgaaagcgcaatcgccaattattgcagaagccaagaaaagtgctccaccgattcaatgtgaggtctgccataaggtgttcattgttcaacgacaactggcggatcacaggagggttcacaggcctaagaatgaatgcaaatggtgtggaaaagcttatgtagaacgtcaacggctggagaagcacctgaaaactcatgaaaatgaaatacttgaggaacaggagagaacaaagtctgtggaaaacgtgccaattgcagagaaaatccaaacagttgagtctcaggaacaaaatgttgagccaagcactgaattagaacaaaataaatcctctgaaaattccaataacgggaatactgaactaggttcaaaacaggtgaaactggaaactgattctgctagttcgtcatttgtgcttgatacggacgtcagtgttcgcgatgaagagggacaagacgaacggctatctggtgttgatgatacgattgacgtagaggaaacgaaaatcgaagtacgtaatgatgaagatgaagctgatgagttagaaccggacgaagttgtttcatacgggccgggaaatctaccagatatctctgaaaaaactcaaaaagaagataattgtcaaggccaacaattccagtgccccgtatgcagtaaaatgtgtaaatccaggcagtcactgtggtgtcacaataaggttgtacatggaccgaaaaactatccttgcaccgtttgtggatttcgttttgttacagaaagagatttgaactatcattttcggagtaagagacatttgaagaaggtgcaggatacacacgaagaaagcgttgcagagagtacggacaaagacatggaacagagcagtacacctcatgaaccagatagtgatatcaatggtgaagccaaagctaaaattgattctgcaccagatgagccatccatcaacagtgataagcctgattcgccgaagctctcagtgaacaatgaatcgcttgcacaagaaattccggatgatcatcctatgcaagacgaagtggttcatgatcatagttctaatgtcgagcaaagtggtaacactgataatagtgatagtagatatgtatgtgaaaagtgtaatccttcattcaatcgacaatgtcagttgaagaatcatatgaaaattcacgatgacgaatcgatcggtgtgaatgaagcagggtctagcttgtctgaggaagatgattcagattatggacaacgtgcttcaaataatgaatatttcatagaaggtgctaacggtgaactacagttgcaatgtgacttatgtgacagagtttttcaagaaaggaagagactattggatcacaagcgacacgcacatggaccaaaaaattatccatgcaccgtatgtggaaaaccatttgtgctgagtgaggaattggaacttcatttgaaaagtcacgatgatgcgacaagtcagaaggaaacagaagtaaccagcgatgtaaggaaagatgatcagtcgtcgagtcaactcgttaaaacaaacgatcaagctgcccagactactggaactgagtcagaagatgcgagcaaaaagagcgaagaaaccgtaacgcaaatcagggattcatctccagagcctacggatgttgagtgcggagaatgtcataagaagtttttgaacaataaatacttatataatcatatacgaaacgtccatgatccaaagcagtatttgtgttcttactgcggcaaagcatttttatcaagtcaacttgtgcaaaggcatcagttaacccataagaatgacaaccagccactacattgcgcgaaatgcaacaaaagtttcccaacctggaggaaaacgtatatgcacatgcgaaaccatgccccaaagaaacacaaatgcgctatttgtagtaaagcatatgcgcaaccttcacaccttacacaacacatggcaagtcataagaagaaaggggaagtatctggcaccgaaacaaactcaccgagtctttcgaaaaatggttcagaagctgaatctagtatgactcttccagaaaccgtcgtcgaggatagccggaacgttcaaccctctggaagtggtgaaagcaaagcaatgcagaaaactgtcaagaggaaaagaccgagaagaaagacttattcatgctcgatatgcagcactaaatttcgctccaatgtgaaactcatccagcatactgagacgagccatcaggaggggtccaagtcgaatgagaaacggtctgaaatggataatttggctgaagttgaccgcgccggatcgcccaaaggacctcttcttttgtttgaagcagaggaattcaaaattgaaccggagtga

SEQ ID NO: 1048 - DNA, 1619 bp, Aedes aegypti
ttttgcttcgctgtcattcagagctgctgcagtcgtcaacaaaaacaccggatgacttgacgaccatctgagtggcaagcaaattaaatttattttaaaattttattctgttttagactccgtaagacggttttcaccactgaataatggcgatgaccgtgctggtaacgggaggaaccggactcgttggcaaagccatacaaaaggtcattggggatgagaaaccggccgatgaaaagtgggtcttcgttgggtcgaaggatgcggatctcacggatctgcaatccacacgtgcaatgttcgagcggcaccagccaacacacgtgatccatctggctgcgatggtgggtggactattccacaacatgaacaacaacttggacttcctgcgcaagaacattcaaatcaacgacaacgtgttgctgctgagccacgagttcaaggtgcgcaaggtggtatcctgcctgtcgacgtgcatcttcccggacaagaccacctatcccattgatgagacgatgatccacaacggaccacctcatgactcaaacttcggatatagctatgccaaacggttgatcgatatcaccaatcgagcctataaccaacaacatggcgatatgtttacttcagtggttccgtgtaatgtgttcggtccgtatgacaacttcactcctggggtcagtcacgtcattcccggtatgattcatcgattgcatgagatcatgtatttaaaagatcaagagaaaccccgagaggagaaagtgttccccgtctacggaacaggaaaaccgctgcgacagtttatctattccatcgatttggcaaaactattcatttgggttttaagaagctacgagagtgtggatcccattattctttcggttgacgaagaagccgaagtatcgattgcacagctggctgagtcattggtgaaagcgttcgactttaagggcaagattgaatttgataccagtaaggctgatggacaatacaaaaagacggcatcgaatgctaaacttaggaagttgttaccagatttcaagtttactgacttcgatagcgcgataaaggaatcggttcagtggtatgtggaaaattatgacaatgcgcgaaaatgatgagttttgtttcgttgttgataaataaacttttttggactacaaaccacggctcgttattcatgggaaccaaaatcctattaattatatataaattcaacgtgcttatctgggtttctatgcctttcattgccctcataattacacatcctttcaatagacaacctcagtccggaaatatcagataaatcatattttcctgttcactggcagtcttcctgtttgcttttagttttctcttcagctgaaaatgtattcgtttgtatgtacacttatacctctatttacgttacagattggtgataagcaaacggaatttaacgtaaatggaattctagcctccaaacttgagtctgcatctaggtctgcatgaaacttagaaaattatttattgcttgtatatatatcgtagcgttgttgcaggaaatatgtttagtttgatccaagggaagtttctttcttatattttatacacgtctgaatatttttatataaatttgt

SEQ ID NO: 1049 - DNA, 1626 bp, Aedes aegypti
gcataaaaatgcaaacaccggcgtacaaattccagccggaagattacgacaacgtttacgaaccggccgaggacagtttcctgctgctcgacgctctggaggatgagttggacgcgatcaaactgctgcagccggcgatgtgcgtggaaatcggtcccggcagcggaatcgtcatcagtgccatagcgaaagctttgcactccagtggaagttactgcatgggagtggacataaatcctcacgcttgccggatgactcagagaacaggtctgctgaatgactgccgcctggaggtggtcaatatggatctgttgggaggtttggcggatggatgcgtggatcttttggtgttcaatcctccctatgttccaacagctgaagaagacagccgggagctagaggaacagataggagagtttagggaggatggacataacctggtcaagtcctgggcgggcgggttcgacgggatggttgtcactaataggctattgaaggatctggataggattctttctgagcgtggggtattttatttgcttctgctcaaggaaaacaaacctatggaagttattaactgtttagggaaaaatggttttttaggtaaagttgttaaagagaggaaaataaggggcgaacatttgttcgtgataaaaataagtaggaaacagagcttgatttattgaatttattgtttttcattttgactgtaaagtatttttattacattatagaaatattgtttgtaacgtatttgtatatacacttaacatatagcaaaataaaaaaagcttttacacaagaaaagaactttctgttttaccttctggattttataccatttgtctaagataatgatgtcgattattttacatactttcgattcgtataacggttttgtatggacttgttcgatttgttagataataatcattcgaatgtacacatttacttgagttatacttccacaaatatacaaatattattttcggggttttttgtaacattgaacaacaactaataaaacataaattagcgttaaaatttgaaatcctctaaactcgtatctaatcaaaaaaaatgaatggtataaataaattacatccatttcccatcgcgcgcgccgaaccagttctgattttctgtctttttcctttcgatgagagcgatttatacaaagtaaagctcatggcacgttggttgtttcttcgcttgctgaacacccgaatggcgttctgtacttgatataccatttagatgtgccaccaatggaaaagttgttatgagaaaagagtgggtgagtcttgttggagtttagtatttctattttacgattgtttttgtcaagggttttcaatctgttacgttacgaccttctccaactgcctgagaggacaggtgaaactatcgattggacaactggagaatgctgcgctcttcacaggtcgctgaaagtaatattctacagtcactcaaattcatattcgtacagggcaatgagttggaggcatgaaaaaaaaggtaatttatgttacgctttgtaatagatggaccttcataattaatgtagtgttttaaattcgatacatcattcgatagttttttatcaacttgatccgaaaacag

SEQ ID NO: 1050 - DNA, 1605 bp, Aedes aegypti
atggtaggacaaagaatagcaaactctttactcaagagatcggcattttcatctgcaatcaatgtgctaccaaacgaagccgccgccacaatcgatccacctccgttggccgactatcggggccatgtgaaaccgtactcggatgtgccgggaccaaaggaactacccctgattgggaacagctggcgctttgctcccttgattggccagtaccgtatcgaagatctggacaaagtgatgtgtgatctgcaccgacactttggcaaaatagccaaggtcggcggcctcatcggacacccggacctgctgttcgtgttcgatgccgatttgattcgagacacattcaaaaaggaggaagtccagccacaccgcccagcgatgccgtcgcttcgaaactacaagtccaagctgcggaaagattttttcggcgacaacatgggcctgattggagtacatggtgaaaagtgggacgccttccgtgcccaggtccagcaagtgatgctgcaaccgacgacggcgaaaaaatacatcgcacctctggacgaaatttccaccgacttcatggccagaatacacgaaatgcgcgacgagaacaatgaactgccgggcgatttcctccatgaactctacaagtgggcgctcgagtccatcggacgtgttgcgctggacacccgacttggctgtgtttcgaaaacgggcaacgaggaatcgaaacgaatcatcgactcaatcaacacctttttctggaccgttgccgaggttgagctgcggatgcccatctggaggatatataagaccagtgcctacaaaaagtacctcggtgcattggacactttccgggagctatgcatgcgacacatcaacatcgcgatggaaaagatgaacaatagctctgaagtgaaaagtgaagagcacatttccatagtcgaacgaatcctgcaaaagaccaacaaccctaaaattgccgccgtgcttgcattggacttgatcatggttggcgtcgacacgacatccgttgcggctacctcgaccatttatcagctgagccagaacccagacaagcaggaaattttgtttaacgaaatcaaacgcagtctaccgacgccagataccaaattcaccatttcgatgctggaaacgatgccatatctgcgagcgtgcatcaaagaaacgctgagaatgtatccggttgtaatcggaaacggaaggagccttcagtcggatgccgttatcggaggatatcacattcccaaggggacccatgtcatctttccccatctggtggtatccaatttggaagaatatttcccagaaccagaccgtttcctacccgaacggtggctgaaacgaggcgagctgaaagaacacgccggatgtccccacgcaggtcagaaaatccacccctacgttagtttgcccttcggttacggacggcgaacctgcattggacgacgatttgccgaatgcgagctacaaattcttttgtccaagttgttccggcggtaccatgtggaatacaactatgaaaagttaacctacaaggtaaaccccacctatatccccgataagcctctgaagtttaaactgaccgaacgcaccgactga

SEQ ID NO: 1051 - DNA, 1082 bp, Aedes aegypti
cattttagcagccgttggcgtcgttcgttcggaaagaatcacaacagagtcattttggtagctcctaaccaatccccatcatcgatctgtgatcagtgaagtgcaaaagaaaagatatttttagtctgttcaagacacagttaagacgataaggactatctataaatcggcgggcagccaaacgtgaaacccgtgcatcaagtggattgtttctagaacattcaagcgtttgagcttgagaatttcaagtgcaaacagagtttctcgtgagcaacaaatcaattacagaaaatgggtgtccaggatgtccaggatcacgtgccggtgcagtgcgattttgaaattttcggacaagtgcaaggatgtggtttcacaaaacactgcagagacaactgcatagcgctcggcattaaagggtgggtgaagaactccaaacagggcacaattatgggcaaaatgcagggagccaaggccgatgtcaacaaaatggtcgaatggctgtcgaaaaccggatcacctggctgcaagatcgacaaggcagaattcacaaactggggcacactgtcccggtttgcgttcacagacttcgctattagattctaaggatacccggaaatccgcttggtttaattttaactgctagggactcagcaacagcagagcgttcaggagactgcttatcgctgatgaatcgtgtaaagaaagctgtaactaataatgtatatgttgatccccggaatatgagaaatgttatcaacggttgagttgatattcgacaccatcaaggagggatttcaaactgaatatgtgctgtattttgtatgtatatttgttacaattagaacatattttctttatttacgcataatataaagcaaacctacaaaacatcgattaatcgatgcgaataccggtatcggaacaggctttatttagctactaattcaaacacatttcttttcttttcgggcccgtaagaatcttttaggtaacagcgctgtctagcttctaagttcgacatgtataatttaccattacttagatgagattattaataaaaatataaagatttattacgactt

SEQ ID NO: 1052 - DNA, 2002 bp, Aedes aegypti
atggagaaggctgagctactgaatggttgttcctccagctacaacagttccgtgggggaggagcaaaataaatcgctgacctcgatcgaggctgatcgcagctttgaggaatactgtgacgaaaatagtcggttgatggaactgaacgatggttcttgtggtgagggggaagtggaagatgtaggcagccttttggagtcccagcaatcatccgggaagaatattgcctttgtccagccaaataatcatcgtaggtccgacgaaccgacggaactcagctttgaaaagtttcccgaaaatcacgaagaaaaattgaagcgtatcaaaattgagaatgcgctggacgattccaaaaccacacaagacgagtggaggaagtttgcgaaatcggagtacgggctcatcaatgatgacctgcgtcgcaaagtgtggcccctgctggtcggtgtcgatcccaaactggtagatcctgccccatccctcgaagaactcaacagccacccggagtacaatcaggtcgtactggacgtgaaccgttccttgaaacgctttcccccgggcattccctacgaacaacgtgtcgctctgcaggatcagctaacggtacttattctacgagtcatcatcaagtatccacatctcaagtactatcagggataccatgatgtagcgatcacattcctgctcgtcgttggggaggaagtggccttccatgtgatggaaatcctgtcgacgaatcacctggtcgaatgcatgcaggagacaatggaaccaacccagcggaggcttatgttcatctaccctctggtgaggagggaaaatgctgcgctttgcgattatttagagcgatccaccgtgggtactctgttcgcactgccctggtacctgacgtggttcggacacagtctcaactcgtaccggtcggtggtgcggctctacgactactttttagcctctgactttcttctgcctatatacgtgacctcagcgatcgtactgtacagacagaatgagatcttccgagaggactgcgacatggcatcgctacactgcttgctgtcacagctaccagaagatctgccctttgaataccttcttaaaaacgccgaagagctgtaccgaaaatatcctccaaaattggtcgaaaaggatgtggaaaacatgatagccaaggagaagcagcaacgactcaaagaggaacgcgatcgcgaacgacgaaaggctcgcagcgtggcaaaaccgggtggcaattcgttcattggtcgtctgctgccccatctaccggtgacacggcgttccgtgttcgtaacgacggcattttccattctggttggcttctgtgcttattactaccgtgcgcacctgatgcccttgtcggcgatcagatgagtcgagctgttccggcggattccgtcgactttcaccgttgttaccggaccgttggccacgtattggggctgggacagctcgccgagggcactgcagtaattattcccaggcataagtttggcaaaggcttgatcataccttcgtgggagagtcaaacgaaaagcccaaatcgctcgatccccaaattattgtatatttcagaacaaaaatgtgatttcctttaaaccatcattttcatcgaataaatttcatcgtgcatcttagtatatatttgtaaatagttaaataacaattttcggcatgttagtaataaaattggaaaaaatccttaagcattcaatagcggaaaggtaaaatcacaggccaccaaacagacattacattaatcgaaaacggttttatcgtacatcactatcaccagatattgtttccatgacgacagcatggtaactatacgtctgtttgactgtgataaatcctttatttaatcgtttggcttttatgatgaaaacatatgaaacgatgtagaaacgatatggaatattcataatacgctagatgttaaagtgaactgtatataactttagaaacaataaactaaaaatatattgat

SEQ ID NO: 1053 - DNA, 2524 bp, Aedes aegypti
ctttaacatcacagctattgtttacatgtgagaaacgtcaaaataaaaacacgcgagtttcgttctgtggtggcgaacgcattgctcattcctttcggcggttgttacaataatatggaaatttccttgataatttcagtgataaatcgcttctagtttataaaactaatcaaaaatctttcgatagctggcaaacaccatggtgaaagcaatcaacggcacaacgccgctcaagaagggacttaaaacagtgctgaaaaagttccgcgatcataccaaaaacccggaggtttttctaacagcccaaacgacgcgagcagagaaaatcaaggcactggtgaaatcactgtatgatcatggacaagaactcgaacatctcgagtacagcaaaccttatctcgacgagcttgtggtggaagagatggacgaggaacaaatctggcagcagctggagctgaaaaatgaacacattttgggtagcgatctcccgaagacatccaagttgctctcggcgagcgagaagcgactgcagttgcctttccggacggacaatggcgaaaatggagatgaactggatgaccaatccgaagatgatgcgatggaaagcgagggcgagctggaggaacaggacgaagagactcccaagcagaagaaaaaggctaaactgtccggggagatgaaaaagaaaaagaagaaatccatcgtagatgacgagttcttcaaactggaagatatggctcggttcttagacgacgaagatgcccgcgaaatgaggcgacaggctggcaaaccggagaaaaacccgttgatcgaaatcgactacttcagtgaaaacgtcggaaaggacgaagacagcgacagtgaggacatgaagtacgctgatttcttcgaagacgatgacgaggaaggggacgaggaagacgacgatgaattatccgatggtcaagaagatgagcagagtgatgagggtgaagaagaccaagatgaacaggacgatgatatggagagcgaagacgatggttctaaagctgacggagatggagaaaaggaagacgatgaggactccgaagatgaaatggaacgcaatcggcggttacgatttgaactatacaacagctccggagatttcctgcctggaaactatagctctaagccggatgtttcgctatctaaaccggaagaagacgacgaggaagagaatgaagatgaagaaacaaaagaaaatcatgaagaaagagaagaaaaagaagaagaagaagagaaggatgaaggtcccaaatcatctttcgagttgaggcaacaaaagttacagcaaaaaatccagaaaatggaaagtcaaatgctacaggccaagccatggcaactgaagggtgaaatttcggcagacactcgaccgcaaaattccctgctagaagaagtgctggagtttgaatcgaccactcgtcctgcgccaatagttaccgaggaaaccacgatgcgtctcgaggacatcatcaagcagcggataaagaacaaagcctacgacgacgtggaacgtaagattcggccaccggacaatcctcgcgaataccgcaaacagctggtactcgactcggaaaagagcaaggaatcattggctcaaatctacgagaaggactatctcaagcagctgaaggatgccaatcctgacgcacaggaagcggaagaggaggaaccaaaagagcacaaggagatacgtaacatgatgaaaactctcctcgcgcaattagatgctctgtcgaacttccattacactccgcgtccagcagtgcctgatcttaaaatcattaccaacaccccagccatcaatatggaagaagttgctccggtggccacgagtagcgccacacttcttgcaccggaagaggtgcacaatcgaccgaaaggtgacgttatggccaaaggggaacgcactaaaaccgacaagaatcgcgagcggcggttgaaaaagcgcttccagcgggaaaagttccaacgacaggcggaaaaggaacagaaacagctggagaagggttacaaaccgaagggcaaggacctgcaggagaagctactgaagaaagtgtcccaagcgaagaacgtcagcaccatggcggaaaccaagggaccagccaagtcatcgaccgcattcttctcgcagctgcaggatgaagtcagctcccagatcaagagcaaaacggatgccggtcggaaaaagaacaagaagaacggtgccaatgctgggatgcaagccacacacatcaagttgtaggttatgtaagtacaatgctaccagttatatagtaagatgattattacattaccgtgtgtgttaattctgatgacagccgttctgggtctgatttatttgacacaaacattttgtcataaaaaacagtcatttttaaaaagaaggggtaaattctggttatgcgaaattttaaatctattatatacaaggaaaaaatggaaaacctacatttgaatactttttaattaacctactttcaaactttgagttatttttctc

SEQ ID NO: 1054 - DNA, 960 bp, Aedes aegypti
atgaagtgtttaacggctattttattgggttttacgttgatttccttgattgggttggtggtggctgctgttgagagtgcggatagaccgagtgtggattcccatgggaaacgaaatcgtaaagtcatttatgttgaggatacggatgacgattatgaagatgaagaagcggatgtcgtgtacgatgaaaggcaaacaaacggcgaaacaaacattcgattgcacatcaaaaaccttcagattcaagttccagaatcatctctgaacactttccataagtccgatatggcgacaatgatacaacactcaatattcaaattgtttggcattccattcgaagagcccgctcaatcatctttaccaacccagcaagacctcgccgaggaacaacaagaacaacagcagcaaacaacgtccaattcaatgctgcaggtgaacggaaacaatctgccggccaaatttttcctcgagataagtgacttcctgatgaacaaccgtgacaatgatgcggtagatgacaaacgcgtggagactaaccataagcagaatgccgaaatctacgccaccgaagagatcaagatcgaacgcttagagaatgtgaacaatgtgaaaaatgaaacaattacgatcagcaaaaaacgttacagccaatcgcctcaggcagatgatcaaaatctcaccacgtttgaaatgacgcataataagttcagcaacaatgtgactctgaataacaccgaaaaggaggatcgtttccaacaaacgcgcccaattcgtttgggcactactgtagcggtgatgcaagtggaaactgactccggcggacggccgaagacgctgcgtgaaaaggtcatctggcgaacggacgacaaaaacgttgaggacgatgacgaaaacggtagcctattaatccgaccactgaacgggaattgattttttttagtggaactgatgatgaatcag

SEQ ID NO: 1055 - DNA, 1597 bp, Aedes aegypti
atgagggccgtagttcttcatgtggtcgactacttgaaccagaaggagcggaaaatcttgctgaagagcaaccggtgctatcggaacctctccctggaatggaccgaggcatccagtgtgccgtttctgatagaggtcatcgataaatttggcgaggagcttcattcgctgaaattgtccacctacgtcataactcctccgattctagttggattcctactgaaggcacccaacctgaggcagctcattgtagagggaagcgtctgtaacgaggattttgttatggctctgcctgcatttaaacagatcaaagcgttggaaatgacgcagcgaggatttgagagcgaactgtgcgatgtgattcctcggatgtttcctagtttagtttcgttagatttggtgggcgctgaggatgcggccatcgatttgattatttcctatggaaagcagctcaagtatttgcacgtcctattggagttttcgcagttccgacgattctccaatttgaattgcctggctggacttgagaggatgcatgtatcgtggccacagccaagcgatttcagacaggttttcagtgtgttcgagcaaatggaatcgattcagagtgcctcacttaccggtccggtaaatgaagctacgttcgatctcatctgcagccggtggaaaaacataactagtctatgtgtgaatgttcaatctcttaaagctgccagcttcagcaacataactgcttttaggaagttaaaaatccttaaacttcaaggatcaattagagataacaacttccttaaagatatacaactgccaacagttactcatttgattctggatggaatctccacgaacaatgggttctacaatcacatgtcgacatttgtcccaaacctttggatgctgaaaatctacgatcatacattcgaaaatgctcaactacgattaattactaaaacaatgacttcgctgcgagtgctttcgctggattattgttaccaaatcaaagacgaaggatttcagctgctgaataatctcaccaaccttctggaacttcgctgctggtccatttccatttcggaaaacgcattcattcgttttcccaagtgccccaatctgcgaacgtttagcgttggtggtagtggctggataaccaacaaaacggtgctggatattccgacagctttcccaaatctgagggaactccaggtggtggactgtttcaaggtggagggggatacgatctatacgctgcaggagcgtatgcggaagtgcgctgtcgttcggttggccaagcctgatttggatcgggaactggaggccgtctggggctggaatgattgtgataagtgacgtgccgttggaagcaatatttgtctcgtttgaatctatcagctacatgtcgataatgtccattatatccctttgaccaaaccataatttcacgtaaaagacataactgtgtccaaatctactacttatctacattaaactcaattttactaaagacattttctgtttttttataagtttgtatataacactatgttatacgtaaagtatacaagcattactagaatatataaatttaattgctcattcc

SEQ ID NO: 1056 - DNA, 1331 bp, Aedes aegypti
cctgcgatggttcggcagttcacaaagcgctattgttggaatcgctgtttgttgctatcggatttgattaagaatattggctcacacaaagtgtaaaacatggccgtgaacgtttacagtaccagtgttaccacggagaacctttctcgcaaggaaatgcttgcgtgggtcaatcgcacgctgctttcggaatttaagaaaatagaagaactttgtacaggcgccgcctactgccagatgatggacatcctcttcccgggatgcgtcccacttcggcgggtcaaattctgcaccaacctggagcatgacttcctgaacaatctgaaaatcttccagaacggtttggtcgccatgcaggtggacaaagcggttccgatcgatcgcctcatcaagggccgtttccaggacaactttgagtttctgcagtggttcaagaagtttttcgacgccaactacgatggcaaagagtacgatccgatcggagcgcgtcatcagcatccaatgggttacgggacgcccaatacgctgcgtcccagtcagagggcgaatgtgagtggtggggtgccgaaagtagtggctgggatgaacaaatcggtgaacaaatccagcgacaagaagtccactccaacgacagcgctgggaaatttgaaaatcagtgaggctaacagtgaactgatggagcaagtgcaaatgctctcgcaggaaagggatgacctgacggagaagacgcaaacggtggaggcagagcgggattactactatcagaagctgactctcatcgaagctctggtaaatgaagaggattgcgacgatactcgagctttctgcgagcgtgccaaggaaataatgtatgctgaaggctaagccgttgcactcgattttaagtgaagattgtagacaacttttggttgttatttttgtgtattatgttccatatattgtttgaaaattgcaattttccctgttgaaattatacttttctcaaattttaagaacaatttatgtgaattaaaacttaggtttatatttttatatttttaactttgttttacaggcatacatttttcaaggattgtctccatttatccaaaaaataattccattttgctgaactcaatagagaatacttaggagctacaaaaaatggacttctgctaaagatcataccagaaacaattcgaatgtttcacttagaatacgctaagggttgtgcaaaaattcgtcataaaactttccaaattcaaactaaagatttttacaagaagtacttacagggctaacagggcactttttagagactcactatttttattcaagtttttaaaacgcct

SEQ ID NO: 1057 - DNA, 1028 bp, Aedes aegypti
ggcaaagttgttcagtaggtcaatatgaaatattatatgaaatatcgtaaactactatgtttctaacaaaacttgagcattttgcaccatctttccctccacctatagaaacgccagagagaataaaacccaccgaaccaaaccacccattcggggtataatcgtgttacagtaaacttcacaacttttgcgagcgagagagagagtcaatctagtgggcggcggtggtaggaggaaaagttcaaccatcaacacccagaaaacgcagaaggcgcaggcagcaaggctggttgattgatttgcactgaagccggctgctgggttgctgagatcaacgaaacaggctaacgttccggaacgaaacatcggagagaagtgaaaacgcaaagtacctgcctgcctgctgatgggcacctgtactactatgatgggtggaaaaatgcagcagcaggaacgactaacttccgctcgattaatcattgctgtggtggcgctggtgttgcagttgctgacgttgttgccagtgacggaatgcatccgggcttacggtggagatccgcagttgaatgcgatttatttcaacgtgttgatgagtgaaggcttgaacgtgaatggccaggtggaactgttacaaaaggcgctggatggagtgcagtacttcacggcgcgacgacaaggaacccagatggacgagagggttgagcaccagttggcacagctgctttcgttgattaatcaaaacttggtcaagctaccactcagtaatcggacaaggactcagatgtatgaacagttgctggcgattattcaaccaatcatcgatgtggagatttgaattgtttccaaggcaattttcgcttgctttgtttcggtgataataaaatgtttaagtcgatcatgccgtgcccaagtaacacaacttgtaaatgaataaaatacttgattcatacaaattggtatggtttgtggtgaatatggatagcttaattttgtacacttatatcaccgaaacagcgcaaaaaaatggc

SEQ ID NO: 1058 - DNA, 3620 bp, Aedes aegypti
atggccagtaatgggggaactctccatggggttccccatacgcagcaaagcttaagtgggcaccatagttgttcgcactgtgggctctatttcgatagttcgtcgtcgcttcaagtgcatatgcactaccaccatgaaagcatgaatcgttggggtcccacatctacgggaagcttgcccagttcaacaacgtcgtctacgccaacatcggacactgaaaataacaatcaaccgtcgttgaagtcgcatacaaagtcatcatcaccgcatcaaacaatcgcagctgcagcagattcaagtgataaccaaccgtcgactccgcagccaccaactctcccagaaccaggtacgcctcaaagttttactggcggtgcgtcgccatatcaacaaccagcagcaattatcgctccaccagagatgcactacccaacctatatccacggctacgatccctattatcatccgacaagcattgattacggtaatccactgcctccaccgcatctccatagtcaatcacaatcagagtacaaagcagtgccttcagtcagataccacccttacaataacaataatctcagcaacggaaaccataacccatcatccttgagctcaagtaacagtgttacaaacggtacatcacccctaaatagcgctggattgagcccacaagtggtcagttcctccagcagtacccaaaacccgacctcacaaactgcaacaacggtagcttcaacaacaaccacaacgtctcctcaaacaagcggatcgcatattcctcccactccttctccatctccaattcaatgtgaaaagtgtggtttggtgtgtgattcagacgaagttctgagtgagcatgacgcatcggtacatcagtctcagcagcaaccccctgcacaacattcatccgagggtaacagtatgaatcgaagcgaagaaccagacatgcaaagtggctatccttatggaaacaatccgccacctttcataaaagaagagccgccgggttcggacattctcgatcttgactcacaaaagatggtttatccaccggagcccgtgcttccaccgatgaactcattacaccctctacagtcaatgcaacgtcatccgatgatgtgggcacatgacccacacaacttcattccaccgcatccaacacatgatttgaaagcaccctattaccaccctcaaatcaaatcggaatactctacaacgccatcaattaagggcgattatcctcagcatgccgctatgcatgttaaaccagaatatactgctattgtcgctcctgcgccagttaaaaacgaatataacattccaccgactttgccgtcggctgttccacaatctaatcaaccggtgaagtcgttctccgaagaagttagtgagaataatcagttggcaactagcccgtcagactttcccagtacaacgactccccaggaaaatagttcgcaatacagaaatttcgaacctcctacttcgtcgctacccaacaatgcattaccatcaaaaggaacggcatggaaatctaacgaagctagaagaccgaagacttacaactgcactgcctgtaacaagtggttcaccagttctggtcatttgaagcgacactacaacacgacactgcacaaaaatgcggttaaatcaagtggacaaccagatcccgctacgttgcccatcagtattcatcatcacccgggccgtgatcccaactacggaaacaaaggaaggcgaggctctgctgctcaaatacagcaacctatacaacagccagtaccgcctcctgatcctcctagaagtcccgactacggttcgcagtacagtagtgcaccggggtttacaacaggagtacaggggttccaccagtacaatgccaatcttcaaaacacttcgtcaacggttcccccaaacggggcaccgaactatcaccatattattggtaatcacacaacgccctcagaggtcacggaaatgatatcgagcgatcaatactttacaatcaatggatatgatagcacatccgtagattccgctgggttggggtttccccggtattcggggggcgccgaggtgtatcagggtgatacggcgccccccttttcaccaaatgtaccggagcaatatcagccaaccgattcgctctacaatgaactccgtacaccaactccacaactagcagcaacggcaccttcgctttcgccaggaccatgctctccaagggtcacatcaacgggaaccactttgccgtcggaaactcgaagcaacgaaattcatcgttgtgaagagtgtgacaaagtcttcaacaaatcttgctatctgacgcaacataacaaaactttccattcgggcgataaacccttcaaatgccatcgctgtggaaaacgattcccgtgcgatcagtcccatgaagaacatctggcaaaacacggtggagaaaagccgttcaagtgcgagctatgtcccaagcagttcaaccacaaaacagatctccggcgccacatgtgtctccatagtggttccaagccgtatgcatgtgatcagtgtggcaaaggattcattcgcaaggatcacatgctgaaacattgcgaaactcacagaaagaaatcggttgcagtcatgaagagaccactcaacggaaagctgaccaatcagattcatccgaaggcactcatggtgggagacgaatgacaatggtttctcatccgttgtctgactcctgagccgtgatcgaagtaggcggacaacggatcgccaccgaaaaggaagcgtcagctcaattggtaatgtttttgcaaatctcaatgttttcaaatttgattttattttttcgtttgggtgattcttagatttttatttgtacaaaatccaacgtttccttttataagaaacaaagttacctacatgattcctcttgccaaaaccaggtgcagtacactactacctcaatgtaacatttaatgagaaaagaagaataacaatctgacaaatagccaatcactagtttaattgagtattggaaatagcaaaaagcgtatgcataagtcaacacagaaacctacctcaatagttattacaattcttattgtgcgacggtagaccacacttcttcttccgtcgcagaataagcgaagcaattcaaacaaagttatacattttaatataaaccaatatttacaattataccgcaaaactgatgacgcaaactaaagcaaatataatgagtgtatttatcgtaataaatcacacaccgagaagaggattacctgagcgtggtgaatctaatggagatttaagaaagtattttgaaaattattttaaagcaatattaaccgttaatagaaaatcaaactaaaatcacaaaacagtggctacgtctctgcttgataaagcgaaacaagtacctctcttgaaacagtaactatcgtcatcacaggaatggaaattatatcacaatggatgaaaaaatgttataatagggtcattacaaaccaaactttcaataaagacaacagaacaaatgtacaaataaaacctggtaaaacaggaaacaaaatgagtgtaaaaacaaaaattgcaaacagtactctatacgaaagaatcatacttgttgttgg

SEQ ID NO: 1059 - DNA, 1793 bp, Aedes aegypti
gttttgcgattggaagcgtatacataatataatttttttctgcgatattcggcttttcataaactatgggtgattcaacatgtgtggaatgactgtatttttttctagcgtgggaaaccaaacaactaagcacgcagccattttataccagatttgctaaaccacccccaacaagctcccatcccctttccagagcaccgttcactgaacggcgttcagtcaaaacaaagcgcgaacggcgcgaacaacagtaaaagtggcgctctgtgagcgaacgtgcattactttttagcattgtaattcttatgcatttgtttgaataataattgtagattagtgaacaaaattgtattcatctactcaaaatgttattcagccaagattatcaacgttcggtcgaagatgtccatacgataatccaatatgcaaagctggatcacaataacttgaccaatacagcacaggccatatactatccggatggcgatcaggacatgtccaggctgaagctactcgaagcggatgatcacattctagagcaaatcaaggaaggcaaatcggtatcgttcaagggggctctcaacgaaaaggtggtcatctgcaccgaatcccggacgtacgaagtgaaagaagcggaaatttcaaacagtttactgttgattcctcatttgaagcaggcccaagctacaagccgatctccaatcaaaagtcccaagggggaagttaatacatcgctggacagcagcaccgaagaggtagaggagccagtggacagcatcgacactgtagagcgtagagatgtggtcaaaatattccatgactacttcgagtgtcgtcaggtcaagcccaagtataggaagatcatcgatctgctccggttgaccaaatattccggtccagagaatgagcacctggtcgatcgatcgctactgttcagattcaatcagctgttggatacggttcaatgtagcaaagaggagttccaggatggattgaagaagtatcgcgcgatcgagatagacgatcgcattcgaatgctggacagcgagtacgagtacaggatcgtgacactgctgttggcgttgatcggagaaaactcgtgggatctggatgagatcgataaggatgtgagcgtggaatcgctgcaaggaatcgtcccgtatgaagcagccgacggagtattcgatttgtatacggagaaaagcgaaaggtttccagggaagttcaagtatcgcgaagatctcgtgtgttcgttgtttgcggagaaaattcttcagcaaggactaaagttccagatcgatgatttcttgatgacctggcaggaaacgctgccggaagggttcaaggccgacgaaaagtatctgcgtggaattgggatcatcgatcgcgaagggaacgtcccctgcgtaaaggcgctgaatgaagcagacttgcccacgaacttgctcgttcgattggtaacattgttcaaaacgaaggaacgctggaacttggagcagattgaaccgtacattgaatgcttcacgacaccgacactgggagtgacctcaatccttgctaagcacacgcgttcattggtagtgaatggagtgcgaatttacgtgtccaagcactgataaaggtaaagtttggaaaactgttgttttgcaacgtgggagaatatatacctgcggttcaataagtacatttaagttttgttctataataaagttaaataatatttttagtcttgtgtcgcattactgagaattatggtgaaataagttcgtagctacgcttcggattgtcaaggg

SEQ ID NO: 1060 - DNA, 2420 bp, Aedes aegypti
tattgcttcactagttctaatacctcgaaaaaacaaattatttgaaccactcacataaaaagatgctatgagatcactcttcggtcacccacacgatcgttcttcattcggcgctggatgaaataaggtagcatgcgaatctttccgcggaattccaaaaactctcacacgattagcattcgggccagagccaagtcaagtgccaatgcgccggccgccgagtggtgacaattgcttttagcaaacgaccattccacgcgtagattaccttaccgatcggtgatatcgttcggatccgatgactgttgtgtgggacattctatctcgagttggtatctagctagctatcgtcatcagcaaacgggcggcggtttattgtttttatgccgatcggaacggtggatagtgtgcgatcttgaaacgcaaatttgtgatagcagttataatatttgagcaacaaattacagttattttagtatttgcactggcttgcagttacatcttctgtaggtaataatctcacctgctcaaattcaagagacgatcaagaatcctagtgactattgtgacttcagttagtgcaaacaatggcggctgccatggagaatattacgaacgtgaaactgtatgatttgattaccagatggatagaagtgcaaaaactgcggccggactattgcgatggaaatccactgaaagttgacgtcatggatctaacgttgctgctcaaatcgatgggcctcaagctggaatacattgactttgagaaggaaaaactgaacgcggacactctaaccgtacaaatcgcttgcaataaatcaggcgttttggcaaaacttagctacgatttggtgaactgttcttgcccggataaaaacgacaaagaaacttcgttttgggaagtacaaggtactggtccatcggtattctccaaatttagaaatgacacctcttcgaaccttctcccggaaatttccgaaaagtgctctatggtttctaaggcgatgttgtccaacctgttggattactaccgaactaacattaaagctatcgagcgaggcgaagatgtcctgcaatctccgctgaaggttgctacccctacgatctgtgttacgagtccaggattgaccaatcatagtgccacaccatctgcagagggaaaaatagttatcgaggtcgagtcatctaatatcactgaagcaccaagaatcaaaaccgcaccagatggtagcattatcagacccaggtcattggaagaacttcaggaaagtccgcagaaagtattaaacgaacaaggggatactaaatcaaacacatcgtcggagagcataggaataaataacgcaacacgagaactatctggccacgggacagtaaacccaataatgattgaaccaactctttcgaactcacatgttcctgatgacagctcatttgccaacagcgaagccatgaaggcattgataacgtccagtcctaacgaaaaggtgttcgactcgatccttaacgccgaattgaaccaggaacgggacctcaacgtactccattgtctacaccaagcgcgccagcaaattgatgcagcgcttctagtcatgaagctgaacaacccgtacacagatcttagcaaggcgaccaccattaccaccacaccacaaacggtgattcggaacaagggagctgtgccaaaattaacggagcgaaacatagccgtagcgaggagaatgtctctgccaggtcgtccgtccgattctcccaggactgccgtaacgaacactcccggtatcccgaggaagaaacccacagttccgtcgcaactggctaaggcacgtggcgacacaccgcatcccggcacctcgaattacaaagccgtttcaatgctgcggaaaacaagctcgtctacttctgtagcgagcaccggttccgtgaccaaaacgtcaagtgcgccgacgatggcctccagaaaaccggttggcgttaccaaacccgtaggaagtgtgcggccaacggcaagctcggcgataaagaagactacatccatcgctaggtccgtcagttcgacgaaaattgataaaaagtgatttcaatcggtcgtcgttgggttgttgaagttgttgctgttgattgtttcaggagacacttttgtatattttaattgctgttgaatcgctaggaatcgaaacgtggctcttaataaataaagtgattctttatacaagtttcactgaactattggttgctgttattaatcagaagatttagaaattcatcgcagctgttttaatttattgaacgcccattattactttactacaaactatgcaagaaaaaaatgaagaggacattatacacccaatgttataggtattagaaatatgctaaatttgttggggcagaaatgcagagagctttctttttatatc

SEQ ID NO: 1061 - DNA, 2168 bp, Aedes aegypti
ccttaactaatgcagctgaagttggtggttgattccaattttacttaatataaatgatggcttcgttgaaatggtgctgcttattccatgaacaaacgccaccctgtcaacattggatctacattgtgcactgcttatcggcatcgatcgcattgtttgaccgcagaaagtaaaccagacggaagcatagtgtgcttttgggtcgcttcgatgagcatagccagtggtttctgggaagtgtaggtgtgaaaataacaattttgcagtgcagctgaacagcacttggtgttaaagcaaggtggaagaaatgatatgtcaattggcttttctcgcgattggtgctttcgtaacccgtgctgaacctgttccagagcctgatccggcacgagtgctaggaaaatatgtgttttcttatgaaccgtcaggaaaaaattacaatgttcgtaaaccattggacttgagttatttaggtgataacgatgattatgatacagatgcctccacaattcacgacagctatggacattcatcatcaagttcttcgaccagccctggcttcatgacatcatttacttcttctgtgaaacatagaccccctccggctaatgttgacagtgatagtgaagaagatgccgatgaccggggaagttatagtcatggctatgaaaatggtaactcaggctattataaaaagaagtcgatcataccgatcttgcaatcgtacagtatcatacactcggcaaaagaaccaacgtcttctattatcaaaaatactcaccatagcgatgatgaagatgatgacgatgacgattatggtgatcgatacagggcgccaaaaataattcacaccaaagcaaagacgatccccataagccagcacattgaagtggaaaaacccgtgccgataccatatgttacgaaaattcatgtgccaattcccaaaggagtcaaggttcatattccgcatccggtattagtaccggtccctcagccatatcctgttcacgtccctgtatcgcaaccagtggcggttccagtaataaaggagattactattccgattgagaagattgtgccttatccggtggagaaaaaagtcccagtgcccatcgagaagccagtaccgtaccctgtggagaaacacgtcccagtgcacattccacagccatacccagtgaaggttccagtgattaaaaccatcgtccataaactgaaggcgccacgaacagttggcgtggggagtgtcacaatttaaagcgatgaaaatgttcttttttataaattgatttgtgttatggagcttacgagttcaaaacccgatgcaaacaagtaattgaatttatgctattacaagtaatgtgtgtgtgtgtgtgttccgcatgaatgtaaattgtaccgccaaacgtaaattataccgcctgcgtgttgttagcattagacggatcataaagtaacaattgcagttaaatgaatgagactgaatggagatgttattcagtgattgaggagcaattgcgaaatctattaaatcctctgggatttgaaacttaactccagaagaaatatgtttaagccatattgaactatcttaagcagagactgtaccatggaatacaaaatctaacaccaccagcccaatgtgagcaccgtaaaggtaaaggaaccaccgctgaagcttatgccaactgtaacgatacgatcagccataacccgtttgacttaataatttattgcttttcaattatgatcgcaagcagccgacaaacaacaaagggtacggtaggatgaaataaacgcaacatgaacataagcttagcattcggtagtctgctgtagcgttcggttttccttcctcgtgccaagttgatgcaacagtagggctggtcggcggtatgcacgcaaaaatatgaacagcttgttttacttctttgactgcgtgcttttgactgatacgtataagttgctttttttctatatgtctgtacagtagcgaaaaaaaaaacaattcatgtgcactggttagtaaatactctacagacctatttataaattgtgttagtgttaccagttatctacttatagcgtaacaaaagaatatgttgttaggtttgtattgtacacagacgtttttaataaaaaatatagttgaaagaaacttatttcatcga

SEQ ID NO: 1062 - DNA, 4061 bp, Aedes aegypti
attcagtatcgttttggccgtaaccgtgaacggacgcgtttcggactatatgtctttttgattgtcgccgagcaacagccgaagaagctgtcaggaagcggttctagcaattctcattcgcggaaaagtgaagcgcaccgaagagcggaaacattctgtagtggcagggggcaagaagagaagttcagttccgggtttttctggggcgaagattcattcgctatcggtaacgtcgaagagtcggatggactgttccggacagaggaagaagtgattttagcaacgaagcttgaaggatttttgaaaaaagtgatcagttttcttcgtgaagttagaacgattcttccaggaaaaggggattaaccccctgtagctgttattggattagtcaaccatcgaaaattcgaaaaacttctgctggagaaccagagccatttcaccgagtcgcttcactagggagagaaaatgaggaagtgctaccttcttctgctactaccggtagtgtttgggacacgaccgccggctgccgtcttcgaggacgtttttgaactgggacgaccgaatttcgccttcctggccagcccggacagtcagaatggcatgcaagcctatctgaccaaaaggaaccgccagctggcggactactccttggcaacggccgattcccggtacaactatcagacggcagctagcgaacgctaccagcggtacgaggagtcgcagaacgatcgcatccggttggagaatctgcagaagattgccaccgtgcgtaccaagcggctggattcccttgcgatgccccgcagttcgaagaaactagacattgtcccccgggagatgctccggttcactttggccgatgcgatgatcaaggatcacgagggacaactggtgcgggagtcaaaaatggtcaagcgaaggaccaaacgtgaggaaggtcgatcgggtaagcgagttgagccggttccacgggaaattatttggttccatgcgaaggatgctatcacgcaggctccggagacggtcgctgctcaaggtgcgagtgatcatcatagaaagaagcgttcggctgatcccggagttaacaaggaaggtcgggagatggtttcgttcgagttgcaggatgccaagacgcctgagcgagatgccaagctatttgaacagcaagtgaaacaggaaaatccaaacctgaggatgcccttcatgacttcggatacttttaagagaggatctgtctatgacgaggttgttgagcaaccagaaaagagaaaacgagatcctaagaaggacagccgagaagctccgaaaggtggttcagatatgagcattgaagagagcagacgtgttaaaataatgcgaggaaatagaaagaaggttacaaactatgaagatctgccactgggcgttcagaaagctatcgacttggcaataaaagaaaatgaaagaatgagtgtgaagcccattgaagagccaaccaagccaccaaaatattatttcggtgataagaagcctaaggcaaagaaacccttcagctcgacaacggcaaaggcagccttccaaaatcccaaagaaactaagttcgttcctattccacctgtagaaactggctttgttccagtgaaacccgccaagagtgattcgggtgagaacttgaagccggaaaaggcaaatcctgcctcgtggtgggcagtatccaacttgaaccgcccgaaaaggttgcatcagaaggcttcgtatcctcccctagtggttaatcctcaatacgtcaatacatacaaaccaactatggaaacctataagatgaaggagctatcgccaggatacgaacattctcatgaaaacacttacgaatacgaaacttctaaggaagttgtcatccaagataaaccaaagatccagtacgtgatcaaggaagttcccgtacctgttcgcgtcaaggagcctcgtactaagatcactgttaagccatcgatttcgatctcctatgacaaagagccttctggcccatcatcctcgcaagaatccggtcaaccagaatataacaatccctatggaccggttgaactccgctacgaacaaccccaagaagcacaaccctaccaaggccttaagatcgtagttcccgattccaaggaacattcgtctccttcctattacgaaggcaatcacgttgagcagtcccatccttcggaatcatcgcattcgggagaaagctatgaatcaactggaagcagcattgccgcactttccgcccttatcggcaaacgaccaaccgttcaactgaaaggactcaacgaactactgcatatgcccgttccggtgggcaacgcacatcctctgcaaacaatgaaaaccagagtacgacctcaggacagcacggctccgatcatgttccctggggaatcttccactccggcgccaactcttcccaagaagactaccggctaccgcagtgtcaagatcgaaaacggaccaaagattgtgtacgaagatagtcccaatccaagcaccttgtaccacacggtgaagatgaaccctcagctgaaggttccaatgaccaaggactacaccccgatcaaggaggtcgtttcggatatttccgactccgacatcgtaggtccaacaatttccgctcctactcatgccacgtacattatcggatcgacggcagcaactccaactgccgaatccatcagctatgagagcgatgcgaagagccacgaatcagctagctaccaacagattcatacgatccacagcacacctaaaacgatcgtagaaccaattagtgtacagtatgaaccgaaagaagtagaatataagcagcactcgcactatcatcaccaacagcactacgatgattctcataatgctcctgaacatcatcatcacaactacgaagaacacgggcagcttgttcgtgccgaatatcacggataccatgatcaccacgaccaaaacgaacatcacgacgaatacagtgaggatcatgacgacaaggaaggatacgctttcggatatcgagttcgtgacttccacactggaaacgatttcggccacattcaaaaccgtgacaacggagtgacccgcggcgagtaccacatcctgctgccggatggtcgtgttcagaacgtgcgctacaccgccgacgaaaagggcttccacgcagaagtaagctacgaaagtattcctacacctcacgaatcagcacctgcgccttcgatagtggaaccaccttcgtcaccatcgtctagccactcgtaaagtcgaaacccaaccgccatgggaacggtgtaaatagaagcgagagcaattacggcgtaaagatgatcacgatcaagaaacggaatggcgtaaaaggactgcatcacggagagcttgagtattaccatgggcgagcgagcttttgctagtcaccaccagacggactgatctagagaaaagcactcgatcgcagccagttactagaagctttgcggtattaaagagatcctctcttatttttcatttcaaatcgatcaagactgacttacgccgatcagcgctctccgactgtcggactgtacgcattgattaagtattctcattcgaatcatattgttgataaacttatttcgttacacacatcattctccgggttcttcagtttgctgttagaccttaactgttatttaattgtattatttaaattattttaagctcttattctaccctcaatgtctgataaaatgacgcaccaaaatgtcgatgtgatcaagggacttgtgcaatctattttcttaattttacgtttcatttcctagtaagatcgatacgaacgaatactcatttcatcatagggaatcacgttagtggataagcgcaggagaatggatgaatcgaaaagtattaaactgataaacttacactgtaagaattgcaaaatgaaaggagcaccttttagtgtaaatgttatcgttgcataggaactaagcaatttaaaccaaaaaggaaattgtaccttgttcacgggaagaaaaatcgaaaatgttgcaataaaattgttgatgttattactataa

SEQ ID NO: 1063 - DNA, 7630 bp, Aedes aegypti
caaagaagcagcagcagacagaggtttttcgtcgtcagtcgagaaaagcgagttgagtggagtccgtaaaagtcgcaatccccatctttccgagtccgagtggtcgtccaactcctctgaaaagcatcagagttacttttgctccagttgttgggacaatattttatcagtgatcatgattggcgcgaccatattccttttttgcacggaattcggatacattttgatgcagtggaaagtgtgaatttgtggtgatttcggtggagcgaaagtgatgttttcgggtgtgtatccagccccgtttactgtgatggaaaaaatctggttctcttccgacaaataaccagcatccagcagcagaagcgaaaaaagaaggaagtgaatcttgttggttgggaaagttttgtgtctggcatctcccagcctttttctacggaccagcgtctgccggggaggggaaaaacgaagaaaaaagaaaaatcagtggcagggggagattttgcgtactgaaacagcggccaatggtggcccacggattacctctacggaatccggaagtaacgggctcagttctggtttcaagtttgtgtgtttgattcttcgggggattcgaagctgctggaatatgaagaagtaatgctgttcgactaatgtaagaagaagcttcgtttttggggtgcttttggtgtgattacaacgccggaaataagaatccgtaagaaaagtgattgctgtggaataaaatatcgtctttatcttgctactgaattatgagatattggaagaattgattgatagaccgattataccgggtagagtgtattgaaaacgcagggaagtgaagaaggaagtgtctcgaggggaggggagtctggaatgcaggcgactcgtttcgagcgcagaagtttctcccgtttgcttgttgtttgtcagcagttgtgttgcttctgcttctgctattaaaggaaacctaccagtaaggccgccgccatctgccaaaaaatgggagctcagcaggtgaaggagcgttcctccggtggcgggggtggaggggcaggcagtggaccaactagctcatcgctggggcttgccggtagttcgattcgttccagtcggaacaagtctcgggttcccaaggactcgcgcattctaggatcgaacatctttacggaacatagtgaagcattgctacaatctcgtccattaccacacatcccaccacccggcagcatcattcccggcgatgtacttgctcaaagccaagatggctcggaaaaccacaccggaacgcttcattcccagggtagttcaaatacggctcaatccagtttcgagaatgcacatcggtggacatccaaagagaatttgctggctcccggaccggaagaggacgacccacaactttttgttgcactatacgattttaaagcaggtggtgaaaaccaattaagtttacgaaagggagaacaagtccggatattatcctacaacaaatccggagaatggtgtgaagctcactccgactcgggtcacgtagggtgggttccttcaaactacgtcactccgctaaattcactagaaaagcactcctggtatcatgggccgatttcgcgaaatgccgccgaatatttgcttagttccggtattaatggaagttttctggtgcgagaaagcgagagttctccgggacaacgtagtataagtttacggtacgatggacgtgtctaccactataggatatcggaagattccgatggcaaagtgtacgtaactgcagaggctaaatttaatacccttgccgaactggtacatcatcacagcgtacttcacgagggccatggactgataacgccactgctttatccggcaccaaagcagaacaaaccgacagtattccctctgagtcctgaaccggatgaatgggaaatctgccgaacggacatagtgatgaaacataagctaggaggcggtcagtacggagaagtgtatgaggctgtgtggaaacggtacgggaatacggtagcggtaaagacactcaaggaagatacaatggcactaaaggatttcctagaagaggctgctataatgaaggaaatgaaacatccgaacctggtgcaattgattggtgtctgtacaagggaaccaccattctacatcatcaccgaatttatgagccatggcaacttgctggactttcttcgctcggctggccgagaaactttagatgccgtggcgctactgtacatggctactcagatagcatccggtatgagctatctggaaagtcggaactttattcatcgagatctggctgctagaaactgcctcgtaggcgataacaacctcgtgaaggtggctgatttcgggctggcccgattaatgcgagacgacacctatacggctcacgcgggtgccaaatttcctatcaaatggactgctccagaaggcttagcatataacaaatttagcaccaagtcggacgtttgggcattcggtgtgctgctatgggaaatagccacatacggcatgtcgccgtatcccggaatagatttaacggaagtatttcatcgattagaatctggatatcgaatggaaaggccgcccggttgtcctccggaagtttatgaactaatgaggaaatgttggcagtggaatgctcaggaccgaccaaccttcaaaagcattcaccacgacctagagcacatgtttcaggaatcatctatcactgaagcggtagagaaacagctccaaggtgttgcccaacctgtacaactcacaccacagatggcgaagaagcctcagatgggcacgcaacagggacctcaacatgagccagtcatcactccaatatcggacactgggtccaactcaaagctcagcacatttccgaacaaaccggctacaactggggtgcaaatgcggcgcactaccaacaaacgtggcaaaacagcgcctgccccaccgaagcgaacgagtcgtgattcaacataccgggacgaggacagtggaaagactggcgaaggcgaccaaaacacaaacggattttcccgagatctcgccaatttggtcaatcgaacgacggactccgaaaacgagcaaacggaaatcacacctgacaccgatactgatagtcaagagccatgtggaaacttccagaagtcatcgtcgcagcaaagttccttcaaacgcgtcccaatcatgggcaaccggggtttggaaacgcgtagcagtaaacgtttacctcaaggagctcctcggaaagatcaaaacggaccagttagtgggcagccgcctaccggaataacgataaatgccgccggccagccagtagtcggtgctttggaagtccagaatgtgaagaaagctatcaatcggtatggaactttgcccaagggagccagaattggagcttatctagagtctctgcgacagaccgatggttcaactggtcaaccggttccacaacagatgcaaactaattccgtacctccagacccaccaccaccaatggcggcggcaaatgttatatccaatagtttactagctgctcaacgatcagcggtgaagcttcagcaacaacaacctcaaatgatacgtagtaactcttccagtggggtaacaatggccaattcggcaactgctagtctttcaaaactacaacgacacagaactactaccgacggctccatgatgacgttctcatcattccggggtacagtaggtaacaatagtcccaaacggtcaatgccaccaacgcttgccgacttggaattcccaccaccaccagtagatctgcctcctcctccagaagaatttgaagttcataatcttccaggtcctccagtggaaaaggtaatgaaaccttcaaatgatgtttccaataccgaaccaagtgtggaggaagctagttctaggtttggcgtcagtcttcggaaaagagaaccatccactgattcgtgcagttcactaggtagtccagcggatgctattgcccataatagcattgaaccgtccgtacccattccaccacccccaagcttaaaagaaaagcttgaatccaagtttgcagctgaaatcaaagaaaaagcaaatgtgccaaaaacagcaacaaacgtcgacagtaatcataaaactaaacccgatcccgcatcacaattagtcagtgagctagcggaaagcatgaatctacctaaacctcctccgccgttaccaccgaatgacgtggcacagcattataaatcttcagatgtaagttcactgcgaaggacaaaaccagtcgaaagtaataatgttgcagcaccaccgcctcctgcattcaaagcacaactgaaaaagatcgatcccaaacgaatcccgaatcaaattcccaagaaagaggaaactagcaatataatcgactttaaatcgcgtcttcgtaaggttgaaagcagtgctgaatctgccgcagtaagtaatggcacaagtgcgagtgattcaaatgcgacgaccggaagtagcgattctagctcagacaataataacaaacatcattctaacagtgtgaacaataataacagtaacattataaacaacaatcaatcaatcaatgatcactcgagcgataatgaaataaaacctagaaaaagcgaactgcggaatgggacaagcaaaaatgttacaggttcggatgtagcgaacaagttgctacacgaaaacaatgagttaaacagtttgaaacttaagaaagcttccccttctgtggtcacgagcgtggctccaatcgatagtaataaaattatcgagttgaaaaagactgaaattaaaattgaacttagtcaagaggatagaaagcgagagagcttagaaggtaattcgttgaaaacagaaggggctgttactggtggtgataatctttcaaccggcagcggaggtaccgctgatgaaggagacaagcggaagagtactggcagtatcagtagtttgaaaaagctttgggaagcaaaagagtcaccgaatgatcaaagctctcaattgagtccaaaacttggtgttaaaagtgcggccaatatcaagttgaacaacaacctcgaagatgatagcaatgccgtcaacaattccagtacaactgcgatctcaacaacgaacagcaccgctgaagaccatcaccaatcaatgcagcaggtttttactaagaagcccgcagtgccggtgaaaccgtcaaagttctcgtcaatatatgctactcctgtacaaactcaagctccagtcccaacagtaaccaactcaaccaacaacaccactaccacatcgaagtcaaacgatagcaatagttcagtcctctcggaaaaatcgacagcgtcgtcttcttcggccccttcaactgcaagtcgggagggtatcctagagttggttcaacttctcgagggtaatctcaagatgccggtaaattcaatatctgcatcacaatgggtgcagctaagcgaacgtctcaattccctacagtccagttgtgtctcgttcgctgacaacgaaacattaccgccgcataccaagttccacttccgggagttagttacccggatagagaaccagtcgtggtcactgcgttctgccggcagcaagaacttgcaggacaatgagaaactggtgctcgaagttggtcaatcactgaagcaaatttcgaacgcgctgcacagggatactagaacaggcagtcatcagttgccgattatgggcataagctagaagggaaggtgcaatttgcgcgtgcatggcagtgattgaccgaccagagggatagacattcaatcagaatgtttgtgattattatccactgctaatcatgatagtgttgtagcagtgatacaggtatattagttgtctttggctatgtagctacgcaaagcgatattttctattgcaagtgcttcacaatttagaactttgcctatacagaatttaccactttctacttgctattgtaataaaatctcctaactatctatgcatgctacttgtactcgattttacaacggatcttctaaatacctacagatttaaatatgctaatcatgcgcctgaaatgtgtcacattagatttgaaatgtgacttcatgtgaggtgccatattgtttgatattgaatcctcgtaaaagccatttggacgaattaaactaaaaaatagggtaaaaccaaatttacatcgattcatcgattcaccaatgtcgcaatttaaaactgaaactaacatttaaagaccagtgagcacaagctgtagaatggtggaatctaggaatgtgaaatgccatggaccattgccgtcgtgttgaatatgaagtgaaaaattattcacaatcatgtataaaccagcaattaacgctcaattatattgccaaatataaagtgaactaattttaaatgattttaactgacacgtctgatagtttttaaccaattgtaaacattgaaagtattgatgaagcaaaacatgaaagaattaggactgagattttattaaggatgaatttttaaatgcaatcttttcaattgtttcaattttaatcggagtgcgtggttttagatccctatctaaaatcagctttttattagaagcatgattaaatatgctttattttaagccaaagagcttaagacttgtgttttattttaaaaactaacctttttgtgaaacacctggtttgcaatgattgacatacaattttttagttttggtgtttccgtgtatacatatgttagcgttttccaattgaacgaataaaacatgcaaaatatacaacaccgttgcatcgatgcaacaatccaatcgtgcgtaatataagttatttaaaaatatctctaaagggtaacagtaaaatgctagtcgtaaacatttatacacattatcgataatagtgttatcacgatccatacacgagtaacggaaaaaagtaatattcacgggatgcgtgatagaatgaaagcaaccgttttgactgatgttgtcgtatagtaacgaaagaatgtaagtaaaatgaacattttccattgaccagtcttaataatgaggagccaaaacactctcataaagactatgagttcaaacatcatcgtctctctaggaatttcaaaataatcaaagaaaggaaaaatcaaatcgaggcgtatgaaaagtttaatggatatattttttgataaactgatatggtaataacattcatcttcatagtacattttcgtgacattcattcgcgctcatacagaaatcgaacaaaaagatattattaaataaaaatgtgaatcaaaatgaagttggaagtaacgaataacgtgaccgaacaggcaaaaacgcatgataataagcgaacattattactcaaataaaaaaatgaatataagtgtattagtgactttatcaaaagtatgtgaacatattatcaaactagtaacgaaacataaaacccaagtgaaaaagcgtgatatgataaaacaaaaaatatatacaccttctcttagaagaaaagagaaaaacaaaaaaaaaacacatacaacactaaaataccgaagcatgctagaacacgaatgcaagttcgataacttgcagtataaaaaaatcaacaataaaatatcgctgtaaggcaataataataacaca

SEQ ID NO: 1064 - DNA, 1146 bp, Aedes aegypti
cagtaacccacttgaaatgaattagatgaaaaacaataatgagttattatttacaaaacgatttctaagaggattatattaggctaccgccttatcagtcgatatcgtgttcaccgaacacgtgtttactcttgagtccaatagcaccatcaattataggaactataaaacgcttggcatcaaatcgaacgtgctctcagttcttatcgttacatccaaagttctgtaccgggtaatgcaattggttcttgtttcgctattggtcaccgcctttttcggcgcagttgcaccatcacctgccaggagaatcgtcggaggccaatttgcacagaatgagaaacagtttccctaccaggtggcccttttcgagacggatgagttcaagtgcggaggatcgattatcgccgaaaaatggatcttgacggctgcccattgcatcgtgcagtatgatggaagtcctacatcaactgatgttttaaaggttcatgtcggttcacctcacctaaagaaaggagggaaaaaggtgaaaccttcacggataattcctcacgctgactaccccaagatcaattacgacatcggattgattgagctagaagaggccctcgtttatgataaaaccatccaaaaaattgagctctatcggggggaattaccagtaaatgtcacagttacaatctccggccatggaaaaaccggaagtaatgagccgatctccgagatgctcaagtacaacacattgaccgtgatggacgagacagaatgttttaatcagataattgcatccgggtggaagaaaatcatgtgtctgaagaagcctgcggataataacggtatttgcacgggagattccggaggacctgccgtgttcaatggaaagcaagttggagtggccaactttgtgctgggaaagtgtggatcgatccgtaccgatggatatgcctttgtgccattcttcgtaccctggattgaggaaactatgaaacagcagtgagagatagtgatttctaaagcctggagtggaaattatcaataacaatggagtggaaaatatcaaaaaaatcaagcaatcctgaaacgctaaattcactgaacatgtctagagtagggtggttcaaaatacaaaaaaaagtttaaaaatcccac

SEQ ID NO: 1065 - DNA, 1257 bp, Aedes aegypti
gacagacgaaaacatcaaaagcacgagttgttgcggaatttcgcaagttctcggagtgaaattgaattttatttaattttaaccatcaaacaaacaataattgttacctaaaagtttctgtgctctccgttctccgttggtaccatggaatcaccagtgaaaatcaagcaagaaccgggtctcaaatcgaaacgcggaagcgcctccggaattcctccaacagcagcagcatctgcagcctctgttccgatcccaaccactgccacgataaaaaccgagcgcctcacgtccttcagagttccccgggatctcaccttgggaggcttggctaacggccgaaatgtgaaaccggccgccaataagaaagtctacacgcccaacttgaatgcggtgcggaacaaagacacgaacgttaaaacagcgtccaccggtccgaagcagcgagtcaaatcagaacgcaaagacaaggacaaagccggcggccggaacaagagctcactcatccaaacggcgggcatattttccgagggtctggcgcagcgcgttttggcgcaacggtccaagtatgacaaatataacagttcctcgaaggaaccgggagaatcaatccggcggccggtgtaccgaacagaaatcaaagttgacccggaggaagagcggaaacggatttccgacctcttcggggacgcagaagaggacgaactgccacaggaagatgccaaaaagtatgaaagcgatgtgaccatgccggtcaagttggagaacttggactacaaattcaccgcactaaagcccgaggtcaaagacgagaaaccgaaacccgaagcgggagagttgctcgagtctttcaaagtaaccgacaatcagaacaatctcttcctgttgcaacttccggacgcgctgcccggtaaaaccgacactgaagtgcggaaaacggattccaatggtgccggggaggaggaaaccaaaccagaaccccagcgttgcacagtgcgagagctagaagaaggctacataggcaaggtgatgcgatatcgctcgggtaaagtaaaactagtgctcggcaatacggtgttcgatctgtccatgggaatggacagtggattcctgcaggaactggtatcgatcaccaccaattcggaggaacggagcggaaatatcataaatcttgcgacgatcaaatccaaactgaacgcctcgcctgattgggaatatttgtttaaaaagtgatataattgggtaataaattgttaagca

SEQ ID NO: 1066 - DNA, 2249 bp, Aedes aegypti
atgagatcattctcagttcttgtggtggcagcagccttggcggttgcatccgctgccttcgttcccaataccagccaggttaaatacgccgacaaggagtggcttcacaaacaggaagatctgctgttgctgttccgccatctgtaccagaaggattggaatccacagttggtggcctatgctaagaattttctggtagagaagagcttccacttgtatgacaatgaggatgctgccagggagttctggacgtactacaaccatggaatgctgccgaagggtgaagtgttctccgtatttaatgaagtgcatcgtgagcaggcagttgccttgttccacctgttctattacgccaaggattgggatactttctacaaaacggccgcatgggctcgttactacatgaacgaaggtatgtttgtgtacgcgttgacggttgccgtgactcatcgacaggatttcgctggatttatccttcctgcgccatatgaaatttatccttattacttcatcaatacggaagtgattcaaaaagcccaacagtacaaaatgcagggttattatggaatgaagaaagttggtgaagtgtatactgctgtcgttaccagtaattataccggttggtacatgcacacaaatcccgaacagaaaatttcctacttcactgaagatatcggcctcaacacctactactattatttccacattgactaccccttctggatgggtggtaaggaattcggcttgtacaaggatcgtcgaggtgagctgtacctctatgaacatcagcaaattttggctcgctactatctggaacgtttatctaacgatctcggacacatccctaaattctcctggtactggccagtgaaaaccggatactatccggatctgcagtactacaatggacatactttcccgaatcgtgataacttctactttgtgaaccaggaatccaactactatgacattcagttggtggacgattacgaacaccgcattcgggaagtgatagatcgtggtttcttggtgaaatccgacggtaaaatgatcaactttactactccggaagccatcgactacctcggaaatctgattcagagtaacccggatagctacgacactcgttacttcaagtacctgagcatgttttcgcgcatcattatgggagctgccgtggaaccagttgaggcctatcaggtgatcccaagtgtcctggagcatttcgagtcagccctgcgggatccagtattctaccagatttacaaacgtatcatccaatactactaccagttcaagaatcacctccctgcctatacttacgaagaactgtacttcccaggagttaagatcgatgatgtagtcattgataagcttgtgacgtacttcgaccggttcgacgtagacatcaccaacgccattgacattgaacccgaaccttacgttgagggcaaatatgacggattcggtgagatcgagtataagcctgatccggttgtgatcaaggcccgcactatccgattgaatcataagcctttcacctataaaattagtgtcacatccgaaaagcctgtcaagaccgtcgtccgagttttcattggacccaagtacgatgaattcggggcgcagtataaactcaacgaaaaccgtgaaaactactacgagctggactacttcgtgttcgacctggttcctggaaagaatgtaattactcgcaattcgctgagtttcaacggatacgtgaaggatcgcacgtcgttctacgagttgtacaagaaggttatgctgggatacaagggtgatgaaaagttcccactggatatgtccgaggcgcactgtggtttcccgaatagattgatgctcccgaagggaaagaagggcggtatgccgttccagttcttctttatgctctcgccacactacgcaccagaagtcccgcagtacaccggatttgatccggtcgtgtcctgtggtgtcggatccggtgcacgatacttcgacaagctgccgtttggctatccatttgatcgcaagattgatgagacctacttccacgtgccgaacatgttcttcgaggatgttgtgattttccacaagaaagaaggtgatgtcaataccgtggtttaagtttccctcgatcgatcctgtttagacattgagtctacgaaattagattccccacatcgagttgaggaatccagattcgttcgcgctataatgtgatattgtttgtaataaaaagatgagcg

SEQ ID NO: 1067 - DNA, 1092 bp, Aedes aegypti
atgtactttgaacctttcccagcgtccaccaacgactcgtttagtctggccagcagcaaacctaagccgaaattcaacgaaatcgaaagcgccatgatcaattccgtgctggaggaaaccatcttcaagctaatcatcgtcaatatggaagaagaccagggaagcaatcccatagtgaagaaaccaccgatgcacgtgcgattcgatccgtcctacaagagcaggatggtcaacgaaaatcaagcagttgatgtagctatgggaatgatgatactggtgaagttgaagaatgatatttctaacttgaggaaactgttgtccgacacgcacgttgaaatggctgagtacggctccttcgaaaccctgcagacgttcatggacaacgacattcagagcgagaaggaggaacaccaactcattcgagacagcattttgaacgagaagaagctgaaagccttacaatcgcagctggacggtgaaacgagagaaagaaaatccatgctcaagcagctgaacgacgaaatattcgatttggaaacaagagctcaggacaccatggtggaaaacgatgtaaagaccaggcttgttcagaaatgggagaacactcgacacgagcaagctagaatagtcattgaagggaaggaaaatacactgatcaaaacttccaaagaagcaagagacaacatcgacagagaactgcgacttcgaagtgaaattgatgtttacatcaactactgcatcgaccaaataaatgataaaatctccttttggatggacaaataccaaagggagatcaaggcctttgatggggatattacccgtcacaaggagaacattgccgagctaaaggtaaagtacgaggaaatggtcattctttacaaacatcgcgaaaaggaaataaagatatgcgcggagtcgcgcaaggagcgggagaagcagaaagcgttcgctaacaaacagcaccggtcggcaatcgtcatacaagcctggtggcgtggcaccatggtgcgtaagggtctgggaccattcaagaagaagaagaaatcgaaaccacccaaatcatcgaaaaagggtgggaagaaaggaaaatag

SEQ ID NO: 1068 - DNA, 1767 bp, Aedes aegypti
atggtccaaaaacccatcgttcttcgacgtttgtctgcccatttgcaaaaattcattgtaaatttatttgaaacgacatcagcgcacggtttacggcacttggtccactacggagtgcacaccatcgaaagactcgtgtggatcagctgcatttcgattggtatttttggggtggtagcgcttgcccagcgcatttggaaccgctaccaaacttcgccggttgtcatctcaatggatcgaaacatgtacttctggaacacgagcttccccagcctaacggtttgctcgcaccgccgaatcgacgaacgtaaggttgaacagtacattgaagaccacccggacaagttttcaggtgatggagatcccgaagatttcaaagagtttatcattaaactggccaatgcgtcttacgacacatttctggatctaccgatgcacaacagttacggaatacccagttccgattacctggacctcatatacaatctttcatggccattccaaccgctcattagcaccggtactactctccatttggaacttcagcccaccattactgagctaggactgtgtttgtcggtcaactccaaggtagccgaatacagctcctatcactattggaagaactacagatgggacatcattccaagtaaaccgaccgtggtagtacaccctctggacggggaggtttacgggcaactaattaaactagaaaattcctatgaggtgtatttccacggttacatggaagttcctgaagtgtccaagcgaagatactcattcctggaggcattctacaccactgtggagcttctcgctttggagatcaagacgtcaccgcaagcaattgaattgtcagtttcgcaaagaaagtgtcgtttcactcacgaagctgaggttctgcagtttagtcctgtttacagctacaatctgtgtcggatggagtgtcgtatgagactagcggtgaagtattgcggctgtgttccgtacttctatcgacatgttggcaaaggaaacttcaggtttccaatatgcagctttgaaggatatcgttgcttaggggaaaattcagcgttaattactctgagatccaaaatccaacccatcgattgtaactgcgttcccaattgtgatgattctaacttctttgtccaggcttaccgatcgcgtgaatggtttctgggtgcaaacctccagtggggccttacggattatccgaagatgcagctgaatcgggacatcattttcggattgtctgatgttttagtctacattggcggtctcggaggattcttcctgggttgcagcttgttaacgttcaccgagttcgtgtacttcttcatctggcgattgttcaaacgccaggactaatagcggcgattggttttggccttcaaagctgccagctgttccttgcagagcgcacgcctaccttcgttggtctgcagaagcttccgaagtcgcacgattcgagctgcattgtgattcttcttgatgactatttcctgttcacgtttctccagtaaacgtttcagatcgtcccgttggcgttccttttctccaagttcgtactctcgagtgcaacttgccggtaagattaaaaccgaagttgtcggctcaggactcgcatagtttggacgatctgttacgagcgatacatgtaattattgaaatgttgtgtaaatcaaaggtttgttttacctattttacgtttagccaaacgagagaacatatccttgtgttcttcgacagcctgtcgaatcttgg

SEQ ID NO: 1069 - DNA, 1495 bp, Aedes aegypti
agtcattacacttgataaattatgatacaaggcatttataaaaatgttgttaaatgaaattttgatcttggcgtagatgtgcgtgggaagtgttaaaggagtatggatgtactttatagtttaatgttctagcaaaaacggtgcagagattgtgtataatgatcgcatttgtgttaaattcgtgaatgaatttttgggtcgctcgagcactccaagttcaattctatgctcgaaggaaggtcattcagaaattttaagcgcatgtcgtcatttaaccttgaacctttacacattgaaattcgtgctggaatttacaaaacaatagaagcaaacgacgtatagacaactgtaatagtaatcaacccacgcgaattggaacattgaccaggaaggcacgtattttcggtcaggaacctttgttccgataagtgttaagtttgataaaagtttttcaacttctataaagcaatcaacgaggacgaaactttagttcatttttataacggtattcatccagtgtcaaacaaaggtggaaagttccaatcagaaaaatgcagttcagtgtcacagtgatatgcagcatatctctgctaacgttggtgtgtgaagctgctgtaatctacaagaatgagtgcgactgcaagcggaaaataatgaaagcttcgacgctgccaccaccggactttcacagctttaaacagtgcgaagaaacgaaacccaccgatttgcatcccataaaagacatgtgctcgtgtatagacgtggcccatgtccgcccgggttgcagtcagatagacgacattcccaagtttgcaccatcaacgtcgtgcgagtgcggctatgacgattgtaagcctccaccaaaaaaataccctgcagatgtcatcagtcaacatctggcggtcgttgcagcccgtaagaaaaccatatccgagacagacttgcatttccacgcaccacccatcaaggtacctccgtgtcccaaagaggttcttactgttcccgaagagcttctctacaaactgaaccgtcaaccaatcgagctgaaacctccgaagaagaagtacatccccagagtagatttgtccgaagaggaacagcagccgtgtcttccggagaagcagtactattctgacatctgttatggcaaaatagaggcgcccaacccggcactcgaagaggtcaaacaggaggagattccttgccaaatgtgtacggataactacacggaagaggaaacgacagattgcccatgtgagttagaaacggaggaagactgcgagtccgacgaggaaatgcccgatgaggctctagaagacgaagaagaagatgtagattccaacaaagcgtctgaagaaattgatttggaggaggagagtggcgaagaagaggcctacaggaaacgatcgatacggccttcctcgtttggacggtcaagctctaagataaaaaactaaatagttaagtaataaagatgttttgtttgtttacgttt

SEQ ID NO: 1070 - DNA, 2454 bp, Aedes aegypti
agaaacggcgaaattttcctctgccttttcacagggaaagcagtcaatccgaaaaatgccgatctcgacatttctgcaatcgatcagttttgccttacgttgaaaaaggatccatcgctgataacagtggccccttcactgttggccggccgaattcaatcgggaaacagcaaggaagcactgctggcacttgatgccctagaggaatgtatggagacgtgtgggaaggagttccggtcagagatcaacaagtttcgctttttgaatgagctgatcaaactggtgtcgaagaagttcgatggcgataagactcccaaggaggtttcggaaaagatactgaatgttcttttgacttggaccaacaaatacgaaaattgtgggaaaattcaggaagcctacaatttattaaaaacccaaggaattgaacaccatcctcagcaaaatgttgtagtgaagagcacacctaagaacgaatcacgaagcagcttggacgaaaaggagtttgcaaaacttcggcagctgatcaacagcagtaagcaggaagacagagataaagctaatctgcttatacagaatttctatcgggacgacgaacgacgaacccatatgaaaaacagacgattcgccgagctgcaaaaggtagcagagaacacgaaacttctggacgagatgcttgcgcagtatcgacccggagaaacatcggacgatgagctggcaattattcgggagattttcgaatcatgcgaagggatgcatcccacgattattcgcctggcggaagaaacgcagcatagtgaaggaatgttaggtaattactgtttcgataagtgtaagcttacagctttgtttaaaatatttgcagagaaaatattcgaggtcaatgataatctaacccaagtcctggacaaatatcggcatctgatattaaaggcaccggcttctgaacccaaaccaactagtttggcagctacttcatctgcatcccatttcaaaacctccgattcggttgcatactcaccgaacatttccgaaccggatccacttgatagtctattcgatatttctaccattccctcaagtagcgaaccagcacgcaatgcaatggatgatctcagcgaaattttctccgcttctattagcactgatggtgcgaattcgaaagtgaattcttctacctcgtcggcatcagttgtcaatactgataccatactgacccctgtcgtgatgagcaatgggtctaacgcccagtttgattttctgggaccagccgttacaaacggtttcaacaagtatagtggcatgcaagtttcgggacagaccagctcaaatggccattcgaatgtcaatatcaaatcggtaccctcaaatattgagacaaaccagaagccttccagttctaacaccaacagtaccaagctggaaaccacgagtgggattaaaacgctacctgatctagactttttggtcagtggaatgaaatcaactcttctctcgcaatctagtgtaaaatcgtcatcagaagaagttttacagcccaatgaaatcccttcaagtgatgacgatgataaagtattaaatccagtcacacctatcgtagaagttcctgttccgattccaacagcgcctgcagaacctgtgccactggatgctcccaaatctaaaccagaattcaaatcactagccgaaatagttattgacctagacaatattcaacccagtcgggagccctcccggacggtacttaacgaaaaggatggccttcagataaccctcaactttgccagcgatcacccgagaccggacgtaaccgtgatagtgatttccacaatcaatcaaggccgagaagaaattcccagttttcacttcgatgccagtgttcggaagccttgcaaactgcgactgctgcctgcatccagtacaagcctacccggtacgaaaccgttccgaccaccggctgatggtatcacacaggtccttctgctggcgaatccctccgcgcaacccgtagacctgacctgtattctcacgtactgcgttggagacgatccggatccaatcaaggactcgatagtgatgaaagatgttcctttcgtaagggaatagtgatcgatttgtgctatgcatgtctcgtttgatcataaaataagcggaaaaaatggtagactgtgattacgaggtatgatgtttcataattttctttaaacactttctataaaacaatcgggccctcctttagtagttgcacgaatatcttggcgagaccagggctcatatcctgatgcaaatagaaagaatttgagtttttgtaccaaaatgtccgaggtatcatatttatgcattgcttaaacgcgagctgttagtagctggtcgattattttaactagtattgtaaaaaataaatccttaccctatcttaaaatttgaccaaaaaatatcaaatgtatcgcattactg

SEQ ID NO: 1071 - DNA, 1604 bp, Aedes aegypti
tccggatagcggaagttcagattgaagaggacgacggtttaccccaatcggtgtgcagtacgtgtttcacggacctaggaaagctggaacggattatgcaaaagtgtagagaatccgaccagcacttccgggcaaatgtcgaaagcttgaaagaggacttggtggaatccgttgaaatggtggaaataattgaagacgattcggcttacgtggagtatgtcagcgaagatgacacttctcagccggtagaaatagtcggtaccccatcctgtgtggacgacctgatcatcgtggacccgatggcgcaagtggccgagagccaggaagccaattacacccaatgctgtggatgcgtgcagagttttacgacccacgaggaactgctgaggcactcgcagctttaccacaaatcggaacgcggcatctgtggcccagtgccggacaacttgatagagtgccgggtgtgctacaaaatgttctccgggattctctatctggattccatgcatcggttgaatgccttcaaagaccgcctgagttcggttggcttccctgaagagatgcagtgctgctcgtgcgaaactatgtgcttcagtagtgaggaaatggttctccattcacaagagcatgccggggaccggacggaacacgacccggccaagccgttcgaatgtgaaatctgcttcaagcggtacaacaagaaacagaccttgaacttccaccagaagttcggttacagttacaagaagcaaatgaccaccagaagccgaggctgtcgcgccatcaggaagcgtaccgaaatcgaaagctccggggacagccggaaatgctgcggatgttcggcggagttcacttctgccgactcgttgaaacagcactcccagatgcaccatgagttgtatcgtcgtcaatccgatccaagcaatgctccattcgaatgcgaagtatgtttcaaacgattccccactcaaattaagctggagcagcatcggttggttccctacaccctgatgcacaagtgtcccgaatgtgataaatccttccgctccaaatcggtcctcaccaagcacctggcgagtcacgagctaccaaaaatcgttccctcacgatctcccacaatctcagaacctgctcagtgcgaagaatgcggccaattgcttccaaacgcctacagacttcgcgcccacatgaaatcgtcccactcctcggagaaacccttcagctgcagtttatgttcccgtcgcttcaagtggaagcacagccttcagaaccacctgcgggtgcacaccaaggagcagccctacgcatgtactcactgcccgaggaccttcgcgcagctggcggacaaaagcagacacgagctgacacacagccagaactatccattgcggtgttccatctgtgggaaaggattccccgccgggaggaggaaactgctggagaagcatcaccaactgcatcagcgaggcgaggagtatccgtacacgtgccagttttgcgaccgaacctttacccggctgccgcagcgaaatcggcaccaggcgaggcacgttgccgagcggaacagaaacatggcaatggtggtgcatgtcgatgcggtttag

SEQ ID NO: 1072 - DNA, 1079 bp, Aedes aegypti
cagcaaacccaacaacacccgcagcagcaacatcaacagcagcaacaacagcaacaacaacaacaacagcagcagcatactcacgtaccgcccccgcagcaatcgccacatcttagctctggtagctgtgggcccctgcagaacagtgtcaaccatcagagcccaatgggcaaccacgcgtacaacagtcacaatcacaacggaagtaacgaaccgctgcttagtttgcagaccgctccccagattcagacaacacccacaacgataccagaaattgtgtttaccgatttctcaactcgagatgactttgaagccgatctgggcctgggccagatggactttcagagctttcagatgctttccgacactggtgccatgatcgatccgatggacgaagacagctttcggcgcgagcttcagtgagacgacctgcaaggggacggtgaggacgactatcgcaccgatgagatgacaaggttacaagctttcgttacgttgctttaagtttgacgattatttcgtttcggaacaatcaataaaacggaggacggaaatcctacgcggtttagcggtaggaagctttctttctgaaagaagaaggtattatttctctaagagattggttcatttctatgcgaatcaagcttttagaactttgcaaacgaaagtgaatcgaaagtgcagtactagaaaccggctagagaattttataaggttttaacctataaggaggaaacgctatttgagatacaatgaacttaacgtgtaagtttaacaatagtgatagtggcaggcaaaaggtgaatagagtatagggcaagatattgtacgcgagagcagagagcgcatgggcaattgtacgaatttaggatagtgtcttgtgtatgagagagtggaatttttgatagatttcatgatgaaaaagcacaaatcaagaccgtataaagtataccccagtagatttggagcgaaattttttgttctgtgtgtggatcgataggaattccttactaatatcatggtatgatattgcatgagtttataagtttagtcgaataaacatgaccatttttttattt

SEQ ID NO: 1073 - DNA, 3495 bp, Aedes aegypti
cttccaactggagtcgcgataaaaatgttttattaccgttacgacctaattaaaactcactcctgatgaaccggttcccgcaagccgatcgttttcagttcagtgcattcactgccgcagccagttcagtctgtaccggttcgtgaatcggttctcatctgcgcttttgtgttaacgtatttttcgctccatcgaatgaaagtagagaagattacgaacgcgctctaatttgaaggcagaaagtataattttccaagctgctggtttattttattttgtgaattgtggtgcagtttaccaaatacttgttctggaacgtcggatggttgaaatatctggacaaaaacggaagtaaataggtgtgaatgaattcgactcccaccggtgtccaaacaatggatgcttctgccgttgaaatggatcctctggaggaaattgagcaaaatgtgatccagcaagcacacgaaataacaacgatttccgtccggaggattcgggagctgtggacggaaatattcgacgagcacatctgccaagaccacatgagccgtttgccggaacacattcagacctttttcgacgaagtgtacgaggaaagcgagggtcgaaagaggaaaatcgtcgatgcaattgaagctttgcggcgcgaagcttgcgacctgaaaaggctcctgcaggaagatccgggcgacttggaaccggtgccgggaacgccgctgcacatgatccagatcgggttggaccggagcttggagtttatgcgggagaagctgaaggtacggcacgaccagatcgacgagtacctgttcgagcaggagacactttgtgaagagctgggagagatcccgagacagctgaagaaggatcccctaccgtcggaagcagatatctgtgaattccgttcttacctggataacctccgagcggagaaactgcagcgattcgatgacattgcggcaatgcgacgtgagatcaaactgatgatgagccaactggagattgttccgcaatcggatcgccaagaggagttgataaacgctcggaatttccctccaacccggtacaaccttacagatctgcgtcatttgcatgaaatgatcagatcacaatcggaagacttgaaagagaatatagaccggattcgcgacaagttgcaaaatctatggacatatctcgctataagtccatcggtcgtgaagcgattccagaagtactacgactactcgcagaccacttacgataagctattcgccgagctggaccggtgcgaaacccttcggcgtgagaatatccaagcctttgtggatcgtacgcgggttgaaatcgtgcaatggtgggataaatgccttaaatccgatgaagagcgctcgagattctctactttcaaaagcgatgtctataacgaagatttgctaacgctacatgaaatggaactgaacgatttgaaggaattctatcggaacaacgaaatcattttccaacttgtggaacaacgtaaggaaatgtgggaaaagatgatgtcgcttgagcagaagtctaacgatccctccagatacaataaccgcggcggcaaactgttagaggaagaaaaagagcgcaaacggatcaacgttcaactgccgaaaatcgaaaataaactcctggaagcctgcaaacgatatgagaacgaaaacaaacgtaaattcaccgtttttggcgaatgcatcgaagaagtgatccgcgaacagtggaagaaacgcgaagaaggcaaactgcattccagtgctcgaaaaaaggccaacatggcaactccaacagccgtcaatcggacagcgctgacacgaactcccaaaacggcggaagccttggtcagacacaccagcattagcagccgaacgcggaatgcggccggtccaaacgctgatgcgtccgtgaaaaattccgccagcaagttgctgtccgcttcgaaactatccgcaattggaatcaagaggaaacttccatcgcctaaaaccggggccgtcaagcggtcgctgctgaaggatttaaacagccctaggacgttcctcaagcccgggttgccggtgtcggccggtaaaaaccgattgatggtgccgaaatcgcccggcaaaatcccaagcatcaaagtgtacgacaccaaaagtgggcccatagcagcacagaaaaggcgatcccgacgaaaatctcggaacagatcacgtcgtagtgttaacaaggcccgtccagacatcgtaatcacatcaagtacaaataccacacttcaatcggaatccgtatcgtacgagcattttgagaactttttcgagaccaacactccaaatcgatcatcgctcatgcccggtcggggggaagcggtgacggcagaaacccgtgccaacacgcgtcgtcagtatcgcaatcacggaatttcacagctcaacgccactggaaatccgctcagcacaccgtccaagataacgttccggaatccgacggcttcgtccacgatgctggccactacgttacgatccccggcagcaagcaatactaccgccagcggcaaaaagatgatgtctactgctaagaattgtccgatcattttctaagctcgataagatgattgcaaatcatccgatcgatctgtggcaccctcatccgttcaacgagcgtttcgaagggttggcaatatgttacatgttacgttgttctaaagatttttgcccatctcactcggaaccataagtaggtagtagccggtaaggtatttaacacagtcctttttttcgtaccgctttcgatttacgtccttatttttgtatcataaacatatttttagttatttgattacaagagaaaaacaattatttttagttaatttttaacacgcttgtgatttgaataattttacggcaaacaagaatcgatttatcgaataatacacacacgcaggcattacgctctctgaaatctaaaaataaatttgcttgaaaggtttagaataaagcggatcggatcgtagatcctgttctctgtacaaagttcaaaaaacaatataagacccgttttctgattattaataaatttatattttaatacaacgacatcgacacggtgctaagagataatctttttgtaatagatgacctaacatccctgcactaaacaagaaaaagtgggtatctttaatacttaagctatttcaaatctcatcaaaaaaaaatgaaacaccttttaaaacatattattgaggtctgggaaatattataagaataataattcgtccttggtggaacagaaatccttgaaagagtttgctaaaaatatatgatgttaattttggagggtccgttgagtgctggcgaactccttcattcaactaccaaagtaatgtctgtcgaaattcctggagaaagccttaaatgaatgcctttatgcatttttggagaattttattgagaaaccattggagaaatttctggaaaatcctttaacccacttatgatcaaatttttattt

SEQ ID NO: 1074 - DNA, 240 bp, Aedes aegypti
atgtcaagaagtgccccgaaagatccgtgtaagatctccgcttgtaggattcaaacgtgtcttaaagagcacaaatttgatgagaccaggtgctatgacgtcctcgaagacatgcgccagtgttgtctaaagtggcacaaagtatcactctgctgttccggaatcaaactggatcgcaattacagactagagaaggaagctgcagaacgcgagaaattggagaaacagcacaagccatga

SEQ ID NO: 1075 - DNA, 1787 bp, Aedes aegypti
tatgaaaaaaaagttcatcaaaattgagtacaggactcgattcctgaggtcattctgcacttttaaaccaataaaaaaaatgttctggagaacgcatttctgggaaatgctatagattcaccagtaatcacacagttcacgcttttctttccaatagtcctaatccattgaaactgtctcatttcagatgcttgaatcgataaatcagacgaaaatgtcgtttaggaagcacctcatcattagcattgtcattcgcatcttcctggtgtattatggcgaggtgcaggatagtctctccgagattcagtacaccgatgtagactatcgggtggtaaccgatggagctagtcatgttctcaatttgaactcgcccttcaaaaggcacacataccgttacacgccacttttggcctatctggtgctaccgaatctcgtactgcatcacagcttcggaaaattcgttttctctctgttcgacattttcataggagtgctgatcaaatggatcttgttgaactgctatcgaggcaataagatatccatcgaaaagaagctactcaaattggagaccctgaacaatcgcaataaatatcttatcaagaggaaaaatgaaattctgaacagtaacaatgaagcgctgccaccgaagtacatccgaatggcggaaatcagcgcctatttttggctttacaatccgcttacaatgatcattgctactagaggtaatggagactgcgtttcatgttcactcgtgctagtctcactatatttcctcttgaaaaatgagcaaaccattgtgcagtttttcacagcaggcatatttctcggtttatcaattcattttcgactctaccctattggattttgcctggcattttatctagccacacttgataagcaactggtaacgatcaaggatcacatacaagcaatactaatgccgaatgccaaacaattagccctagttggaggaacgatcacatctattgcagtatcaacaggagttttctactatctctacggttatcagtacctctacgaagccatcctattccatctggtcagaaaagacacccgtcacaacttctcgctgtacttctaccaacaatatctgagttccaatttcgacatctctctactggaaaaactactgactttcctaccgcagctggtgctcatcataatccttaccctacgctatgggaaacatcgtcaaacactgggctttgccctgttcgctatcgcatttgtgatggtggcctacaatcccgtcgtcacatcgcagtactttgtgtggttcctgtcgttgttgccgctcagcgtgaagaacttcaaaaacatcggcatacggaaggcggttttcattccggtgatgtggttcatatcgcaaggcggttggctactaccagcatatctgctggaattcagaggctggaacacgttcgagttcatatggatccagagtatcgtctttttcttttccaacatattgatcctgcagatgctgatgacgaactacgacatggcttacaactataagattgattaggatacggtatgcgtgtaaatataatttaatattcctcgagtaaaaatttcaaaattacattttatggcgcttttttatatgagaaatataacaatttcaaggtttcatgaattgcaactttactgacataacatggtaatagttaagggggccgaaattccaaacaaattcaacaatttcaaacactacctcagcaacaaaacctgtctatagggagcagaaccacttggacacttcc

SEQ ID NO: 1076 - DNA, 810 bp, Aedes aegypti
atggtgttcttcacgtgcaatcattgcggggagtcgctcaagaagcaagccgtcgaaaaacacggctggaagtgcaagcgcgaactcaacgtctcctgcatggactgccaaaaggacttccatggcaaggagtatgatgcccacaccagctgcatcaccgaggcggaaaaatattccggtaaggactatgttccgaaagcgaacgccaacaagggggccaaaaagcaggaagcttggctggacacgatccgctcgattacggacagtaagcgaaatttgtccaaggggatcagtgaagtgtttaacgtgatccgcaaaaacgacaacatcccacggaagcagaaaggattcctgaactttttcgccaactcggccaaacacatccggaggaatgacgttgaagccgcatgggcattgttggaggaagagaaacgtaaactggaagaggaaaaggacgagcaagttgaagtacctgcaaaaaagagtaagaaaaaggacaagcaacaaaagcagaatggtacaaccgagcaagagcacgaacagcttgtagcaccggaggtggaagaaaacggaaccaacgattcctcgaccggcggggacaagttcaaatggggtgacgtgattcgatcaacgctggtgtccaagaacaacgaaatgaagctggacaagctgaagaagaaggttctgaagaagtaccgtcaacttatgggaggcgaggaagtcagtgataagattgagcgcaaatttagtaagaaacttactaagctgggcgttgaggtggataacgatacggtgcggttaattgcgtag

SEQ ID NO: 1077 - DNA, 993 bp, Aedes aegypti
gattcggtttcggttattttcggtggtactcaggtggtactcgagtgtttgtggtacctactaacagttaggggattggctatagccagctagtgaatcgaagataataagtgcaatttggagaatctatcaatcaaaatgaacagtgcattcatcatatggcagctattgctagtcatttcgtttgtgatagccagcccggaaatagcaacgcagaccaatggcttcaacggctacaactatccaaaaccatcgattccattcaaccctggttatgtttattctacaccaagttgtccactgaatctacccagcacacactacgtcactgtcccagttacggaaaccagcatagttctgacgacactgccaccattgacagttacccttccccggcaaaccgaatattacaccaaaaccgaacttcaaatcagcaccgcaatcaattatctcacctcaacgacgactgaattccgaatccaaccgacaacagtcactgcatacataacttccacttattgtgcaccgaaaacatatctaccacctccacccccacaaaacacctacctcccaacaatcaccacacctccccctccaccccctacaccatcgaacacgtatcttccagcggatccacctcaacgatatttcaacgctgagaatacgactccaaactcttttctgcagagttttaactttgctcaggctggccccatcaagcggatggccaacgacattgacgacagttcggtagattccgaagacgaagtcaaccttctgggaggaaatgttgagcagtttcaagaaaatgccgctagttccccaaatcagcagcagcaacaacagctccccgccatcaatatcatctacttcgatcgtagtgaacccacccctaataatgatcgtaatgcgacggccgccggaccaccaactgacctcatgaattggctgctttgccgattcaatctcgccaataagacttgtgtcaactga

SEQ ID NO: 1078 - DNA, 589 bp, Aedes aegypti
gcgacaatctagcgttgagtgtagaaaaaaatcaccgtcggattgccgtcgaaggaaaacagtcgagttaaactgaaattatatttacaaaacagcaattcacatcaaaaaatgacaactgcgatcgacccagaactgcgcaccaaaatcgatgccgcttgccggatggaggaggaattcaccaaactgtacaacgaaaaagtagccaagaagcggcatcagatgacccagctctacatggacaacggtttgctggtgtggaacggaaatggtgccaacgggaaggacaacatccagaagtacttccaggaactgccccgcatcgaatacattatgaacaccctgactataattgaatcatcgcagggctggtagcggatctggttttctattttaattcgagtctttaaaaaaccagaattctagttatgtttctactaatcattcaaccgaattctccagttgttactctgtcaagctagagcctcaggagttcagttggattgctgtcgaataaaagttcaaactacagcagcacggatactgatgtgaatctgaagatataatggaaatgttaacaagtaattat

SEQ ID NO: 1079 - DNA, 4830 bp, Aedes aegypti
atgtttcccgaagggacattgcacaagaaatacaagatctccttatcgttgaaccgcgtcgacgagcccagccatggtcggagtagcagccttaaccggataacccgaagtctattaaccagtccacaacaaccaacgcaaccggaagatgactgcagcagtagccttagtagtaggatcagtagtgatatcgacagctgtctacggttacggccaaacttgctggactgctcctgcagccagacgatggacagtgtcaacgagaaccacaacgacatgctacccagctgccccccatggcccaggagtagtcaccccaaccctagtgctaatagctgtacccgcaaatttggccggcggagacaacggcgaccggatacagtcaaaaaggtccgagtgagaaactcaacctcccaacggaccttcaacaccccaaccaggcgatctaccacctccctagcgttagtcctatttaccaccctcctagtactactacacccgacccgggtagccacggtccttctggaccccaatggggatggcacgggaccggccggagcaccggttcaggtcttcggcggcgatgggttcggcagtctgaacctggagaagagcatcgcggccgtgtttagccgagtcgcgtacggctcaacgaccacgaccaagcgtagcataccggacaacgtgtacgtgcccagtctgacgaccgtttcgacgcccctgctgacgacgtttagtgccaaccatcggaactacgagctggatctggagcgggaccatgtgctgcccacgtccgctccgaatgccgagatcctcaagagcaacagcaatccgacctatccgaacccgaaccgacaccacgggcatgaccggcatcggcactccaactcgacgccgtatccgcatggccacaacaagaaaggcttccccaccaaccccatgggggacatcccgtcctactcgccgccgtcgcgaaccttcttcacgccaccactgcctcgcaactacacgaacccattcgccgacaaaccgaccctgcggggaacgaacagcgacagcaccatcatcagcaccggcagctacgtcaatcggcgaccgctgcctccgcccagtctgatgcccggtcacgaacggatccccattcggccggatctgaatggttcggtgaatccgcagaaaccggccataccgcaggaccccatggtcgggttgaacgtcggtggtgggcctccgtccagttcgtcgcaatcgatcgacgcccagcggaagaaggccctcaacacaccgtcggagaagagcaacaagctggactcggccaaaggctacggagtggacagcaagtttatgctcgacgggaacgccaactccagtgcgatcctacccaatgggatgcactttccgtctatctcgaggatactgagcggttccaacggcaggacacagaccattccggatgtgctgctgcgatcggtaacgtcggccccaaggccgaatcagccgaccttcgatctgaatccaccggtaacttcgcttagcaattcgaaaagtttgaacaagggaaacgataggaacgatggggtcgatgacgagggggattttgatggagggggcgatagcgctagggatcaggacgatgaggatgacgaggaagatgaggacgatgtagtggcggagaaggaggggagcgcgtattcgacgcaagcgcagagcgtccaaaccagtacggtgagttcgttggtccatttgtcgtcctcgtcgtccccgatcacgcagaagatgcccaatctgaatctgaaatcggtgatgatcaaagccaatacaagcggtgaggaaggtcaattagggaacgggtacgggaacgataggaactttgctagcgatatagaggattacagcacgtggacgatcgcgtggaacattcatgtgtacttgtcggcgattctgttcacgatactggccgtgtattcgatatttaagattatattctacgataagctgacgcacctcttctcgcagtcctactttatcagtattcatttgatcttgatcataatctgcctgttgcgcatattttacctatgctatgacgcttacaacctacacttaagttttaatctgttcacttcggagctgttgctgaacttgccgctgacgttcctgacgacgacgtttgcgatcttgatcctctttctgctgctacgatcgataaaccacaaaacgaacaggtacagctcaattctgcggccgctgacgatcatgatcggttcgggggtacacgtgggactgtgcataacgctacatttggtggagtcgtatgaaacgcagcagttttatcacaagcaagcccagctattggctactgctcgcggaggaaagatcggtcatggtccgggtcctaccaatatccagatcccaccgagagtgctgtcgctgatctgtcagatcatctacatatttatctgtttgtcgctgggcattctttatctgtacatgtatcggttgttgaagcggatattgcacaagagccagaactacatccatgggtataacaatttgtcgtacgccattcatattacgatcgcgacggcgctgctgttcattttgctggcggcgttgcagatctacggtgccattagtattagctcgcagaccaaggtgaagctttcgccaaataacaaactgaacgacaattcggccaagaagactttctgggcttcgcacatggatatcgactggttccagtggggctaccagtttagtttgaggttcattgagatcgtgatcattgcgctgctctcgtgggtgacggggctcaagacgggaacttcgaaggttatccagagggagaaggacatggagcaaccgaatgctagcgggtttgccctgtttccgtgtacgtcatcgtccagccaggagaactttgagactgactatccggcggtttgcaacgctaatacgaacctacatacgtatacgttgcgaactggaaagccgatttacgacgataactttgcgttgaattcgttgaacctggagcagaatagcaaccaggatcttcagttgggaccgggtggtggtgacttccaacgatcgatcgagacgaatagcatgcgatcgagttcccacaactacagtaacaattacaacggaagtcagcaagccgagcagcatgatgacttcatgaacgattccgaacagatgccagatcactacgagaatccgaactttgagctgaagcatcatcatcggggggaacctcgggatgggccgcagtatcatgacatcatggataattgctactcggaaccgatcaacgctccgccatacgatacgaagagcttgagaggtgctgcgggtggacctccggttcacattcagcagggaccacgaaattacgacttccagaacttcgaacgaccgtcgttcgatcaagcggcgtcctctcagtcgatttctcgtggagagttcagggcctcgaagaatctgaaaacgctgaagagcggtcaagctaactacgatgcgaacacggtaggtcatcaccattacaaccacttcaacaactacaacgattcgttcgagaggaggatcggtgtgcggaagagcggaacgctgaacaacatcggcggaatgcacttcaatcagcatgtcggtggaagtgggcggaataataacaactcgacctcgtcggcatcgtcttcggcttcgtccaacaatcgtggtgcaatacaacagcaacagcaggtgcaaggtcgacctccccgggggattggcccagaacgacatctcaacggtgctcaaacgttaagttctgctggacgaggcgttccggatcatcatcatcaccatcatcatcacccgcaggcagctccgaggaatctccctggaggagaactcgttcacccgggtagcttcaacgatcggctggtgaacggtggcggctttgttacgggcgcagaactctcgtcccaggataacattaacaatttcgatgataacagcagttcggccagctactaccatagtaagaaacgttcacgggaatcgtccagctcgagctatacgggcttcaacaacaatggcagtgatcatggtccaccgaatcaggacccgggcagttcgtcaccgacggtgtccggatcgaatgtcccgatcaacggattgggtggaagtagctcgggtggttcctcgagtggagttttgcctggtaagatgggacctgcagcggttgcggcggcaacgtcgtcttccggagcaggtggcgaaggcggtgatagctcgacgatgctcgtcgccgagcaaggtttcgtgcggttccgggcgttggaagaccccacgctcggctcgcgaaccaacattagggataagaacaagctatttatgaattcttagagtttaaccagtcggcagcagcagcagtggcagcaacaagtgtaataaagtggcagcgatttttgcattttcacccataggttcttttttcgacttatagaaatctaggatttacaaaggcgcagaagaggtgtgatcgcatgaaatacccattcgccagttcacggcttttcccctcgccccatccattagcgaaccgaatgaaaatgaagaacaaaaatgttatatctcgttgtaaatagttagcgcgaaaatgaaatggaaacaattcaagtcaagtgatcgatttattacacactaaagtaaattaaaactgagagaaagctacgattctttagtcacgtaaggacctcccccgggaggaagttgtgtataaagttaggagcagcaaaatttaagcatattctttcgatcaaataaagagaaaatcgtcgtcggcct

SEQ ID NO: 1080 - DNA, 3414 bp, Aedes aegypti
atggagcagcgtacgcttgtctatttccccaaaccccactacggctgcaaggttgccaacaagacggagttcctggactcggccaaactgacggaggaggagttccaggagaaccctatcatcaactgggacgcgatcctctgggtgaaccgctcgaccgagctttgggccgtgcagctggttctggcgctcatttcgctcaccgagtcgctgctgattgcctacctcggatataagggcaatatatggcagcaaattttatcatttcattttatattggaacttgttacaacgataccatttacaattacgattttatggcctccattcaggaacctgttcataccggtgtttctcaactgctggctagctaaacgttccttggaaaatatgtttaatgatcttcatcgagcgatgcagaaatctcaatcagctctctcccagcagctgacaatcctgtcggcgaccttgctgtgcctagtattcaccagcgtatgtgggatccagcacttccagcgggcgggtcatcggcatctgaatctgttccagagcacctactacgtggtggtgaccttctcgaccgtgggctacggagactttgtgccggacatttggccctcgcagctctacatggttatcatgatctgcgtggcgctgatcgttctcccgacgcagttcgaacagcttgccttcacgtggatggagcgacagaagctgggtgggagctattcgtcccacagggcccaaagcgagaagcacgtggtcgtctgctccacgacgctgcacgccgacaccatcatggacttcctgaacgagttctacgcccatcccctgctgcaggactactacgtggtgctgctcagcccgatggaactcgacacgacaatgcggatgatactgcaggtgcccatctgggcccagcgagtcatttacattcagggatcctgtctgaaggatggcgacctggcgagggcccggatggcagaggcggaagcgtgcttcatcctagcggcacgcaactacgcagacaagacggccgccgacgagcacacgatactgcgttcctgggcggtcaaggactttgcccccaatgtgccacagtatgtgcagatcttccgaccggagaacaaactgcacgtcaagttcgccgagcatgtcgtttgcgaagacgagtttaaatacgccttattagcaaacaactgcacctgccctggggcgagtacgctggtgacactcctgttgcatacgtcgaggggacaggaaggccagcagtcggcggaagagtggcaccgactgtacgggaagtgttccggaaatgaaatttaccatatcgtgctcggcgacagccggttcttcggcgagtacgaagggaagagcttcacctacgctagttttcattcgcataggaaatacggcgttgccttagttggtgttagacctgccgagttacctgagttctacgaggacacgatactgctgaatcccggtccccgacatatcatgaagaaggatgacacctgctactacatgagcatcaccaaggaggaaaattctgccttcgtggtcaaccagaaccaaacccaaagccccgaccagcctccgaaagagggagatccactcaaccgtgaagggcgcgtttatcaccccacaactatgctgctttcggtctgtgttagctgtacatatatgcgatgcaggagatgctgtggagcttttttaatcatcatttttatttgtaatttgtcctgtatcaaaaatctcttgtttatgattttattaatcgtgccctcggtttgcgtacgtgtgcctcacagtccgagcttgaactcggtcaactcggacagccccgggtcgccacctcgctacactagcaatccccccatcgtgctcgacagtgacgtcttgacactggccgtgcccacctacaccgagactgcaacgcccaattcgggttccaacaccaacgccatcacggtgtcggactcgaagacgaacctcaaggaggcctcgacgccggccacggccaatacccagtcgacgcagctgggaccgccggccatcacgacggccaaccacctggagatccccagcaacaacaaccccaacctgctcagcccggacatcctcaaccagaggcgagggagtcggaggccttcgattctgccggtgccggacatgttcacgtcgtcctcgttcagcatatcgggcgaagacggcatcgacggcgaggatggcgaaagcgacgacgaactggacgatgacgttccgatcgtcaaaggtttccctcccgtttcaccgttcattggagtcagtccaactctttgcttcctattgaaagaaaagaaacccctctgttgcttacaacttgctcaagtttgcgaacactgtagctatcgtaacgccaaagaataccagtggcagaacaagaccatcatcttggccgctgattacgcctccaacggtatctacaactttatcatcccactgcgggcacacttccgctcgaaaacgtctctcaatccgatcatactgctgctggaacggcgaccggacattgccttcttggatgccatttcgtactttccattggtctactggatgcttggttcgatcgactgcttggacgatttgctgcgagctggcatcacgttggccgagaatgtggtggtggtgaacaaagaactgtccaactcggccgaagaagacacgctggcggactgtaatacgatcgttgccgtgcaaaccatgttcaaattcttcccaagcattcgtagcattaccgaactgtcacagagttccaacatgaggttcatgcaattccgtgctcacgataagtacgccctacacctgagcaaaatggaaaagcgtgagaaagagcgtggttcgcacatttcgtacatgttccgattgccgttcgccgccggaaacgtcttcagtgcttcgatgttggacaccctgttgtatcaggccttcgttaaggactacgttatcaccttcgtgcgactgttgctcggcatcgaccaagcgccgggaagtggattcctgacctcgatgaaaataaccaaagatgacatgtggatccgaacctatgggcgactgtatcagaagctctgctccacgacatgtgagatcccgatcggaatttatcgcacgcaagagaccagcggcgcagaagcttcacattacgaagaggaagtggtgaccacgacggcgaccgccagcagcacttcggcctccggcgtaccgatcaagggcgtcgcggaagcgaacctacgtggcgtcacctaccggccgccaccgacatcaatgcgcaagtcgtcgtcctgtctcgggggatgtacagcccgccggggatcgagcaccagtggctcgaaatccgaacgacaggaaatgttcctcaatttgcatatgtaa

SEQ ID NO: 1081 - DNA, 655 bp, Aedes aegypti
aacggtagtcactttcctcctcctgataatgtaattttcttttgaattagttgcatttatgtgataaattccgattactaccttcgtgaaagttctaaacaagatctcaccttcaccgaaagaaaagatgtccctgtaccacgcgaatgccggccaggcggaaatcatccgcacaatccagaaggaccaaacctacatcgacgaaatccggtcccagctgagcgacatcctgctgctcgtgagtcaacggaactggttccggtacaaccacctgtgcaagctgatcgccgaggtcctgtaccatcagtacgcgatcgtgcacaacctgcagaccctgggcgaggagtacacggggatcatccaggtcgacgcgaactacgtgatgctgccgaacaaagcgttgcaaatattcgccatcctgttggagtacggtggggagcacgtggtcgatcggatcctaactcggctccagaccgaaatcgatcgcagtgaggagatgctgccggaggcgaaggagcgctttgttaggttgctagacgggttgaagttcatcgttccttacgtgaggggtttccacacgagtgcattctatatttgtgggggaaggtatcacatctccaagcggctgacggggattaactatgtgagtatctga

SEQ ID NO: 1082 - DNA, 1055 bp, Aedes aegypti
gaaagagggatgtgagcaattaacaggcttagaggatatgattgacataggagaagtgaaaattgaaactcgtccagatgatgacgatgcactcaaagctttcaataacagtacagaagcagaaagtagtaaaccgactcaaggaaaagaaagtgctagtgaagtaatgccagtccagtgtaatatatgtaataagattttaaaatctagcaaaaaatggtggcaccacaataggcgggtacacggaccaaaaaaatttgaatgtcccatatgcggtaggccatgtatagatgtgcatcaactcaaaacacatattccaacgcatcaaccaattcacgagcgcaggcaagcaaaaccaataacagcgaaaaagaatgttgaacgaccattcaaatgtgatatatgtgataaaagcttcgtgcgaagatgtaacgtaacgcatcacaaaaagcagtcacatggaccaaaaccgcattgctgtgatatatgcgatgcaaaattcagtatgcgagcctttttgaggagacatttgttgacacacaaacctgatcctgcattactggaatgtaaaatttgtaatttaacttttccaagtgttcgtaagaggtctacgcatatgactatacatcgaccaaagcagcataagtgccctttttgcactaaaacatgtacattgcgcataaacttgtacagacatatgaagactcatgatgaatatcatgacaccgcttcaccaacatccagcgttacagagcttgatactgatggagcttcagaaccttccactttggagaatgagcaaagcaatcattcaactggagttgttcagctaaaaggatctcgcagcagtacccgtggaccaaagaaacggcaagaaacggataaaccaacaaagagccgtaggacacatcgtaaaccgcattcatgttcagtgtgtagcagcaaattcagttcgaaaaagaaattgaaggaacatgtcttggcagagcatcaagaaacattaaatgatgtaactatatcgtagattcgttagtagtcgtttattcaacatgctg

SEQ ID NO: 1083 - DNA, 538 bp, Aedes aegypti
ggaaaagaagcgggtttctactcattacaggcactgcaaagtgatacatcagcgagcttgaagaatgatatcgaaacggagtctgaacacaattcagaaaagacttcaccaaaagatcaaaatatcactacgtctacttcgctacagtgcgcgaaatgcttcaaggtttggccaaaccagaatcgtctttggctgcactataaatctgctcataaagaaaagctaaagtgctctttgtgtagcgaaacgtttaaatttcaaaaacggttggatagacatatggaattacagcataagcaagaggacggtagctttcaacctctaaaatgtgcacaatgtaataagcactttcaaacttcggtgcaatacgcgaagcatacgcggattcatggccctaagaatcataattgcacaatgtgtagtctatcgtttagaactacggttttactgaaagcacatcagcgcactcacaaatttgatggcatgataatcgattgtgaaatatgtaataaagtttttacaaatcacaaacaaaaag

SEQ ID NO: 1084 - DNA, 2358 bp, Aedes aegypti
ctggttgatacagtaaaagttgaattgaaccccggttctgaagacggtttggagcatgaaatggatattgagcaatctgttggggcagaagatatgattgacttaggagaagtgaagattgaaactcatattgaagagggtgcagaaacatcccaatgttcagcaacaataccagaatattctaagaaaaaacaatccaccgatgaaacatatgaaactaaaacacatttgagacagcacattgaagtaaagcatgagcttccaaacgtatttaaatgccaacaatgtgaagtgagctttagatttgagtgagttgcttctacgaaatgttggaaggtgaatgctgttatgttgtatcaactattttttattgtagaatcgaactgagaaaccacgagcgttcccaacaacatctcaacaaactgaagagccacatgaaatgccatgccgctaagacctacgcgtgttccttctgtgaaaagtcatttattaacgaaaaaaatctagcgatgcatgttgcatcccacgaaggagagcgcgaaaaacgtaaagctgtaccgtcattcaaatgtgatatttgtcagaagatgttcttatataaatgggcagtggcgtggcacaaacgaaaagagcatgaaccagagactcatgattgcaacgtttgcggctctcgtttctcaacgagtgaatatttgggcgagcacataaagattcacgaggaatcatctcgtatcaaaacgaatgagaaacagcagtcgctacaggaagaggtaaaagtgaaaattgaacctcttgaagaagccactgagccacaaccgcaaagagagggtgaagacgaaatgatgaaaaatgagcaatcattaggcatcgaagacatgattgatattgaagacgtgaaaattgaatctcgtgaagacgattatatggaattagatacattcacttcaaatcaagtatctcaaccaatcaacaagagtatgagtgattttaaacaaatagaatccgcaacagacagggctgatgtgaaccaaaaaaagaaccatgcaaaggataaacacatgccaacgtctgtgggacaagcaaagacagtaacagataacaaagaaaacccgacatcactcgagtgcaaaatatgccatagaacgttcaagtggaattatagattgagataccacgaaaaagaagcacatggtccgagaatttacgattgcgatatatgtgacgccagctttcacggttcacgcaatcatttagctcagcatttggacaaacataagaaagaaaaagaagcgggtttctgctcgttacaggcaatgcaaagagatactgcagcacgtttgaaagaagatactgaaatgaaagtgtctgaactcaactcagaaaggactataacaacagatcaaaatatgacgacaacatcgctgcaatgcgcaaaatgcttcaaggtttggcctaaccagaatcgcctttggcgtcactacaaaactgctcataggctttgtgagacgatgaactctaagaagaaaactcttcagtgttctctgtgtagcgcaatgtttcattttcaaacacaattgaataaacatatgaattcactccataagcaagaggacggtagcttccaaccactaaaatgtgtagaatgtaataaacaatttgaaacctcaaaaaaatacagaagacatatgctgaatcatgctcctaaaaagtataaatgcacaaattgcagtctatcatttagaacaacggttttactggaattacatcagcgcgtccacaaatttgatggcatagtaaacaccactgatgtgccagtccagtgcaaaacttgcggtaagattttagagtctagcatgaaattgtggcaccacaatagaaaggtgcacaggccaaaaaaaatcgaatgcccaatttgtggaagaccatgttttgatagttatgtcctcaaaagacacattcaaacacatcaaccgattcatgaacgcaagaaacccagatcagaaagggcgaacgataatgtcgaaagatcgtttaggtgtgacatatgtgataaaagcttcgcacggagatatttattgaaccaacacaataaaaaatcacatggtccaaaaatctactgctgtgatatgtgcgaaggaaaatttacttcgcgatcagttttgaccagacatttgtcgactcacaaacgtgacactgcattactggaagtaaaacttgcaagttaaccttttaaaatcttcataataaggctgtgcacatgattgtacatcggccagagtaacataagtgtgttttttgcattaaaacgggataaacttatacagacatatgaagactcatgatgaattgtatgatacg

SEQ ID NO: 1085 - DNA, 1281 bp, Aedes aegypti
tttatcgtgtttcctcaagcaaaattcgggctgcggtgaggaaagaaaaaaatcctccattgatagtgagagtgagagcgcgttggaaaccgtcaagtgttggtggcgagtgaaaaaaacgcgaagaaaattcgaaatcgcgtgaagattttgtggtgttgaaaaatttctatctaaaaggtggtgcatttcggaatccgtgacggaacaatcgtgtccgctgactacccgtgtcgtgcagtgtgtgaggaaacgcaggagtttgggttacccgggggaaatccggaaggacaacgaagaacacaagacttatttgctgatcaagagtattatcatttacacacaccccgaaacaaggaccccgaaaagtttttgcttccgagcggattgtccgctcttgcaagcggaagggcgacggaatcgtgtaaacatcagtcggacagcacatcggaagctcgaaaatggacaagaggaaactatccacggccggggatacgttataccaaactctaggtttgccaaaaaccgccacagcagacgacatcaagaaaacgtacaggaaacttgccctcaaataccaccccgataagaaccccaacaatccagatgcagcggaaaagttcaaagaggtaaaccgggcacattccatcctcagcgatcttaccaaacggaacatctacgacaactacggttccctggggctgtacattgccgaacaattcggcgaagagaatgtcaacgcatacttcatggtcacgtccccgacgtgcaaggcaatcttcctgatttgcggcattctgaccggttgctactgttgctgctgttgttgttgctgctgtaacttctgctgtggcaagtacaagccaccgcacccggcggaccagtccggagattaccaccatctgcacagggacggtggtgccagtagtagtgccaacgcaggcgaacgaccaatagttactgaacagcccacgcgaaacacggaaacggtttaagtttgagagaccatcagtatttgagcgaaaagaaagataatgacgatggacggaagaaaaccaagccttatttttgctaaccaaagtagagtgggaagacactgaaatagatgccataaactaattacgtaatcttgttttgaaaaatgatagcgtaacaccgaaagggcacttagttgtcgtttattttagtctcttattgcgtactttaaagttttttttttgttcttgaatatgtgaagaggtctcaagctgttcgaaaacggatcaataaatttgttaatcg

SEQ ID NO: 1086 - DNA, 1236 bp, Aedes aegypti
atgaaggaggatctagcagatttggatgaaaacggtggtggtggtggtccggtgacgtcccagccaacggctggccaagcgcagggagcaggaatgccagtgtttgcgatgccaccgccgtcttcgaacccgaccaatccgttcacgggagcagcggccaccgaaagcacaggcctcaacagtggcaatcaaccggtctacacgccaggtatgaagtaagtgttatcgccattgtttgaagtatatctttaccgttagtgaaacaaagaaataccacaaaagcaaacaaacaataacctaacgctactggataacttaaatgagatatgtgtttgtgccacgtgaccaacacagtcactcgcatctatgaaagaaattgaaagaatcataaccccgattagaagctatgagattgtgtttaaacacaactcacgcacacacataagttacgcgtgtgtaacagtaaggagaatcagtcagatatctagacgccggtacattacaaatcaaaatcaaccatattgaatattttaaatatagagcagcaaacgaagtactttcatgcaacggtcgaatcaataattgaactatctctcacgttacaccaataccgagcactcacacgatcactttcactctcacatggaaatcagcagcaaacacagagaagatgtatcgtaatcgcagatttagggaataacgtttttcctcattacactataacgaaaaacaaaaaatatattacgtgttactactatttcgatttgtaaaggaatcatattacacgcaaagcaaaactctacaataatggagaaacaagtctttaaatttccaaagtatgtctgttatattttttcctgcaattgtgtggtattcttcctttttcgtcgtacataagaaacgaagagaaaattacaaaaaataatattatattaattatagtgagtcacaaattcttctatttaatgtgtaccgtaaaggcaaaaagaaaaaaaaaatcgaaaatgttgatagtcagagcaggaactgggtttaacaataaagagacggagaaagagtacacacaaaaatacattgaaacacacaaaatccagaagcaaatagaatggacagaaggctacattattcaattgtattcataatctagacgaaacaaacgaaaaagaaaaggaagtgaaacaaatacctacgataataaatttttcaatgcgccagttatactcaacctgaaagtct

SEQ ID NO: 1087 - DNA, 1634 bp, Aedes aegypti
ggagcatagatcggagaacttccaccagtgaaaccggttttattcgttaatcgtttagtgtttgttccttattggttgtgtcgtcgttatcagactccagtagaagtgagtgataaaacaatggccagtgcaactgctgccctcccagatgtgctgaagaatcttttcagccacatcgatgccaacaagagcaaatacatctccgctctggctgaggcggtcgctatcaaatcggtatctgcttggcccgattcgcgaccagaaattttccgcatggttaactgggtggcggaccgtctgaaggcgttgggctccactgtggaactggccgacgttggtaagcagaccttccccgatggacgggtgctggatctgcctaatgtgattctgggaacgctgggcaacgatcccgccaaaaagaccgtcgtcctgtatgggcacttggatgttcaaccggccattctggaggacggttgggacacggaaccgttcgtgctgaccgagaaggatggcaagctgttcggtcgtggtgccagcgatgataagggaccggttctgggatggatccacgccatcgaagcgtaccaagctattggagaacctctgccagtgaatttgaagttcgttttcgaaggtatggaggaatccggcagcgagggactggacgagctgttgttcaagcgccagaatgactttttgtctggcgtggatttcgtgtgcatctcggataactattggttgggtacgaccaagccttgcatcacttacgggctgagaggtatttgctacttcgatgtggaggttggatgctctggaaaggacttgcacagtggagtgttcggtggcacggtttatgaggccatgaacgatttggtctatttgctgggaacacttgccgataaggagggaaagattctgattccgaatctgtataaggaggtggctcctctgctcccgaacgaacaggagatgtacgatgcgatcgatttcgacgtttcggaataccgtgatcagttgggagcacgtcgcctaatgcacaatgaagataagaccaaaatcctgatgcatcgctggcgccagccaagtctctcaattcatggcgttgagggagcattctacgaacccggccagaagacagtcattccgaagaaggtaattggcaaattctccatccgtatcgttccggatcagaccccggatctggtggagaaatacgtcacagagtacctgaccaccaagtgggccgaacgtggctcgccaaacaagtttgccgtccgcatggctcacggtggcaaaccatggaccgaagacccgaatcatcctcactaccaggcggccagtgttgccaccaagtatgtgtacgacgtccacccggatatgacccgtgagggcggttcaattcccgttacgttgactctgcagcagactaccggaaagaatgtcctgttgctaccgatgggtgcttcggacgacggtgctcactcgcagaacgagaagatcgatatccgcaactatatcgagggaaccaagttgctgggagcttacctgttcgaagtggccaagatcaagtgagggaatcatcagagaaagttattaattggtggtcatcacaataaacatcacagttaacaagt

SEQ ID NO: 1088 - DNA, 2739 bp, Aedes aegypti
agggcggatcgaattcaaaccgggtgcggggataatgcggcgctgctaacgatgagcccgagaaacattgtgcacgtcgtggaagagaacatccgcggcaaagtcagctggaggaatctgcccctagaactgcggaaggccctgcatgacaatgagaagcgctacgaaaagttcattctcgagtacagcctcaagaaccaacttcgctatcgcggcaatttagtgcacaccacattcggcaatgagaagttatactacgaaaagctgatcgaggagaacatcaaggccctgcatctgtttccgtatcacctggccgacatagtggccaaagggctccggttgacgcccttcaactactacatagatatgctggtgttcttgttgaacaacgacaagaactacgattcgttgccaaacttcacggcggccgactgtctgcgggtggtcggaattgggcgcaacgagtacctaacgatttcgagtgatttgaagacgagttcaccgaagctgttcttcaagcgtaatccgtactatctgctgcccaagttcccgaggcggatcgtgatcgagccctggtggaaggtggaagtcggttacgtgctggagagtgatgtgcagtttttgaaccaggacgagttgtcagtgctcgatcgattgatcgattatggtgctcagacggctggggcgttggactacgaagtggttcacagtttgtatcgcaagggattgatctatctcgatgtgccaatcagcggagaggacaagattagcatacctccgctgcagaactttgtgatgaatcgagtcagtggcgattactttgagaacttgctgtacaatgtgttcgtcacggctgatgagcagtctacaatagctgacttatcaaacattctgcaagtcccactggacacggtcaaacaagctacatcgctattttgccgcctcaattttgcccgtcgcaaacaatccagcttcacaaacaacgtggaaccgcacgaaagctggagaaatgccaggcgtgaccaacagcagcagcaaactggccgcacgatcttcaactatcattccctgctcctcagccaagaatccgtggaaagtgaacaaagcgagcgtccagctgatctcactattggttcgctcgacagcccaagtcctgccgaagaaagtcccggcgactacagtaacctctcggatgccaaacccgaggagttccgttcgccggacgccaaacgagtcgggttcgtcttcgattccaccctcacggctttcctcatgatgggaaacttgtcgcctgggttaaaaactcacgccgtcactctcttcgaagtgggcaaactttgtgacgaaggaatgaacgactttctgcgcgaattggagaaagtctccattctggatgccgatggcgaaggcgaggtcagccgctacttccatcacgccataattctacgctcgacgattgtcgcactgaaaaccgtcctcaacacagagttggatctcctccgtctggaaagccttgaagccctcgatcagaagacccgaaaccgtctcctagagaagaagtacaaatttcttatcgctgccgcccctctctcaggggtcctctcctcaccgttcaccattccgttctttggccaattctaccggacgtccaccaattcacacatttggtccaagctgttctactaccacatgggcggctatggaccgccgagcctgctcctcaccaagggaaccgtcctgacccatctgccgcgattgtttctcggctacggaaaacttctcatcacaattgtccacacggaatcgttcgtgctgaattcggaaaagtttgcttcgctaaacgaacacctcaagaacgggtgcgtgcttatacagggctacggaatcaagcagccggccgagatgcactacgaagtgttcccattcgaagctggaaatcgtggttcggagtggttccgacactcagcggtgcggaaactggccaaggtgctggatttggagaatagcttcggctatatgacgttcatccggacaggagtgccggattatggctgcgacaattacgacgagaacgttcatctattcaaagaccatcccaaaagcagcaaggaacgaaagcattccgatacatcaaaaccagactgtccgaagcctaaggcgacccgctcggatacaatcagttcgatcacatccattgaaagtgacgacgccagtctgatcgaggacattcgccggatacgggacatctacgaagggaaggtagttccggagccggatcttcccgaagatgacgaaccagctgtccaggcgacacccgtcgtggattcccagcatttcaacccagaaccagcgcccagtccagatcacgatttgatgcaacagctggccgatgccagccggaatgttgattcggattcggattcgagggatcgattgggaggaaaccgaaaggaggagtggaccctactggatgtccatttcggcattccactgttcgacgtagactgcaataccagcatatgtcagcatgttattaaaaagctttgctcggaggacaagatcgcaaccatccgggaggtcaattctaaaatggagcattcctacctgaagtttatatcgcaatgtttgtactacgaggacgagagtatggaattggtcaaaccgggtaaactggttcccaagccgcgcataaatctggcgttcgaaaacggtaaaatcatcacctggaacggaaaatag

SEQ ID NO: 1089 - DNA, 1777 bp, Aedes aegypti
atcgttactccgaccgcgatcatcgcactcttccttatcaatacacgacaatgtattatttcaagccccttctattgtgtctagcacgttctcgttcggcagtaaaccaatcccttagtattatttcacatattttttccacgtattattactaataatcatcagattcaagaaattttcatatcaatgaatcacacgatattaatcatcggccaacatgtaccccaccaaactcgccatcccgaagatcgagatcaacttcgacaccccgaaccgggagcgcttccttcgggacgaattctcccagcgcaacagcgccagctatacggttctcggtcgcggtagctacggcgtggtcatcaaggcggcctacaagggccaacacgtggcggtgaagattgtggaaaagcatcggaagtaccgctgccggtacgattcgctgcggaatgaggcaaacgtgctcaacctgaagcacgagaacattgtgcgggtgttgaagatcatctccggggcgcggtacggattggtgattatggagcgcttcgatgggtactgtttgcagagtgtgctgaatcggggctatgaagttaccgtctatcatcgtttgttgattctgtgcgacataattaacggactctgcttctgccatcgtcatcatattgtacatttggatgtaaaacctcagaacgtgattatttgtgtgctgatcccggatttcccagccaacaatagatgttcatcgattagaaattacacctgcaaattatgcgactttggatcgtcggtagttttgaataaacctagcgtggttgaatcgaagaataatcgtggcacgatacgatacatggctccagagttgcttcgaggactggatgggataaccgagatggccgatatctactcgtttggtgtgacgatgtggcaactgagcgaagggaaagacccttatgaatcaatcgcatccaacgaagccgttgcctacaatgtggtcaagaagaagatccgccccgatagcgttacaacagcggaaatattgcgctcggaaccggtgtctattccagcggcgaaaaatctcaacaatcaagtacgtggtcgcaaaaatagcgacaactcgatggagtcttcccaaacttacctgaagggtaatggcaactcgcacatcagcttccacagcagcattctgatttcttcgaatgcatccgaccatcagcgtcccagtatcgactgttcaacagacgccatgcgtgacgagcttcagcaacagggcatcgacctccttgaggaggtggcttctaccgcggagcacgatgaggatgagttggacgatgcaccgagtatggcgtcactgagtgccctcttcgtgcaggctgttgaattgcatgccgtcaatcagaacttcatccgacaggagtataggaatttgtaccggaaatgctggcagcatgaggccgtgcgtcgcccaacagctgccgatgttcgtgccacgttgcacggtatggttgagcggattgtctgttgtaaatagttaccattgtatgttccgtttgtattggcgttgagtgttaccttttatcacttgttcagctccatggcagctaccgagctgttgatagcatgcgagctcatgtttgttgtgttgtcctctgtatgtatgttcacaaagttttcctagattaggaattttatattagaaagttttttatcgatattattttaaatatccttacagtatcgttgtgcgataggtaataaagaattgtcatcgcattgaaatgca

SEQ ID NO: 1090 - DNA, 1138 bp, Aedes aegypti
aaacaaacgagctccgaagcacatgtgtttacgattgttccgcaccggtgttctcgttttcagttcaattgcagttatttcaatcatttttaccggaatttagtcggaattaaccccccaaaatgacggatttcgatgtccgcggtgaggattccgattccagctacgtatcctacgacgaggatgatgagctgcgggaagccttggcaaagggattgctcaagccgggtctaaacgtgatagcgaaggatcgatcggagccggccaatgatcccctcaaactgaaatcagccctggaatcgttaatcctgaaagccccttgggtggagaggttggatttggtgaacgacctggcgccaatcactccggagctggctattcagattgagaagcacgaacaaaagcgcgagaatcagttcaagggaaacaagaaaatcccctacgttgcaccggaacaggatccggtcttgaatgatttcaagcgggaaatcttgttccaccgacaggcgcaagctgcggtcgtggaaggcattaaacgtttgcacgatttgggtgtccaaaccaaacgaccggatgattactttgcggagatggccaaaaccgacgagcacatgcaacgcatccggaaggtgttgctggccaagcaggaaggtatcgccaaatcggaacgggcccgtcaattgcgtgaacagcgtcgcattggcaagctgatccagaggcaaacgaccgagaaacgggatgaggaacggaggaagatgctggacgatatcaagaagttccggaagggcaagctttccaatttggactttttggacgatgatgaggaaggtggcgccagcaagaggaagaagaagggaacggtgcgaggcgcgggtggaaagaagcaggttaatccgaagagggcggccaagaatgccaagtttggtttcggtggtaggaagaagggctcgaagcggaacgacaaaaagtcgttcatgggtgatggtccgaaaaggaagggcggtgctgccggaggcggtggtggggctggtggtaagaaacgattgggcaaaagcagacgggcacagaccaagaacagaggtaagtaagggaagcaatggatttttgcgtaaatacatatttcttttgtcagtaagtt

SEQ ID NO: 1091 - DNA, 2160 bp, Aedes aegypti
atgctgatggttaccaccactgtggagatactcaacagggttgctatgcaccacatacctttggccagcagttacgcttcaagtacgaccagccttcaggattggcttgtcgatacaaccaccgccagcaacaataccaactatggcagtgttggccgatggcagaactttctcgacacccgaaggcagcttgtcacgggtacgcatgttctgaggcttgccagttgccaaaatgaccaatcgcaggtggttcgacgactggaaggaataccgtattccctggccatgttcctagcggatttcagatcttggacgaacgaaacgtggaccgaggacggctggcgggatctgttgtgcatgcacgagctggaacagttcggtttggggctacggagtgatcagcgatgggctctgcagttgtacgattcgtggggaaaaatgccctctggattggagcgtggaaactcgtttactccgggtagttttgagcagtgtctggagttttctctgcacaacagtgcagcatctttcgatggacatcactgtactgtgcggttgaacttgcgatatgtagagtcttcattggatgaattttggatcggcatttgtgtaccgaattcgtgtgaagcgagatttgtaaaacggatggtggatagttttgcagaagaatacagctatcttaaagtgccggactttcgtcaggaagacttctgttatcgggatgacccgaactggagtttgagtggaaccgccattgctgccatcaccatatttgctataattgttgcagttacgcttgcttgcacaatcgtggaagtcctcgggtttattctccaacgtccagtacacaagctggtcaaagagctttcactctactacaaactcttcacactgttcaaaacgactcccaagtccgaagagaaaactgacacgatggactgcatcaatggaatccgctcgtttatgatgctgcagattatctcacaccacgttcatagcgctatacgaacgataccgaccacgaatcacctcgcccgggaagagttcttcgagtctgccttcggaatcttgggctatcgcgtgtcggccttgtcagcggacatatttctggtcttgagtgctgtacttttgacttataatgttctgaaggagctcactgctaccgaaaaggtctgcttgccgagactgtacttccgacgtattgtgaggattcttccaccgtatggattcctcattttctttgtagtggctttcgcggagtattttggcgaagggcctctataccagtactacgttcatccaatggtagacgcttgtacggacaattggtggtccgcactgttgttcgtccagaactatgttcatccagatcgaatgtgcctgccgcacacttggtacctctcggtagacatgcaactctatctcatatctccactatttatctacctgctctggaaattcggcaaacgctcactgtttggccctctactcgttgcgctgctgtcgatggcttgcgtgttcacgaccttcatggttaacgacttcgtactgaatccaccaatgagcccggaccgggaattccaacgagatcggctcacccattacccgacccatgcccgaatggccgtttggttctgcggcatagtattcggatatttgctgttccggacccgcgggaagcgagtcgtttcatcgcagcttatccttgtaggaggatcgatcgcagcaactgcgttgactggggtcatcatgttctgcgctcacgaaatctacaaaccccgggaggccgacccacttggagacgcattctacgaggcgttgcaccgggtcgcttgggtcatctgtatcatgtggcttatcttcatgtgcgtcaacgagcatgccagcgccctgggacactttctagcgtggacattctggcagccggtggcgcgactgtcgtacaacatgtatctgatccactatgtcgttattgtgattagtttcagcggaatgctacgtcaaccattctatttcagtgcgataaacttgcaatacgtaaatttcggtgttatcggtttaaccggagcgttatcgctcgtttggtggttgcttatcgagcagccatttcaggtaacggtgcggtatgtgcgagagaggcttcaaaaatcaaaacaataa

SEQ ID NO: 1092 - DNA, 655 bp, Aedes aegypti
acacacggtgcaatactaacatcacatgtgtcaaaatgccttagctttggcgaaattgaatcaattgccgatcataataagcgctcacctcaaacctgctataaatattcacggatcatcggtatccatcatcagtcacttcatagcatccgatcaacctcatcaagagtaccacacaaaaaatccaaaccgtcggtccgaaatgtacaaaatcatcgtagtcgttgcctgtttggctgcattggccgccgctttgccttacaaacctgcccctgaaccacaccacgaaccaaaggaagctcatcaccatcctcagtacaagtttgagtatggcgttaaggatggacacaccggagaccacaagacccagtgggaacatcgtgatggagaccatgtcaagggacagtacaccctggaggaagccgatggtggccatcgtgtggttgagtatgaatccgatgcccacggaggaattcagatccaggttaagaaagtcggcggtcatggtcctgccccgaaagttcacgagccaattccagttgctccagtgaagtcgggaaagaccgctcaccaccatgggggagaaagctacgccaatctgaagaagcatcgctactaatttaggagaccgaagtgtgactgaaattcccgaaag

SEQ ID NO: 1093 - DNA, 5946 bp, Aedes aegypti
atggatcacgcggttcacgctgcccgaggaagaccatggaacaagctgcgcttcgagaacaacgagctggaatgcctgtaccagcggtacaccctcaagctgcaacggttctccgtgaccggagtcgttgccctggtcgtggtcctctgtggcgtcatggccgggctcagcctcggttacaaccaggcgccgacgttacataacgtcttcaactcgttcatgtgtctgatgtttgccgtcattctggcgctgctgcagttccggtttatccgggactcgcacctgccgtatctgtgctacgggatcctgttcttcacggcggccttctgcttcatctcgatgcccaccgtggggattgtgttccccctcgatacccgggaggtgatggccgaaggcgtctggcagattgtgttcgtggtgttcttggcgtacgccatgatgccgctgcagatctgggaggcggtgctgttcgggatcattctgccgtcgattcacatcgggctgaccgggtacaatatctacaatgagaattttcagtatttggcgtatcaacagctcgcggccaacatcgtcatcttcgtgggcgtcaacgtggccggactggtcgtcaacgtcatgatggagcgggcccagcgacgggcgttcctggatactcgcaattgcatcgcagctcgactcgagatggaagatgaaaacgagaagctggagcggctgctgctatcggtcctgccgcagcacgtggccatggagatgaagaacgacatcctgtcgccggtggagggccaatttcacaagatctacatccagaagcacgagaacgtcagtattctgtttgcggatatcgttgggttcacggtgctggcttcgcagtgcagtgctcaggagttggtacggctgttgaacgagctttttgggaggtttgaccagctggcgcacgataatcactgtttgcggataaagattctgggggattgctactattgtgtgtcggggattccggatccgagggcggatcacgcgaggtgtgccgtggagatgggactggacatgatcgatgcgatcgcgtcggtcgttgaacagacggatgtgatactcaacatgagggtagggattcattccggtagggtcctatgtggagttctgggtcttcggaagtggcagtttgacgtgtggtctaacgacgtgacgatggcgaaccacatggagagtggaggcgaggcaggtcgggtccatgtgacccgggctacgctggatgccctcggaggagagtacgaagttgaggcaggtcacggtgatacgagagattcgtatctccgcgatcaccagatcgatacgtacttcatcgtaccgccggctcatcgcagaaagcccctgatgttgaacaccttgggggttcgttcggctctgggggccgccaaccggagaaagctctcgttccggaacgtgtccaatgtggtggtccagctgctccacacgatcaagtactccgttccggttccgttctcgcacatggccaccggtgggtcaccttatcccggtggcggcggcggaagcagtggcggtccagccggtggccccggcggtggaatgttcctcgataagaacgcccgaaagattgctttcgtagcaagtttctcgaacaatagcaagcgagtgctccacttgcaacgtatgctccacgccagtccctaccaggcgcacatagctgccactgctgcagcagtaggcggcgccaccggagaaagcaccggtctgatggccgggacgcgtggaggcgacgccggcgattcttcccatcttcgtttgcgcagtagtagttgtagcatatctgtagctttcactcaaaatcgaagcttttaccccgaggcaactgtaaactcacgcgccaacaaggtcaccgacaagttcaagcggccgttcaagaagcgccactccagcgtttaccatcagccgtcgaaccgggtcaacaagttcctctcgcaggccatcgaagcgcgcagcgtcgatcgcgagaagtcggtccacgtcaaacggatctcgttgcagttccgggagaaggacaaggaacgccagtaccaccaggacttcgatctgggcttcaccacggccatgggctgcagcctgctgctgctgatcctcagcgctggattgcagatttcagcgttacctcgtaccttgatattgctgctgctatttctgacggcgttcatctggatcagttcgatcctgatgctgctgttggccgtaagactgaagtggatcttctgggatctgtcgcagagtttctcgctgcgcctggcgatcaccgttttcacgatcgtgctgctctactcggtcggacaggtcaatgtgtttacctgcctctcggaccacccttgtactactaacttcactacaaaagccgtggatcctttccaacactgtgcactaccgcagtacatctccctgtcagcggccttttccttcctgaccgtgtcgatattcctgaggttaccgatcatggtgaaaacgttcctgatcatgctgatgggcatcatgtactgtctgttcatcgagctgtcccacacgaacatcttcgactgttacgatcagcgggtggagtcggccatcccactgcacacgatctcgctggcgaggatcatcatcttcatgatcgcgatcttggcccacgggcggcaggtcgagtggacggcccggttggacttcctgtggcagctgcaggcttcgcaggagaagaaggagatgtcggttctgcagcagtccaaccggcggatcctgtacaacctgctgccgtcgcacgtggcttcgcacttcctggacaaccacttcagccggaacaacatggtgagtagttggcggcgtgctgcgtgtttgtttgatttgtatcatcagagctacagcaagttttatacggagttggacgggtccaatcagggcgttgagtgtctgcggctgttgaacgagatcatcgcggactttgacgagttgttgtgtgaggagcgattccagtcgatcgacaagatcaagacggtgggcagtacgtatatggctgcggtggggttgattccggagttcaagatgcttccgagcgatcaaggttcgacgcggaagctgatgacggctttgatagattttgtgaaggcaatgcgagtcacgttgaagaatatcaacgagaattcttataataatttcatgctgagggttggggtgaatgttggaccggtggtggctggagttatcggggccaggaagccgcagtacgatatttggggaaacacggtgaacgtagcgagcagaatggactcgacgggtattccggggtacacgcaggtaactcaagaggtgatcgacagtcttcagggcagccacttcgagttccggtgtaggggacagattaaagttaaaggtaaaggtgatatggtgacgtattttttgtgtgagcagaatgagaatatgctgaatgggggaggagcgatgggagggatgaacgggacgcgggatcgtcagacgccagcctcgaacattatctccaactaccaaacggacagttttcatcacatgaacattggaagtcaacaggggtgttaccaaacgcaggcgccggtcctgcagcctcaaagttactatatgaagcgatcggacatggatagcgggagtgtgaagaataccaagtggcagatgggcaacgacagcttctcgaagaaagagagctacaattttctggaaagcccgaacttacttcatcaacaaactcccatcgcttacaagcacaacaacataaacaataatcacattagcgcaggataccatggcaaccatcacagtcaaccgacgaatcacatgaacaacaacaataacaacaactacggcaaacgcaatgactatcttcatggcaatggctcggtgggaggtcagcaccagccaagttacaacattcgggaaaacttcaacatcatcgaaaacccgaacgtaaaagaagctgacgagaacaacttcaacaagctaaaccacagtggccataaagtacgaaacaacaaaaaccatcatcatcatcatcaccatcgacacgaccccggtgcgggtagcaccagccataatcccagcaatcgatacgtaacggcttcggagaacgaacctctgcttggctcgggcatgatcggcaacgccatcatcaagcctatccagcagatccaacagatacccaaatacgaacctccccgctatgccacgggaagtgctgccttccctcatcaaccgatgaacaacaacgccagctataatttccccgcagcccctagttatcaccaacagcaagtgccgcctccgcacgttctccgacagcaccagctctaccaacagcagcaccaacaacaacagcaacaactgctgaagcagtacatcaaaccccttccgaagctcccccacgaatacgacgaatcccgggaaatgtcctccacggatgatctcagctctcgaccgcgctccccttcggtttcctcctccgacgagagctactccaaaaccaccgaaggcgaagagctggatggtcactctccgctccccgcccggacttcctatcccaacaacttcaacaacccgctccaatacctctacccgggcgacatccaggtagatccaacctccccgcccaagctcagcccgatcgacttcgccaacatgaaagatttcgaggtgaccacgacggcggaaaccaaatcctcggcgaaccccaacaagggcgagtcgtgcaatagcttcgagttccatgacaagccttccgccgcaatgggcgccactcaaccacttcaaccttcaacgaacttccccaagtcgcctttcgaacgggaactgcaacgaaggcttgcagagtcgcaatcgcgaccgatgctggcctccgcagccggcaacggcaacaacaacctcgatcaccaatcggagctgccgtcggtgcggcgggactccgccgagaagatcaagaacgtgaacaacttgttgctggcgaagcaccccggaacgctggaggcgatcaaggaagccaccaggaataagaatccgtcagagtcgagtcatatgcaaacgtcggacacggaatcgtgcgagatcatccacgactaccggtcgtccccttcaggcggtggaccgggatcgatggaccgtcggcaccaacatcaccaccaccggcagcaccatcaccatgcactgtcgcaacaatcgccccgaatgcaccctcgaaacctccaccgcaagtacaatgcggcgaccaagaagtcctccaacgagacgtcctccaacatcgaagcggacgaagacctgcggctgtcgaacgaagcgatctaccggggtcgaggacgggactcggacgacctgctcgacgatgacgagccggacgaggaggacgtggaagaggaggagtcggaagacgacgacgatgacgaagaagatctagacgagcgggaaccacgtcggaacgcaatgcgaaggggactgggcgccaacggcggcgagcgatcgcgaaccggaagctgtgatgcgacgaggaactacatctcggacgaactgaagtacggtgcgggacactcgcgggaacgggatctcagccatcacaacaacagccatagctcgcaccacaaccaccagtcgctggactcgaacccggtggaaagccaatccgagtggagcgacgacgaatgccgggaggaggcgaccggcggcgccgaaagcaccggctacatcacggacgaacccggcctcgagaacatctcgctgctgaacgaggccggtctcaccgacgcggagggcgccctgtcggacgtgaactccctgtacaacgcgccggacgtggacgacacgtcgatttcgtcccgggccagcagccggctactgagcctggactcgctgagcggcctgtacgactgtgatttagactcgaagcacgagatggccatc

SEQ ID NO: 1094 - DNA, 1218 bp, Aedes aegypti
gcgcagtgtcttcactcactttaccaccccttaaaaccacccacatcgaaaaatttgtttctgtcagctgattctggtctttaaatttgttttgtgtgaagtgtttaaaacagtttgataggataagtgagttgtgtttgtttggttatcgaatcccactccattggtgtcatcaaggacaacgtaaaggcttggagtgtcttctgcatcacgcttttattagctttgacctaattagttttcattccaacggccgtaagaatggacccctgcgtggacgaagcaaaaatcgttaaggaaaccctacacgctggcactaaggtggtcccgttccgggatggaacccgaatcaagttccacttccagacgcggaagctcgacggaaccgtcctggacgacagtcgtgagatggccaaaccaatggaactggtcctaggaaaaaagttcaaactggacgtgtgggaggtctgcctgcaaaaaatggccctccatgaggttgccaagttccggtgtgataaatcgttgcttcagcagtaccccttcgtgtcgaaaacgatccgggattcgatgaaaccgtcggaacaccggaaacactgttgcggaatgaccctccagaacgagggcatcgggtataaggatctggacgagatctttggctgtccgcaggatttggagtttgtactggaggtgctatcgatcgagcatccggaggactatcagaaggattcgtggcagctgagcgacgaggaaaagctggaacaggttaaaaaactgagggcgaaggggaacgagtgctattcgaggaaggattatgccgaggcaacggaggcgtattcgtacgctgctgggctgattgagcagttgatgttgaaggagaaaccgaatgacacagagtggctagaactggcccaactcaaagttcctcttcttctcaactactcccagtgtaaactactcgacaaggattactacgcagtcatcgagcactgcagcgaagtgctggacaagtatgacaaggataacgttaaggccctgttccggagggcaaaagcccacgtaggagcgtggaatccggaccgggcgaaagccgattttcaacgggtttccgagctggatccggctctggccggggccgttagcaaagagctgaaaaatctacaggaactgatacggctcaaagatgtggaggacaagcttcggtttcagaaactattctaa

SEQ ID NO: 1095 - DNA, 1480 bp, Aedes aegypti
agttaagcttcatatcgacatcggctccggtctcgtaaaacatgcagttcgcgaatcgattgagaattctagcgtttaacattgtcactggaaccgtgaatagtgctcgacatgtgcataatggaaacactatattgcaacgcatatcgctacctctaaggcatcctcgcggcaattctagaacaacttcacatcttgatgttcacatgcagccagaacgaaatgggggtggggcgatagggcaggagagagagcgggtgagtgatgtaaacagagcggaattctctgcgaatcgagggcgatccgatgaagctgagctggaagaaatagaaaataatctgtttgataatcggcagtcgaaagatgatttgcacctgggcgagattatgaagaagtataaaaacgatttccgtcgagaggaaatcaaccgaagccaaagtaaaccaaagaagtcttccaaaccgattcgcctgggggaaatggatttggagaccatgcatacgctgaaaccgtacaaaaggaaggaaaagtctttggagatcactgataagcacagtggtatcaaatacctcaaactgcttaaaaatgatcccatgtttggagatatgcagttgcttatgacttctcgaaaacgaagagagctgaaaagcaaacttgttgtggaagggaaacggctgataaacgatgcaattgatgctggactattgttggaaacggtcatcttctccgaatcatgccatttggatgacatacgtgcagaactagcgacccttaaattgattcaactgccaaaccatgtgctgcaagaatggtcggaccttgtcactagtcctggtgtaattggcattttccaaaaaccctctgacatgagcaagatcgttatacgaaaccgaacagcagagtcccttccaattactgtcgtttgtgataatgtacgggaaccgaacaacttgggaagcattcttcgaagctgcgcatcgattcccgtagatcgtgtgatactgttgaagggttgcacgcatccatgggacccaaagtgtctgcgagggggcgctggagctcattttcgaaccagcgtcgtcggcccggtggtgatggacgaactggcggagcttcttccctccaacccgaccttcctggtggcggataatagaagcgaacgagacgaagaatcgtttgtgttgagccgttatgataaagccaattattttgacatggaacacatggtgctggttattggtggtgaaacacacggggttagcagtgatgtgcgaagatacattagacagctgcaggaggattccaacgtcggaaatagtctctatctggtccacattccactggagaatggtgttgaaagtttgaataccgcatcggcaatttcggtcattctttgcgaaatacgaagacaattaaatccaaaggaatgaaatctggtctgttagcttgttgtataatatatgtagtttaattaagaaaa

SEQ ID NO: 1096 - DNA, 2619 bp, Aedes aegypti
atggatttgtatagttccgaagatgccagcagatcgtcaacgtcggagattacagagccacgaagcagaaacagccggaagcggaaatacacttcggacgatgcggacatagaaaaccagcgacccagcaaaaggcatggaggtgaccggcgactatccccaatcgcagcctcctcggctccgtcggtgccgattccgagcgtggccagctcggcagcttccagcaatagtgtacccagcatcaacattggcagtagtgaatacacctcggacacgcaaagttcgtcggattgctactccacgacggcggatttcgagctctacccgctggttagtccgccctccgtcaacagcatcatcctcagcccatcatgtgaagtatcacacggcagttggcacaccaagggtgacacaacgccgcatgccaataggaagtcatcatctcacagcaatcagcagcagcagcggcacaatgagaatagtaacaatagtagtagtaaatcgtcgtccaatgtaccacccgccctttcgtgttgtgtcactccttcgtccgatttgcgatcctgcccactgccacggttcgcctgggcagactccaatcaggtgtggaagctcatgtgtcggaaggacgaaaaggcatcactcgagcgggagcccaacatgttcgaccaacatccaggtctccaaccacgaatgcgtgcaatcctactagactggctgatcgaggtgtgtgaagtgtacaaactacaccgggaaacgtactatctggcagttgactacatcgatcggtttctcagccgaaagaaggaacagaagaaaactcatctccagctcctgggaataacggctttgttcgtcgcggcaaaggtcgaagaaatctacccccccaaaattggcgagtttgcctacgtcacagacggtgcctgctccgaagatgacattcttcgggaggaactgctcctgctgagtgagctccagtggagtatcaatccggtgacggtgatgggctggctcggaacgtacatgcaagtcaacgtaaccagccggcagatggaaatgatgcacccgcattccgttggagcctgccggaagcaacaaaccacaccctcgaagccacagttagatgaatccttcgtttatccgcaattttccggtatggaatttgcgcaaactgctcaactaattgatctttgttcgctggacgtcggactggcgaactttccctactctgtgattgccgcggctgcagttagtcatactttcgatagaaaaaccgctaccagtgtgtccggtttggactgggatgcgattgccccgtgcgccaagtggatggaaccgtactttctagtgatttgcgacgagaatgaagtttctccgctcgcgctactcgagtccaacgaacaggtgaagggcagcttcggcttggcacacgtttgccccaacctggtgtcggacagttctcacatcattcaaacacacagtacctcattggatatgttcgatcgggcgtctctccgccgggagcatctcgaggtggtggcctgtatcatacaacaggaagcgtcacctgcgccactactggaccctgagggtctattaactccaccggcctccagccggaaatcgcttgatgcaaacaatcctctcgaggtgacaaataaactggtgaacaagacttaatagttcgtaggtcccaactacttgtaagctctaatgatattttaaacagtaccaaaatttcttataaacgttccactagtgcgagatacattgtacggaactgcatcgacgatagattgataggagccgtaacttttcttacctaatagcaatctaccgtcggttcacatactctagagcaggtatatgtttaaattcatgataattcataaaaaaaactcgttgacttcaaatgtacatatttattgcagcaataattcattcaagtattacaattcatactgccttaccatacaatatagtacaaaactcgtacgttgaattttccctaacaatcctgatccaaattaatacttaactacccatcaaattcccattaacagctaacacctctcaaagaacttctaacaatttaacacgatactccctcaaaatgcattccctctccaacttaccaagtgaacttaaccatctcgatgcttgtcccagtaatcaattaacatggaacccccaaatactaacaactaacactctctaattttccttcccttggaaaactctcaacgtgagtgataaatgatgggataatatccaaccatcaagagaataaagcgctattgcccgtaataccgaaaaataatctctgaccgatgactcttgacttgaacagggtgtgaacattgtacataatgtatggaagaaggcgcgtgtatccttgtagtagattcgaacgttattgaaagagaataaagacgcttattaaattaactgttatcggaaactagttagccagactttaagccaacaagcttttcaaatgtcattctattagataagctattccttgttaaaacatataaaccataccgtttcctttagtctgataagatacgcttaaggatggacaataataaaaagaaaataaaaatgttaaattat

SEQ ID NO: 1097 - DNA, 2887 bp, Aedes aegypti
atgggtaagattctactatttcacgaatcggatcaagaggaggacgatcagatcgagtttaaaaccaacaagagctacgccaagcactacgacgaattccgcaagaaggaagttctgggccaattgaaaaaccttgaatccgagggtgagtcgtcctccagcgaggatgaaacgacggacgaggaagtggttgacccggagttcgacaaggagttcttccggacgttggcctatttgaaacggcgagatcccacaaagtacgaggagaagccgcagtttttcgagaatgtcaaaccagtggaggaagtggccttggagaagcggaagaaaaaggagaaaccgatgaccctgaaggattacgagcggaaggtgattctggagaagggtggcgtctacgaggacgaagatgagaatccgatgcagcaagcgaggccggaatctccgtcgttggttcagcagcaggagcagattaaggacgagattaggcgggcgctgagcaagattgataccgacgatgaggacgaagaagacagcaaagggggactgctgaaggaaaggaacaagagcaaggaagataccgaacgagatcaggcagattatttgtcttggctggcggataagaaggcgaaggaagcgccctcggaggaagtgaagcctttggaaccgttgaaggagttttggagcagcaagtcactgtctaaggaggacgcgtttttgaaggattacattttgaataagcgattcgtggacagttcaggggatgttccgacttacgatgacatcgtggcaacttcagaggacgaagaagagctggaaaagcaagaggagtacgaaaggcagtacaattttagatttgaggaaccggatgcggagtttatcaaaagataccccagaaatgtggaagaatcggttcgaatcgagcgaaacaagcgaaaagagcagcgacaagctttgaaagagcgtaagcagcgtgaaaaagaacagcagaagcgagagctggaagagctgaaggcgattaaattgcaggaaatcaaggacaggattcaaaaattgaaagaaattgctgcgaccgagaatatgaccttaaatgaggaagaactcgaatcggatttcgatccggaagagcacgatcgaaggatgcagagaatgtttgatgacaattactacggaatcgatgaaggcgatcagaagccggaattcccagatttggacgaggagctcggaatcgagaactacgaccgagagaaggttgactcggacgaacaggagaaagaggacgacggtccgtactgtgaggatgatgacttcgtgatggacgcagattacgaagagaatcaaaagaagaagaaagataagaaaaacttggaggaagaactgctggaagccactggcggcaagaagaaaaagaaagggaagaagatgtcgaagtttgcggaggtgttgaagaaggagaagcctctatttgatccggaagatgagaaaacctacggcgaatacatcgatgagtactacaagctcgattacgaggacataattggagacactccgtgtcggttccgctatgtggaaacggtgccgaacgatttcggattgtctatagaagagatattgatggccaacactcgggaactgaatcgatgggccagcgtcaagaagacggttcaaatacgaccaaagtactcggagctgagcgaaattgaagtctacaaacggaaggctcaaaacgaagaactaaagaagaaaattcttcccagcttattcaaacagcaagaagagagcgatgaagacgaagaaatcaaacaaaagaaagttaacacaataaccaaactggacgatgaagagacaaccaacactgcggagactactcctacagagagcaaaaagaagaaaaagaaaaagaagaaacagatggtgcctgaagaatcaaaaacggaagaggaaactaaaactgtacttgagacagtagagataaatcaagaacacaagaaatccaaaaagaaaagcaaaaagccagaaaaccttgaagaacagagtgaaataatagtagaaagtaccgaagaaacaccgtcagtggaggaaaagaagagcaagaaacgaaaaagggaaaatgatgaacttcaaaccgccgaggaaagcataccccatccggggaagaaacccaagaagttcaacaatgagcgcaaaaagggccacttcgacaagagccaacaggcgccgtcgaatgtcaccgacagtcggctgcgggcgttcggtatcaatccgaaaaagttccacaacaagctcaaatatggtggaaatcagagccagcagcaagcggccactggtgagaaccagcacgacagtagaggccaacaggatggccaaaggcatcagggccagcatcggaaatttgatcgtaaagggggaaagtttaaaaatcagcattggaagaataagaagcagggttttggaaaaaagtgaacaatatctattgttaagtataatgtaaataaaaactatcaaaatgttatatgtatcatataggcctccaatcgcgaaacgcaacatactgttagccatctatactttggtagcgcaactagtcagatgatgagagatttgatttttcacgcatccatcacatgccgctgtgtagaaaaatgttttattttcctgatataagacggttcacagtgaaacagttaggcggaaaaggtaggaatattcattctctatgttctacatacgtttgttttttatattattccactactttcataaaaaaatgagatccggctggtaggagcactagtttgaggttggaaaaccaggatatgtgaggttagtttcattggaactttcgcctgagcgatttttgcacttgaataaaacacgtttcgaaacattg

SEQ ID NO: 1098 - DNA, 2933 bp, Aedes aegypti
atgctgaagccgcacttcatcgccatcattcaggatgtcattttcccactgatgtcctactcggaggccgacgaggaactgtgggaagccgacccgatcgagtacatccgtcagaagttcgacgtcttcgacgattacaccacaccggttccggccgctgaaactctgctgcacaattgctgcaaaactcggaaaggcgtcctcccgcaagttatgcagatcatcatgcaaatcatcaacgcgcctaatctgaacgccaagcagaaggacggtgccctgcatatggtcggttcgttggcggatgtcctgctgaagaagaaggtattcaaggaccaggtcgagaatctgatcatgcagtacgtgttcccggagttccaaagcccccatggacatctgcgagcacgagcctgttgggtgctacactatttcagcgaaatcaaattgaaaaacgaacaggttttggcggaaattatgcgtttaactgcgcacgctctgctgaacgacaaggagcttccagtcaaggtggaagccgctgttgccttacaaatgttcctcatctcgcaggaagatgctcccaaatacctggaaagtcaaatcaaggaaatcactatggaactgctgaaaattatccgcgaaaccgaaaacgaagatctgaccaacgtaatgcaaaagattgtatgcatttattccgatcagctgcttccgattgccgttgatatttgccaacacttggcaacgaccttcagtcaggtgctggaagccgacgagaactccgacgaacgagccatcacggctatgggtctgctgaacacgatggaaacgctgctcagcgtgatggaagaacatcctcaggtgatgctttcgctgcatccgatcgtcctgcaagtggttggccacgtgttgcagcacaacgtgaacgaattctacgaggaggctttctctttggtgtacgatctgacgtccaaatcggtttcgcccgacatgtggaagctgttggagattatctatcagctgttccagaaagacggcatcgattatttcgtcgatatgatgccagcactccacaactacataactgtcgatacgccagcatttttgtccaaccagaaccacgtgttggccatgttcaatatgtgcaaaacgatattaaccggcaatgctaccgaggaatcagagtgcagtgctgccaaacttctggaagtgatcatcctacagtgcaagggtcaaatcgacgagtgcattcctagcttcgtagagctggtcctgacgaggctaacgcgagaggtgaaaacctccgagctccggacgatgtgcttacaggtcgtcatagccgccctctactacaacccgcagctgctcctctcagtgttggagaagatccctctccccgccagtaacgagtcgatagcgtcgcactttatcaaacagtggattcacgattcggattgcttccttggaattcacgaccgcaaactgtgcgtcatcggcctgtgcacactgatgtccctcggcgacggcaaaccccaggtgttgagcgaactgggcgataagatcattcccacgctgattctgatattcgacgggctgaagcgggcttacgcagcccgtgcagctgaagaggaggaagaggaaagcgaagaggacgacgatgacctggaagagggcatctccagtgacgaggacgaagtagatgaaatgggtccgtcctactttgagcgcatagccaagatggccaaggacaaggcagccgagcaaggctttgagctgacggccacgattaaggatggaaacgattccgacgatgaggatgatgacgacgatgacgatgattccggtgacgagatggatgaaacagctctcgaaggcttcagcacgccgctggatgacgaagacaatccagcatatgtggacgaatacatggtattccaggaagtgatgaccaatctacccaacgtagatccaaactggtacagcatgcttaccaggaatctgaaacccgaggacgccaaagcactgcaggagattctcgtgctggctgagcagaaaaaagcagctaaacgttccaaggagattgaaaatgctggaggatatcaatttacccaacatcaaattccaagctcgttcaactttagcggccaacagtaatgagctccttccataaatacctctcttgatggtgtgtgtggtgcgaggtaaagcaaagaacgactattttaacaaggaaaattgcaaaaaaatcctgtataaagaaactctagggaaaacgaaacttcttaatcaataaatctatcaatttgtatctcgttaagagtaatgtatttttgtctcgtagtagaaatagtgcaaaacaaatacaaaaaattagttctttcacacatgtaaagatgtagttctgttaacgagccatctaccgagaaagccaagttgctgaagttgggagattgtttctgttatcgacaaaaaaaaacgagatcaattgatggaatcatttgcgttccgttcgcatgtgttttaattacatattcatattattgtttatgcatgcattgagaaaaaacacatacacacagctaacaaaatgatatctagaatcggtgcacgtattgctgcgcttaggaaacaacaaacaaaatatatcagggattaccatcagcaaaagcttgcaaagcagataaaaaagaatgtcatttttaagcaaacttatagatcaaactcgcatgcagtccaagtccccctaattagttccataagtttacgtcaactaggaaaacctttgtttatcattcaagccgggaacgtattctcaaaaagttatagtactgaatatgctgaaacaactatatttccgattatttgtcaaaattaccatcaatgaaacatccgataaatgcatctgttttataatttattatacaaatcacaatgaacgaaag

SEQ ID NO: 1099 - DNA, 1477 bp, Aedes aegypti
gaaagtgttttgtttttgccgaagtcatgtcctcaaatttcaaatattctctaacgaaagtgtataaaaattatcaaaaatatgttccggagttgaaatctgctgttgtgctgcgcaccatcattcaagtttgcgtgcactacattgaaaccaaatcctgctcgaaggaggttttggaccgagccgttaagaagctccaagcctcgaaccaggatgtcccggagcatttttgcgagctgttcgccggtatactgcagctgatccagctgtacctgcgctaccccaagggcatcgtgaaggatgacgagctgagggaatcgctgaaggagctcaaattccgggacgattgcattgaggatatcgtcaaggtgctccggcagcaccgggatccgttgagcttcaactatcgggaaatgcgaaatcttcgttcgccgcctaggaggatggtctggcggattaacgtttcgttcatggacaggtcctcgacccggcaccccacggtcatcctacacattcaaaaaaccgatggagaatttctcagcttcgaactcagcttatcaatgttccacaggcttcgctacaacgtcgcatctctgttacatgaactgcaaaccctcgagaggcgacagagtgtaaggaaatcgtaggaaaacaagtttatataataatcatcatcatgttgatgtttgttcgcgtaacattcaatcaccccaaacggctcatcgatttctaataaacaacatcattactccacttcatcacaaactgctctatttgatatgagaaatcctaaatatgttcgctgtaatgttttttgccacataattcacgtaatcgaccggctgcctgctcgggagtgagatccctctggggttgacatagcaattcgaatccgaccataaatttgcgcactgtggccgaccgaagcagcggtggatagtagattgcatgcagcgtccagtacctatcgtcttgacctatcaaatcgccagttggcgctccgtgccagcccatgctgtacgggaatgaacacttgaacagattgtcgtatttgatagtcagctctttgataacgatggctagattattgatttgctgcagacttagatccgaaattcgacgatttccattccgagagattatcatggtttcaaagggccaactggcccaaaacgggaccaccaccagccaatctgcgttttctatgacgacacgttccttaaaagggaatacaattaggttcaattactttttaaatatgcctcagagaaagccattttttccctacaccgttcactcgattctagatcaaattctgtgtatcttcccaaagttagtaactaaatgctgttttcctataccaaaaggccaagtttggggatttgaatatcagcttccttagccgagcggttagagtccacggctacaaagtaatgtagaggtgttcgattcccagtcggtccaggatattttcgta

SEQ ID NO: 1100 - DNA, 1909 bp, Aedes aegypti
atttcacatcaaaattttcaattatctgctgttgtttcaatagtttatcggtttttctcaatattttctggtttaattactatcttccagtggaaagcagtgttgttcaatggttcaagtgatgtgaaacgtccctcgattgtgtccttgtccgagattgtttcgttttctgattccgtgtaacattttgtgttgttgcttaatccgtcaaaacgcttcctaaagtggattttaaattgcagagttcagcgcctgccccggttattgaccgcagttaggcttgtggacggcctccggaattgagacacttctactagcataaccttgaacaccagagtcagcagtcgaaatgaacagacggaacaaaggcccggggctaaaaatccaaatggatgtggcctccaattcgaaccctgtaacacctccaagaaatctggacaaaactgctaccataacgatcggtagcaacacattcgtcgtcgaagcggacaatctggagaagatatgtgatcttggacgcggtgcctacgggatagtcgaaaagatgcgtcacaaacaaaccaacacgattatggccgtcaaacggatcactgcaaccggacagacgcaggagcagaaacgactcctgatggatttggacatttcgatgcgtgccagtgactgccagtacactgttcacttctacggtgctttgttccgcgagggggacgtttggatttgcatggaagttatggacaccagtatagataagttctacccgatcgtgttcaaaaatgggcgaaagatgccggaggatattctcggaaagatcgcggtcgcagttgttaatgcacttaattatctctacactaagctgcgtgttatccacagagatgtgaaaccgtccaatatactgattaataggcaaggggatgtcaaaatgtgtgactttggtatttcaggatacctagttgattcagtggccaaaacaattgatgctggttgtaagccatacatggctccagaaaggatagatcctcaaggtaatcctggagagtacaatatcaaatccgacgtgtggtcgttgggaatcagtatgattgaaatggccactgggactttcccctacagcacgtggggttctccattcgagcaactgaaacaagttgtgaaagatgaaccaccacggctaaaatccgacgacttcacagaagtgttcaaaaacttcatcgtcgcttgcttgcagaagaagttccaggatcgatacaactacgaccagttgttgaaccaccccttcatccaagagcacaccgaaaagacgacagatgtcgccacgttcgttagcgaaattctagatttggctgccacggtttgatccgaatggtcccctagtgataaaccagtaatatacacatttagttaggattttttattagacatgtaagaatcgcgtctgaaacaacaaattacagccatcctaaagtccggaatgatataccttgtaatcttagccacaactaatatgccataatgttctacttcgtttcattgacccagaggagtctatccagatgagttagctggtgcaaaaatctcttgatcagagtgaaatcgagtaaattcatgaacttcaattctgattgcgtcaagctggcttcaacggcctcgtgttgtatggatggcttctctcacgacaaatagcaagtcaaattatttgaagattaatatatattttcaagtggagcggttttactgtgcttattatttgattatattttggttcatcagttattgaaagtatttcgtacaaattggtttattcgactgcaatcgacaattactatgtttcattcataggtaatgctaagaaaaatcgttttaattgtttaatcaatcgataaaaaataaataaaacagctatcgacctttt

SEQ ID NO: 1101 - DNA, 714 bp, Aedes aegypti
aaaacaaacaaacgaaacaacaccagcagcagcgagtatttttgtaacaataaattttaaaacaaattgcgaaaaaaatgcttctgaccattactacgtgttataattatggaccaggaagaccagacggaccacttatcaatgtgcctcaaatttaaccgcttgccttgccatgcccacttcctcgatggacaatttcagtaacagcacgagtatacgtgacaccgattccagtccccgcctgacggtgccagccgcatatgcaaacgtgccccgcgaactctgacaatcgcaaatcccgctgtgtttctccagttccttgaaaatgacatccttctcgccaaaataatgcgttggctggaaggccagcttctcaagaaaacggatcatcccactggagtaaatcgtcttgtagttcggaggggaatcgatcatcacaccgatgacaatactggccgaaccgattctccgacgcaacccgcaatccaatcgaaagtcgtgtaacctgcgtgtgtttcgggcgtattgaactggcgtaagattcagaatgggctgtgtaggtagaggaactggagtgaccatgtgtacatgatccatttgggactgctgaagttttacccgctggagaacatgtgtgaatttgatgctgatggatcctgccgttgttgcaatgtgcaaataaaatgatcgtccaccaagggatgtttagtctcg

SEQ ID NO: 1102 - DNA, 1828 bp, Aedes aegypti
atgagcgaaacgcaatctgcggatatcggtggcgaatcggatcgcaattgtgagccgggaagttgtcaggaaagtatgctgattacgacggattcgattgaggagttttcccaggagattagtattagtttggcggaagatgattcggaccagaacggaacgacaataacggtgcaggatgtcgagaagaaggctggagaaattgagggaacgacggtggggactgcagggggaaacatcacaaagattcaagatggattgattgtggctgataaggacagtgagggtgcggttagcaaatcgagttccttcagcagtgccaagagccgtgacatgtccgcttcctgcactagtctgggggacgatggaagtgccctcgaggatgccgaagattacctacatgacccgaaattcctgttgaagaagaagcacgtcttcatcctgagttcggcggggaagcccatctacacgatgcacgggaacgaacacaaattggcaactctgttcggggtgatgcaagcgctggtcagcttcgtgcagagcaataacgattccattaagtcgatccatgcgatgggcgtcaagtttgtgtttctggtcaaatcgccgctcatattggtggccatttcgaggacgagtcacagcgtacagcaagtgcagctgcagttaacggatgtctataaccagattctatcgacgttgaccttgaccagcatgcagaaaactttcgagaggcaaaagaacttcgatctgcgacgacttttggccggcagcgaacgcctaattgatcacctgctgatcaacgacaaatgcgaccacaaactagtcagcaacaatccgtttagctttatgacacactccgttcggattctacccctgcagccgagcattagggaaaacattatcggagctatccagaacaactgctgcaaaatcaagaacctggtgtttgccgtactgatcgcgaacaacaaactgatcgcgctggttcgcatgaagaagtattttatccacccggcagacctgcgccttatattcaatctgattgaatgttccgaaagtttcaagtcggccgaaagttggaccccgatctgtttgcccaagttcgactccagtgggtttctgcatgcacacgtgtcctacctggcggaagattgccaggcctgtttgctgctgctgtcgatcgagaaagaagtattcttcgtgctttcggaggccaagcgtaagatcaccgataaactgcgtcgttcgaactgtttggaagcaatcaacgaagcaatgaacaacaagggcgtcaaacttcaaagcatcggcatcccggagatacggcattttatctacaaaagcaaatcgaacgcgcagctgctgtgctccgagctgacagttccgtactcgagcatcggtcagtttaagcggttagagggcatgtacttcgagctgcaccatcggatacacaattcgggccggccggtcaagctcatctatcagatgaaggacaaggagatactgctcgcgtgggtcacccaagcgtacgaactgtttgccgcgttcgaaccgaccgtccaccggaacgatgtcatcaacctggtcaacaagctgctgaagtggatcaagaaggaggaaaacagcctcttcatactgtcggcgccgactttctaggagttggggtcctttttcccttcctttccgttgttttcgtttgcgaccaatcccaacggcagtagtgaagtcgtaggagagatcggctagaagggaaaaagtgatcaattagatggctcagagagatttccttccttttaagtgaaactgtgaacaatgagtttcacta

SEQ ID NO: 1103 - DNA, 1053 bp, Aedes aegypti
gatcaaaacaaaacaaaagttccgttctgagagcagcatggccgtgtttggtccgaataagcgtcggaaaatccccgttccgaagcggcatggtgtccgcgatccgttgaagaaacttgccgagagggaagctgccatcaaagacaaaatcaataaccctccaagagagcgggatgtacaggaagtttccaatcgcttcaaaaagtttgtccaactcaaagaacaaaccaaaaatcacaccgcaaacaagcatccctcccatggccaacatcagcaaccaaaggcgcgccgggaaccgaagcgaagtcaactgcaggtcggagacagtgttgtccgacagctcccgaaggaaccggaagaagcatttctggctcgtgccagcaaactgcagcaagaccgggtaacggaggccaagttctcttccaagttcaacgtcgacatcgaacgggatgagtcgaccggagccgttcgattgaagaaacggaaaacccacgagattgatgaactgctcaaaaagaaagctgaagaagcaaaaggtttcaagaagaagaagaaggtcaaggaggaaaataaaaagttaacgttagcagagaaaaaggctttaaagaaacagaaaatagaggcgaaaaaacgaagtgaggaggacaaactgttggaagagtaccaactggataacattgcattcggggaggtagtcgatggacctccaaccttgaacacaaaaccaagacatgcagacaaactagagggagagccaaggcctggcaagaaacgactattgctccactcgctgctggatccatcaaaggatgaagatgatgctcaggatgctgagccacagagaaagaaatccaagaaaaacgtaccatcacaggcacaaaagatcgacctgaagggaaagcgtaaaaatttgccagtttgcaccagaatgaaactggaacgagaacaacaaagtgtaatcgaaatgtatcggaaaatgaaaaagtccaaaaaccagggtacttgagatgagcatacatataatagttgacaatacatatacatattaaattt

SEQ ID NO: 1104 - DNA, 1002 bp, Aedes aegypti
agagtgagtcaactggtcagagtgaatgtaggtacgcgttagaaaattttattcccttgttcgctgcgttttgctactgcgtgttagtggaagcaaaaatagcattcgttccttcctctctttctgtgtggcagctgtagccattcgtaacttaaaattaaaataaaatcctttccgggttgtagatctgccgtttttccttccggagcccttgcagcaggttataaatagcagacggtcacaatgccaaacatcaagctgcaatcatcggacggagaggtgttcgatacggacgttcagattgcgaaatgttccggaacgatcaaaacaatgctggaggatttgggcatggacgaaggggaggacgaggtggtcccactgcccaacgtgaattcggccatcctgcggaaggtgctccagtgggcaacgtaccacaaagacgatccggcaccggccgaagatgacgagaacaaggagaagcgcacagatgacatcagctcttgggatgcggacttcctcaaggtcgaccagggaacgctgttcgagttgatcttggcggcgaactacctggacatcaagggcctactggacgtaacatgcaaaacggtcgccaacatgatcaagggtaagaccccggaggagatccggaagacgttcaacatcaagaacgatttcacaccggccgaggaggaacaggtacgcaaggagaacgaatggtgtgaggagaagtagaggagctaaagatgtaagtttacctatatttaaaaacccttttctttaaaaacaactgcaaaaaagaaaaaaagcacggaaggctgtattttgaaacctatattatttgctggattaaaaaaaacgagttgaacacgcaatggagctcttgttttgatttacagaaaatcacgcctccatattgttctgcatataaatatcaatgagcaggttttcttgctagatgtaatcttatccgaataaaacttaattgttagctgtaaatttagc

SEQ ID NO: 1105 - DNA, 252 bp, Aedes aegypti
atcgatcgtctgttggccgaaaaccggatgcccatcatagtaggcggaaccaactactacatcgagagcgtcctctggcaggttctggtcggaagtggcatcccagctgatcaggcggaaaaagtgttgctaatgacaacggaacaaatggaacaactcgagtcgacgcttttgcacggcgtactgcgacgggtggatccagtcactgccgatcgtctgcatcccaacaacaagcgcaaaattgtcaggtga

SEQ ID NO: 1106 - DNA, 6065 bp, Aedes aegypti
tttctacttcaactccttcaatatgaattttcagttctgtgtaatccaattgcttcttgttacttataaccatcgatttagttttctggacgttcaatttgagcttttttactttcaaccacatgtttaataattttatatcatctctaatttttcttattgcaaccttttcatctctctctgctaaaaatataaccgtatcgtctgcaaataaattaatatcgcaatgcttaatggctatatataaggaaaaagttctgtaaggaaatggataggtatcaataagaatgaaggagaaaagtatggctacaatcatcgatgcactcctggaattttgatttttgtataagtatgcttaacttctagattacccacacaggtggtgtagtgttagttctgtttttatcgttcttccaatgccataagcgatgaagcgatgcggtttaagtctccgactcgttttgtttatacacactttacacttaaacagatcttaagcaggcagcgaagattttagattttacacacacatccttcagggataaatcaagcacctgcacacatggcttaaagtgcgagaaagtgtatacttgcattgaagaaggcagacgtgcttttgcgttttcgtatcgaaattgattggatcatacatccaacaatccacttcactggaatatttctagtataaatattgacatttcatctcgcaaacatcgtagaaagtgcaatagttacgcgattgaagtacacattctaaaacagccaaccattgcaagatctcctttgaaagttaatttttatggaggctgtaaactagttcactagtatatttgaccattcgaatagaaccattacattttaaagaagcatatacttccatgctgcaacgttgtgataaggagtagagcggaatgaattttgcaataatttccgcattttgtgtcctgaatctcatctactgcgtgctcggcggattgtctgggttatatgtggataatggagccggacaaactgtgatggatacaatgatgagtaccgatgaccaactcgaaattgaacatgaaatattagagctgcttggacttcccgagaggcctcgaaaacgccacttgcactcatcaataagtaaatcagccccacaatttctattgaacgtgtatgataaattatcgtcggataccagcaataaccataaccgtcatgtccgaagcgctgatgacgttgatgtcttatttactgaagcagataataaggcgattgatcagagtgatatcattatgacatttttgaataaaaatcaccatgtttcggaagtgcgccatgagaaaggacgccgcttatggtttgatgtaaacgaaatggaagatgacgctgaactgattttagctgaattgagattgtatcaaaggcatgagcttaacaagtatggcactgacgaggttaatattacggtcgctgtctattcaatcatcaatttggatggtgaaaaagagcttgcaaaaattgcagaagtagacctaccccactatgacggatggattgaactaaatgtcactagtactgtcatgcaatggacaaccgatgcaagttccaacaaaggattctatataggagcatatctgaagaatcgtccagatagagaaattaagctggatgaaattggtttggtaaatgctagaggagacgataaatatcaacctttcctggttgcctattgcagaagtcctcagattgtcaagcccgttttgcatagtctttcaagaagcaaaagaaacacacagagaaagcgcaagaataagtcggaaaatcgaaacccgttgatcgagttacccatagatcaccataagagctgccagattaaaacactctatgtaagcttcaaggatttgaactggcaggactggataattgcaccggagggttatggagcattcttctgcagtggagagtgcaacttcccactaaatgctcatatgaatgcgacaaaccatgccattgtacagacgctcgtacacttaatgcacccaagtaaagtgcctaaaccgtgctgcgctcctacaaagctgataccaatctcggtgctataccacatagatgaatctaatgtaaatttgaagaagtataaaaacatggtggtcaaaagctgcggatgtcactgattatgcttaagtaaataaggatttgtcaaatgaaaacaaattatcataaagatcaatcaacagtgctactgtgaatgtatgatcaagttttttttcttaactaatcttctatgcctccaaattttctatattgccaacctcaacccctctaccgccagcataattttgttacaacgaaaaactattcaaaacacgataacttttcttttcattcaccatttttccacaaaatttcgaaaaacttctttttttttaatctgtgtcgattttgatcattggttacctggttttgaagatattccgatgttccttgtgggacggacaatttccaaataatttttgacagctgtttttcttttagtcaatttatcaaaataattaaatatagagatcaaaataattaaatatagggacttctggataaagtctctctaaacaaaaaaaaaaaatcaatatagattatacaactccaggtcgatgatcttttcgtaaaggaaattttctcgtcttcccagaacataaagcatattcttgcctgccacacgatatacacatgcaaacatgatcactcattaaaaaaaagttctccgttaataattgtggaagtgctcataagaacactaagctgagaagcaggctctgtcccagttttaacgtgtgtcagaaacaagaagaaggtgactacgggtcgatctacaaagaaattattggaatatttccgtaaccagatgaccattgaacataagaaacacagattttaaaaatagaagcatttttgaacttataaagacaggtgcagccatattttgaaaaacaaaaaaaaaagtgattgcgatttagggtggttgggaccaagaaggacaccttatgataaataggttgaaatctcagctgattagcacaatctcaaaagattactccagtgatcacacaagcccaccttttgttctaaatgatataataatcacaatcgaatagattttgaataataagaaatacatattggtatgagatttttaaaatgtctcttatgaggtttttcaacgggcacggggcaagaagactaccattgtaaaatgcaacaaatcttttatattatgatttcctcaccaaaactgtacattctagagtaagtactgataacaactgtgggatagaagttgactttagagagaaaccgtaatttgacgaaaacagtttatttgtcatcctatttggctaccggaataatagaaaaaatatttagaaacctttttgaatgtcataagtgttttattttggttttaactattaggaaacatttatttgatgtaatataagaccataaaaacaaaatttaatttgattttatatgaataaattttggtatccttcttgccccttaagatgtgatgtcaaaataacttttcttggaaaattttctccacagctgtattgaacaatcgtaaaccattagtactgtgcgaaaaaatcattatgttttgggggaaatggaagtcaaaccttattgtccagtcttccattcttataatatttcgccattttcgcgttggcgagttaaagacatttttaaaaaatttcatagtaattgttttccaacgtagtttttacacaaacatcaattagaacttaattcatactgaccctgggtgaaacattgggaaattgatttgaactatatgaaattgaagatggcactcttgccccatatcaccctagatatttgtttttagtaaaaaatatgccgcctgttagaggttaagaatacgtttgggctttgccataaaagatgcatgtaacttatctttcccaaaaaacgagaagttaactctattttaggaatctatttaatagttgctaatcagagatgtcgttattaataccgaaagattgaaggcaatcatccgattcgaaactgaattatttgcgaagaaacagtttttactgtgtttcggtttgaatttttcacaaacatattgaaatcgctattacttttttgatttttgattattgttatcgcaaatttgaaaaaaaatatttttaatagaaaatattaacttgtaagaacatttcttgtaccggctatacaaagtcagatattaagaagcttctctaaaaattatacaaaagggttgagaatctgaaaattacaacatgatgccatattttaatttttttaaattttaaatagtaaaaaatatatctgaaaaaacgatttgaatatttttgtggtaaaaatgatgctgtcggtagaggggttacacaaaaaatgccttgcaacaatctaaatgcatatatatcatgcttgacaactaggatattaattcatttcatctgggaaatcaattaaatttaaataattgttataccttgtcacatcacgcggttgaatagcacacttcaagcgtgtgctagaataagggcgtaagtaccaatcatttatttcgtgaatgaaggtgacaaaatgcatgtttaatcaaacttttccaacacaaaacggtaggcagcgatttaatctcgcagcgaatttaataatttatttcacggaattcccagaaaagagcgtgaaatatctactttttctactaaatcagttgcgtagtagtttgaaaggcaccgctcttctatcaataaagttgattttctgacatttttatcttattttttcatccatattttttaattttattgcattttgttgaaaattaatctcctaataaaataaaaataaaatttgaaaattattcaccttctctgcaagggtatggtttcctcctaacgttaggcaatttcgtggaaaaaaaattaaacatgcatgaagcttcgatgtcccaaaaaagtattaaattgtaaacataacaacattacataggttaataatcatgattaatgtatagacaatgttttaaaattgttggttggtactttgaatggggcaagcagtaaaatgtggataacatccatgatattccgtttcaaacataattgataccgtcaaacggggtaacttgcaacaattttcaacttcaaagcaatatggatgaaaaaattgagaattcagatgagacaaaaaccatctggtaccctaatcgctacgtaaagaataccacgcggtattaattttatcagtatttagttttctggaatcaggagagacgaaaaatatgcatttttaatgctacccctgatgtggggtaacatgcaacacacagtgctacctaaagtacactattaaaatgtatcctttatcgtgttattatggtcattcaataattttctacagtaaaagcatgacaattatcagaaacaggctagttttcctttagaaaactaaatattattgattgaattatgagtattgaaccaatttgattgaaaacttcgttggcattgcatagggtgtccacactggaaaattctagcatatcataagtcttgacagttattggaaagccatcaaaacgttttaatgcaacttttctacaaatacaatggtattttaggttttacttcacatacataattttttagacatatttaaatcaaagcgacgtataacatattgatatgtatgttttaaaatggtccctgttgggttttggcataacttccatcacatttcatgcagagagttcccaatgactgatctgtaagttaatttttatgcagattttctaaattattcttcattttcatgaagaaaataagactaaatctaataataatacgatttattcaaattgtccaaaaattaatacaaaaagtgtattaaattgattgaggtacaaacatttcaatgttactgtacaaatatatattcaattttgctttttcatgtgttttcgatgacaaacggcaggaaatatcaaacaattgagatcgaaattgctgttgcaagttacccca

SEQ ID NO: 1107 - DNA, 1999 bp, Aedes aegypti
gtcgtgaggtaccagattaggtcgaattttgctgcagccggttttaaacgtgcgccatgttagctctgtttgggtgacgaacgtggaacaagaagaaatcatttaaaaacagtcgaaaaataccgtcactcagccgatgctcgcgattcaaacgtttagttcagattattttaataagtgccgaaactaggattagttatgacgataagtgcattgctacattttcccgacgtgtgtcggttgtgtttgcaccataaacctgcgccggaaatggttcccctcgccagtaccgtaccggaactcgacgcccagctatcggatctgttagaggatttctgtccctcatcagcaaagcaggaggtcacatccttactaccgtctgccatgtgtgaacattgccagcaccaattgttggaggcttacaaattcaagcagagagttaaatcgcttcaagattttcaaatcgcatttctagaagcgcgccaaaacaacgaaccggaacaactcagggaacttttccgcctcaaatacgctagcttgaatttactgtttcgtgagctaaatctcatggatcatgaaagggctcttcgctgggaagatttgatatcctgtcaagaggaaaatgaagaggtaattgagccagaaaagaccgaggatctcgaaataattgatgacgaagattcagacgaccggaatccgcagattcttcatgttgaattggtggataacgtaagtagcgatgaggatacgtacaattcggagaatagcatgcacgttgaggtagaatacttggatgttgagcaaacggaggctgacgaagaaaatcctccaccagcggaagtgaaagccgagcaaaccttcaataacgaagacagtcagcttctctcccattccgaggactcgctagagtatctatcctttgatcaggaacagcaaaccgagtggaagtgtaacattgctgattgcgatcagcgatttgaagagaaagaagcgttgctcctgcataagcaagttattcatcaatgctgcgtttgcaccatttgtggaagtgtgctaaagaataagtactcgctggataatcacacccggagacatatgggaagaccgaattttgcttgcgagtattgcccttcgacgttctacacttctcaagagcacaagttacaccttagcttggtccatattgcaagtaaaacagcgaaatgtgatttatgcgggttggagttcaaaaataaaacttgtttgaagcgacacctgaagtctcactcggatgtgcgaacctatcagtgccctttctgcgaaaaggctttcaaaaccaatatgcatctgcacaggcacaaggaaacgattcatatgaaaatccgattcaaatgtactcactgtgatgcgtcgtatgggcggaaagacaagcttcgtatgcacatcgaacgggctcacaatattcaaatgtacttcctgtgcaacatttgtttgaaatcgttcgcaaccgaggagcagcgcctggagcacatgagccaccacgaaaatcccaaaccgttggaatgtggcgtctgcctgacggcctttctcacttcgaaggacttcaaaaagcatctttgcatttcctaccgaaaggattacgtgtgctgcaagcgggatttcaaattccacacgttctataataagcacatgtttctggtgcatggccagaagaccaatgctcgtgtgaagccggcgagcaaccagttgatagctaacatgcgtgcggaacggagacaagacgaacgttgtgccaagtgcgaaaaaaccttcagaaccaggaagcagaagaatgcccacaaggaattttgtcgaggtaagttgaacaaggattcaactgtagaatttattctgccaaactccttaaatgaataaatgtctccgaaagggacgcaaacatgcattaggattcaactaattagtttactaccttgtttgaagaactttttacaaaaggaattcccagtgaaccacgtatcgt

SEQ ID NO: 1108 - DNA, 6262 bp, Aedes aegypti
atgctccccatcaacgtgacttcgtccgagccaccgtgcatcagtagcagcaactcgcactcaccaacttgtagcaattcgccaaatatcgttgtctacgggggcgacgaacggggcggcaaaagccagttggatctagactttcccaagctaacgccccccaagtcgtcctttggacccaatggcaacggcaagaatagcaatggtaggactagcaacaatagtaccagtagtaactctaagagtgaatcagacaaacaagaccatcaaccagggcagagcgccaaaggcaagaatgccgaactggtagaccagaaggaactgaaacaacagaccggaccactgatgctggactgcggggatcagtcggtcaagtccggtctggccgtttcgtcgcctgccatcatccccaacaatacgtcatcatcgtcgccagtatcatcaaataataactattgtgataatgagaatcgtaatttacgcaacaagccgcggcttaaaaatatgagtggtggatcgtcatcgagtatggatggcggttcaatcggcggtagctgcggaggaggtggtggatctacgagctttctctcacgggacaactcgtgcgagcagtttaccgaccagagtggcgtaaacctgatacagttcttcaaggagacgctcaacaaaaacttcaaggaccgcaatatgttgatgaagatcgagaaggaattgctggccctggctatggatcgcacccgcagccagatcaagttcccgccaatgtcttcctacaaccggatgttgatccaccgggtggcggcgtacttcggcatggagcacaacgtggatgccacccagcagagtgtgattgccgaggtcacttcggctacgcggataccggaaatccggttcaagacgctgatcaacgagagcttctccgaggaaccacgcaagtcgatactgaagcgggacacgcacagtttcgacgagtatcggtacgggatgttgcactgtcccgatcggggcatactggacaggaaggcgaagagcttcgaggaacgggaggaggagtacgataaggtcaagaggaggatcttcaagaatcgcgaggtgcgtatttcgacatttatggtacatcgccatcgcgttcacgccgaagaacactggcagtggatgtcgactgataatcccgagccgccaaacggtcgacctaagcttcagaacaatcgcctgctaaaagtacaatcagtgtcaattgaagggcgatcggacgagcgaccgtgtgtatcgaaatcgcacagtttcggaggctacggaggctcgtcgcaaaatgcgccgcttctgcgaggcgactccatcacgtccaccaagagtgccagcggacgcctgttcaccaagcaggactccaacgctagtacaaacactccctggcgattgtccccgtccagcagtggctacaaaacccaatcgattcgatccgactcggtaaccccgtcgccaaccggatatggtagtggtgatcacactccggaaccatgtatccaatcgccctcctcgtcctgcggcgtagtttgggcggtcacagacatggcgagcgtcccgaagggaagtgtgctgattgatcctcagacgctgcagccgattgtcaatcaagatggctcgatctaccacttcgatccatcgaacctgccggccacggcgaatctcccgggcagcgttcccagggtgcagaagaagaagttcgaaaagcagaagtccttcagcagccggaacaatctcaacagtagcagctcgctcgaatgttcgatcgatcttccgctgggcaacaaaaatgactgcggtcagcagaccataaccaacgccactaccaccattgccgaggaggtcggcagtgacctgatctacgatggctctacgagtacgattaagattaccacgagggataatcatgatattgacgaaaattctagtctatgcgaggaaatctcacaaactaccaatgagcttggtacactcaagctgcagaaacaccaagctaccagtccaatgctgcaggccagcgaactgcagcccttggagctgaatgagattcagctcaacgccaaccatgagcatgaccatggtaccctttcggaagccgttacaccgttgctaaccgatcctgaaacaggcggcggcggaactctcatggtagcggtcaacagtgatactagtagtgtcaaacacgataaccaaccggagcatcaacagcatggcttggccagcgacgatgccaacgatgccaacagcgagcactcccaagaggcggacaaaaaagacgaaacgggcggcggcaagatgaacgcggtacagacagttcctttggtaagttactccaactcggcgacacccaacagtgcgtacacgatcaactacgaaaacggcggcggaactccaggcggggccgggactgccgtttacgcttccggtgctccaggattgtcgacgacatatcagacagggccggacggcactatctacgctgtaccttcaccactagtttatacatatccttcggcgatggatccggaaatgtccggatattttgttcctgtctacgaccagcagcgtgatccgaacatgtgcactgctgcgggtacaccagtctaccaagcagcggcagccgctgccggggcggcctctacagtattacccatagcgtacactccaacggcggcttacagcggtgctcctctctaccagaatccgacggcggtcatgtactcttcggagcagttcccaacttcggcgcaagcaacggccgctgccgcagctacagccggtcctcttccgcaatatccaatcgggtatccgattagcattggctatcccttcaatagtacagcttaccaaaactactggaatcaaccgatcacatattatcatcttccccaaacaccggtaccatccgcgggaagcactccgatcataatgccacctccgcagactcccacgaatagcagcatgatgtcagcgacttccatgcatggcaaacgaaacacgacaccccctaaccacggccaacagtcgcaaaatcaagggcaaagcgcatccgtaacaccggtaccgatttcgccgtttactaccaacataccgatgcaattgccggatcctagcgccggccccatgtacgcaattcctcaacctatctactctaatatgcttccatttgctggtcctatgactccgcatcctcatcatccgtctgctggtgcgggtggcggcggaacaatcgtaaactcagtacttcccactgccactgcagctgctgccatcagttaccatccacatccacattcacagtccaatcagggcaatctggactcgctaccctccagcaatgggtcggccagcaacatctactcaaacactagtcagaacaacaatgcccaaacgcctcaatccacgccaagcacgccactctcattgccgctctcgttacctccccatggcaagaatccacccctctttgccactcctcctattcttcccaatggctacaaccctcaaatgggctccgcttcgggtagcggaagtggtgctgctggtcatcaccactacaaccctagccattcgtacgaagaccgtaaaagcagtggatccagcggtggctaccagggaaagcgatcaaatcccaacagcggcaactacttcaactatagcaacaataacagcagccgccagatgactcccaacagtgttggcggcggaagtggcagcaactatcagaaccaaggcaattccggaaccaatggccccaagagctacgtaaactcgaacaatacagggaacaatcaaaattctaacaacggcggcaatggcaccggaccactcatgctaggacaacccccgaagggtcgatctgaaggccagacaaccgtgaccaagccaccactgataccaacattaccaaacaacaataataatagcactagcagtaataccaaccctagcgataagacacgcatcaaccgttcatcaaagccaccaaatctagacttaaagcgaagctacaacaattttaacgtaaacagtagaaatacgccgagcacaaactcaacggaaagtaacaactcaccaaacagtattacatcgtcatcggtgcacgagcatcaccagcagcagctgccacatccgcaccatcaccaccatccgcagtcgcatcacccattcgcccacagtagtagcggtggaagcggaggatcaaacccgtcgcaccatccgtactaccagtcgcagcagcagcaacatcaaccgcagcagcagacctactaccaccacagccagcgcggtggtagcgttggtagtaatagcggaggctccagtgctacggccggaggggcagcagctggccacgccatgccgtcgagtgccattcagtcggcggcggccgtcgctgcggctgcatgtgccgctgcggccatcgagccgtaccactcgcagctgattccactgaatgccgccgggatgtcctacgtcaaaatcgggcagacctactttacgcatccctccttggcattgcctccgagtcgcaggtcgcctccaaacgatatacgtccaattgctggagtctacccagccatgaatatggtgatgccagcatcacgacagttcacaccacgacctcagcatagcggcggatacaagggcaacaaggcgccaagataaaaagcttgctaatattccgtaactcatcaaatatggataatgaaaatctaagcaacaagtatagaatacgaatactaaaacagaaaaaaatcgcactatttaaggaacgctaatcacaatggatggattagaatcacttatagaacacaaccatagacaaagacgaaaacacacgcgtatctgtggccaagaccatttcccgtccgacaacacgtcaccaaagcggatggagaacgataagtcgttttttaaaatcggaaagccctaagaaatggtcgccgcggtaagaagaagaggaaggagggtctagcgagaacaaaaacgatcgcccgtgaagagaaaatgccatttattttattaccgataaaaattattaatatatacatatatatgattatgattaccacattacataacagtgaaagcaacactagagaaaaaataataaaaatatgataccagttaataactgatagaaacctaaaacttaaagcaacaaaaaaaatcagagtgaataaaatgacaaaacaaaacataaaaacgtaagtaaacgctctaccagtgattcaatcaacgctatgcgaattatttctaaaataatttttaaacgcgggatgaagacgaaaagaagacaacgcgaaaagcaaaatagcacaaaaactcctgaaacagtgatcaacaaacaaaaaaacagaaagtaagtaaaagcaagaagcgaggattgttgaataggtggataagatgtgttcagaaaagagcggagaaagcgctggaagtaaaactgccgcccacactactctttttaaaattatcaaactgctcgcagaaactgttgagcgcccaggactgcgacatcctagtttgccaacatgccgaaacggtcacgaagaaacggaatgagccaagccagaatcagtagctagtgaatcgcacacacacactcacagaggcggaacttgtatcgtaaactatcaaactaattacaaaatattacttatataaaataccatttcattagagcatgacacagaacccaaaatcaagccgtttacagaaaaatttatatgaaaatttatttatataacaaatgcaagcaagagtgcgacgcataaatataacagaacatagtagcgaaaaactaacgattatttatccataaaaccaactgaaatgtgctgaaacaaaaaaaacaacatcgtagtgtagtagagaagacagaaaagcgaaaccatgagaaaatatacgttaaattgttaaaacaactcggcggcggcgcatcttatagtgagggatacggatgatatttcaagcattttaaaagaacgcatagaactacataccaagcggctaagacaaacgaattaatccacacatttcttcctttttatcggtgatatttgcctagtggtgagcaaaaaaaaatactagagtaaaacaaataaggacactattgagagcgagacgggcgggtaagtgggaagtcgaaaaatttgaactagttgaacgttatgtttcgtgcgttgtagattgatgaaatgataaaagctggcgctaccaaagcaatgctgtgttg

SEQ ID NO: 1109 - DNA, 477 bp, Aedes aegypti
atgacggacttcaactcctggcccagctctcggaaggagaacggcgagcagcgattgactctgggagcgatggggctgccaccggcggacgttgtcgttggagagggcacctggagttcattgtcggaagtctttttcgatcccatgccggcggctgctagcgattggaggattcgatcgcagaaactagcattctcctgcttcggcacgagtccaagcgacttcgatgagccgggttcgggttcgcttttctcgaagggactcttgtcacgtggttcgtcggttttggtaaaaggagttgggtggggattcgctttggtggtgggagattggatgggactgacttcaaagccaatcttgagccgttgttcactgggctttgctatcacaatggcgcattcactgtcgggaacagcatccagtattggtttggcatttccatcgggcctccgagagagattcagtttcatcaaatga

SEQ ID NO: 1110 - DNA, 5171 bp, Aedes aegypti
cccttagcagtcgatattcgagctaaagagatgtaagtcgggtgatattgtcttgtttatgggcgccttaatttgctcattccgtctccgagtgtgtgctgcactcacttctaccagacatcaaccgtgtggataactgacaagcatgcggaggacgagacgagatcgattgtttgtaatttatgatacagttcggctattccaggaatggagaactcgaattcgttgctccggagagagagagagtgagaatcagcgtatagttttaacgagggattaggacttccagtgagatctcgatggattgattgtccacaattggtatagagctcgtgtctattgtttgaccaatccattgcttcgcatgcagtcacgagttgaacaggagcaaccgtttttgtgtattactttgttgtagtcagaaacgtgccattttattgtttataccaattatttatcaaccaattatattttaaaactgtgaatctttttagttttacatttcaattattataagtcagtgttggttgatttcgcctgaaattattaaacatccgccacgattgttaaacgttaccattcacctaacgtacaaaagatttgaccatcatgagcaacagcaactacttcaaccaatccctcaggacagtaccagatttggtagctaatctggcagcggagaatgcaaagcttcattactctcggcacaatggtcccgggggtggaaatgccaagtattacaaaaactaccagtccccgtacgttccccagatgcacggcaacttcaaccagaggcagcgcttcgccccctatccaaatcggcacccgccacaatgcgccaatcagagcaaccatttgattgcgccttcagctaatgtcaacttcgccaacagcatcggtggaggggccgccaataaatctctgaactcgtcactgaacagcagcggttcagattccggcaagaacaccactttctacagcaccaacagctccggaagctcaagcaacataagccagtgcagcagtagcagtactgggagcagtagcggagctggcagtgcatacaactattcctacggtggagccatgcagtctaccgcggaccagaaggaaatggttgttctgcagatcagcaatctggacccctcgattgaagaacacaagatgcaccaatatctgctgtgccagctgaaatcgattacgcccgttctttcgttgaccattgagagcccttcgctggcgaaggttaaggttccttcaacacagtttgccaaactggtcgttgcaaatctgcatcgcaaaaagattggccacaaacgtatggtagtgtcctacataaaggatccatcgtcggccgagtcttcggcactgcgttgccaagttgccggtctcctgaaggacgtcccatactacagtctgccgatcaacaagttccgcgagctgttccagtcccggttcaagtcttcgatcagtgtcctagatctctaccgcatgccggacgtatgcaccatcaccctggacaagaacgaagagaagtacatcagccttcagtcggatgtgatcaactcgttgcagaacaatccgctggtcgaatcgtctcagcacagtgttccgtattgtatctatcacttcaaacaggagaaggagaagggctgggccgaacaggagatcgaacctctgccgaacgtgatgatgagtatcagtcagctgcagtcggtgatctattctttgctgaagactcacaaggatgacattccggtggccagcatactgtactgtatcgaaaacgaactgcagattaaagttgttccgaacgagaatggtgtcccgttggaacatttgctgtgtagcatccggggagtgcagattacaaacaataactttggtatcaaagtgctcacctggttggatcacgagctcaattcaactaaggataatgatgatgcctcctcggtcaacctacgctacatgcccaaaagccccaacaacgacttcctgcagcagatttcccgcgaagttgtcgagctgataaagatgtcaccgaaatcgacgatgaaattcacacgattcatcccggcctatcacaatcactttgggaaacaatgtcgcgtcgccgattatggttacacccggctgatagagctattcgaggcgctttcaccggtcgttcaagtgatgggtgatggcgagaatcgacacatcacgctgactcatcgcacccagatccgtcgatttacttgtgacttgctgaaaattttacgcggccaggcgaataaatccattctgctctcacagctgccaatcatcttctcgcaggcccagaataggatctttgacgtaacggattacggcgtgtgtgatattttcgacatcattgacgggctggtgtacaacaattcgatcgtaacaaaggtgtacaacgagacggatgtgttgatctctatggtcaaacggaagcagtctccaagcgaggtggagaaaacatgcatttttgcgggggaggtcgtggagctgtttaagaatgcgccacagtactcgatactgttcaaaaagtttgtccgctcgtatcactatcattttgggtatcagtgccgcttgagtgattatggtttgatgaaactggctgacctgctggaagctatttctggaattgttgagatggagcaatcaaacgacgaggaccgtaaaattttcctgaaccatagagtggccattcggatttttgctgaacaagtgcaggacatcgtgaagcacttcacgggcaatagctcatccatgattttgatgagcgaaatacttaatttccacaaaaataagtacggatatcaaattcaaccgtatagccttggttacagcaatatgttcgatgccatcaaagcgctgccctacatggaaatattcgagtcaggaaatgattttattgtggtgtcccgtttggaagacccttcctttcgactgcggtcatatgcggtttgcctttgccttttggaatccaacaaggaacgtatgcctattagtgattttctacgcagttacctgaccaagttcaaagaaaatttaactgagaggcaaatgtacgacatgaaacatgccatagcgatcgaacaagataaaggaaaccaaactgtgacgatgacaccgctgatgaaatttattttccgcatcatacaggtgctcaagcaaaaaactccgatgaatgtgttcgacttgaagcaggctcttagtttatcaatttcgtcctgtttcgagttcggctacccgaacatttcttcgctcatcggcgcttttccggatatttttatcaccagcagctatttccatgagcgcgcagacatcgagctaaaccgtgactgcattttgagcaaggcttgtttcaataccgaggaaaatgctactcctgcagccctttcgacgaccaccaataatgccaacacaagtcccgtgaaggcaaaagtgcttgctgacgataataaattttcccacgcgtcaatgacaaatgattttagaaatttgttctacagtcgccaagaagccattgttcggcatcatttattgcaacgccagcagcagcaacaacaacagcaacagcaacagcaacagcaacagcaacaatatcagcagcagctccaaaagccactccaaccgctgcagcagtcccaacagataaaccaacaattgccagcccccttctatccgaataaccgtttcaacaacccaatgttgaatagcaactatggactggctggttttacctcgtcggctacggcggccttatcgtcctcagcaacgaccatgaccaccgaaatgatggccactcataatcagagcatgattatgaaaacccagaacaaggaaaacctttaccatggctacggtggaatggcgcttcagcagcagcagattcagcagatgctacaacagcgtcaactgcaacaacaccaccagctcctagcctcccaaaccaagtaccaagcttcgttcgggctgagcatgggttcatctggtggaaatggagctgctacggtgaccgcaaatctttccacagttggacagaatacggaatcgtcttcgggtggcagtatactgtcgtcggcaatcagtactaccagtgctgccagcagtgcctcgcagggctccacaaacaaaatattcgaacgcagacaacagaagactacatcattagatttacaatatctcaattgtaacaattttggatacggacttttgtcggagttctacgagccaccgaaaccggacacgccaccttcgaggaacatcccatattggattgacccgatctggtccaacgaaccgctcagcaccgaaaaagagccatcagcatcttcgaccgagcagcttctcaacattccgctaccggagctgaagacgtacaacaagctgcccatcatactgaccccgtatgtcctgtcgtcactgtcaaagaatccgtccttttccttcgatctcgataaatctaaacagatttaaacccccttacggatgaaggccctgatggaagtgtgcgctcacgaaaaggaaaaaggacctgctggcggcagtcagaggatatcgaatcccctcgaaagagagaaagagaaagattctgctttcgcttctttatcacttaattatcgttacattttatgacacgttgaacgtttcgtcacccttaaccgtgtagtacttacgagttgtcgtcaatttatgattcgttagattgtatatccttctcgattcctaggatgagtgtttattaaatggtaccattgatgttatagatagataagcgatatttcaattgaatcggggaattatggaagcccgggcttttgaaatttaaggtttttgagattatttttatcgaacttttcttatgatcattattatagagtggagtatgtgaacccagttagttagttagttaaggaagcacaaatgttgattattctatgtatgaagagcaaaaaatggacgttttagttattgatgtttgtgcatgctcggcaaaattatacagaatgattacgttttttaggcagcgagaagacaatttagtgtatgtttctgtgtgggagtattgccagtaaaggcttccattattgtgcccattagtttcttatgaattgtatacatttcaaagaatcggattatatgtgcatgcgattatccaa

SEQ ID NO: 1111 - DNA, 858 bp, Aedes aegypti
caaactttcatataaattggacgctgacgctaattacggcattcagtactcagtggtcaataattcgaacaaccttatccaagttaagtagtcaggatgttcaagttcctcattcttttcgctcttgtgcctgcgatggcctttgctgcggtcaacttccgagtatgttccaacaaagctccaacgccaaccaccttgactgtgaacgactgctccggtgacaattgcgttctggttgccaaaaaaccgctgtacgctctggccagtgggattgtcagcagtgttaacagcaagacggccaccacccgaatcgttgcccgtttccttggtatggacctcggtttcaggacccctccggagctgaccaatgcttgcaatggaggaatactgggtggctgtccgatcgttgccggaagagccttcaactacgttcttgttgacgattcactggaggttccggcggtcaatatgccggtcgaaatcgaagtcagtctgaccggtgacggtggcgtagctttgggttgcgttcgtttcaatgccagaatcgcgaaaagataatgcgatttcgagtgatgttttgtgttggggatggttttaaaacttgttctaacaaatgagaaattttggtaccaaagttttgaataaggattttattcaagtaaattatttattttatgtaaaatattttagcgattcacttgttatttttttgcaaataaatatatttaacaaaaaaaatgtgttctgagtgaaattggcaatattattatagaagcatgtcaaacttgtttgaagcaccgcgtgacaaattgaacatttttttcttcaagatattttacctatgcattgataagtgaa

SEQ ID NO: 1112 - DNA, 3401 bp, Aedes aegypti
tgttggttcgcgtgtgaatttctgcattatagaatcgttccggatagtcgccgcgttgcatacgtgtgaccttctagggccaaacgtcgtagttccccgcggatatcccgtcgagtgccgagtttcgtcgcgattcgtttttcgtggtctgttgcgtgcggcgtggaaaagtgattgcgttgcgtttctgtctgctctcctcccggctcctgcaatccgcacagcatcaggtttagcgtattatcccatccatcccggtgtttttcggtggatttgaattccgtgaacggtaccggcctgcgtccgccagtcagtgtcttcaagctgagttccctcggaagcaataattgtcgttggtgccggaggtgttcccaggttgcgagtcgtccgagaccgagtaacaagcgatgggtaaggcgaagaaaggcaagaaggattccgccgccgtggccgctgctggcgaggataactccgacgtcgaggtgaagcaaaccgaactgaccgagacggaagtggagaagaacagcaagaacgataagaagaagaaggagaaaaagtccaagaagattgaaagcgatggcgaaggcgacgaggacctagaagaggtcaccgacgcagtcaaaaagcttaccgttggtgggaaacaggagaaaaagaaagctccgaaaaagtcgactaccaaggaagatgacgatgaagacggtgctgaagaagaggaagagtttgacactaaaaagtccaagggtaagaagaagggcaaggccgccgctggaggcccggttgggttctctcttttgatggctgaggacgatgatgatgatgaggaggaagtccaggaagccattcgggacgatgatgacgaagatgaaggtcccaaaaagggaaagcccaaagctggcaagaagcaacaggccaaagatgtagaagaagagccccagcaaaaagccggcaaaaaaggaaagaaggccaagaagaagaagggcggcgacagtgacgacgaggacattgaaaaaatgcttgctgagctagaaatggaatacgctggtgtaaaaccttctcctagtgaagagcctgccgtccaagagcccaaggaagttgagaagaaaaaagataaaaaagataagaaaaagaaggaagaagctcctcctgctgaagatgcggaacagaccgaagaaaaggccgatggagaaattcacattaaaacggcggctgaaaagcgcaaggagaagaaggaacgccagaaaacagaggcccaagctgccaagcaacaggaaaaagaagctgaagcctctaaacctgagccgaagaaggagtcaaaggagtccactcctgcgccggaaaaggaggactctgctgctcctgccgccggtgaaggaaaaaagaagaaaaagaagggcaaaaaagaggaaggagccgaaattgttgctgatgagaaaccagctgaagcacctgctaagccggctgatggcgccaaagctggcgacgcggccaaagagggcgataagaaaaagaagggtcctaataaggccgccatcgctttgatgcaggaacgtttgaaagccattcgcgaagaggaagaacgtctgaagcgcgaagaggaggagaagcagcgcttagcagaggaagcagaacgttatcatcaagaacaacttcgcttagagcaggagaaaaaagagcgcaaaaagcagaaggaaaaggaacgtaaagaacgattgaaggcagaaggaaaactcctcaccgctaaacaaaagcaagatcgtatgcgagctcaggctatgttagaagcattgaaggcacaaggtgtagaaattccggaagtaggtacagagaaaaaggtgcgtccaggaactcgtcttcgtcccaaaaagaaggatgatgccaacaaggaagaagaaaacaaagaatctagtccaacagaggaagaactaaaagctgaggcactgaaggcagaagaagcaaaggatgaagtgaaagactcttgggacgcatctgatagcgaagaagaatccgaagagaaggaacctgagaaacctgctgtgaaagaggaagcgaaatctgctccaacagctaagcaagtaaaaaaacaggaatcggttgaggaagatgacgaaagcgagtctgaagatgaagactctgaggaagaatcagaaactgaaagtgattcggaagaggacgctcgtccggaggctgaaaagatgcgccaacgagcaatggaacgtatagccaaaagaacgcaggaagctgaaaagaagaaatctttggatgtccttcgagcagctgtcgtttgtgtgcttggccacgtagataccggtaaaacgaaaattttggacaaacttcgtcgtacgaatgttcaagatggtgaagctggtggtattacacaacaaattggtgccaccaacgttccgatcgagaacatcaaagagcagactaaatttgtcaaaggttataacgatactacgttcaaacttcccggtttgttaatcatagacacacctggtcacgaatctttcagtaatcttcgtaatcgtggatcctccctgtgcgacattgcaattctcgtagtcgatattatgcatggtctggaaccgcaaaccattgagtccattaatcttttgaaagcaaagcgaacaccttttgttgtagcgcttaacaagatcgatcgtctgtacgattggaatactatgaaccgcaaggacgttcgtgacattatcaagggtcaagcttccaacactcaactggagttccagcagcgcacaaaggccgttattgttcaatttgccgaacagggcctgaatgctgcgctgtattatgaaaatccggatcctaagacttacatctcgttgattcctaccagtgccatcaccggagaaggcatgggtaatctcctcttcctgattgtacaatcatgccagaagcagctagccaagcgtttgatgttcagtgaagacctccaagcaacggtgctcgaagttaaggcaatccctggtctcggaacgacaatcgatgctattctgatcaacggaaagcttcgggaaggtgaaactatgattctggctggtacagagggacctatcgtgacccaaattaaggccctgttgatgccacagcccatgaaggaacttcgtgtgaagaatgcgtatatcgagcataaggaagtggtggcggctcaaggtgtgaagattgccgccaaggagttagaaaaagcaattgctggtctgaaccttcagatagcacataaaccggatgaagtggaaattttcaaggatatcgtggctcgggatctgaaatcggtgttgagcagcatcaagctgagcgaacgtggagtgtacgtccaagcttcaacgctgggctctctggaagcgctgttggaattcctgaggacatctaaaattccggtaagt

SEQ ID NO: 1113 - DNA, 2564 bp, Aedes aegypti
atgatgctgctcggctgtgccagccttggagtggtttcatcggtgctagtaataatcggactgaggatggataaacggactttactgctgccatggatcgttgtgatgattgccgacttgctggtagagtgcgcccatttcatctatctcattgtgatacagacgttgcagttcgaaccagtaacggcgatgctgttcacaattgatttcttcattatgtgtcttaatatttattgcctgctatgtgtgatatcgcaataccaggagtacaaagccggtcggggagctgcggaggaagattcctacaccagcaccgtgcacatccagtacagtccaccggtagccacttgtctaccccccgggaaatcaatacttagcccgatgatgtgtccccacaccaactgcacgctgataccggaagaaacccaaatcaacggagcgctgctaggaagtacaccaattaagtctcctccggcgttcagcagacagaactcgctgttgctgaaaaagcacgtcaaattcaatcctaccgagaaggcgaaagtctgctgtagtggcgtcatacatccggaaaatgtgctaaccaaggagggcaccaaacctaacgggcacataatgcaaatagaagcgcttcctgttcacttcccagcggacgtatgccacagtccggagtgccttcgtgcagccgccgccctgcagcagagcatggaccgccgagtcgacccgtgcgaagatttctacgcgtacacctgcggtaactgggccgacgatcatccccggccggaaacctacaccagctacgattggttcagcgagcggcaggcccgtatcctgcggaacatccgccagtatctgcagcgaaacgatagcttcgacgatccgaaaccggtcatgcaggcccgggccatgtaccggggatgcatgaatctgacggcgatggactcgttggggtacgatccgttgttcaaactgctgggtgagtacttcctgccgaactacccgactttgctgaacctcacgcaggtggactacgagagctacgacttcgattggatccgctcgttggccaaggtgaagcaaatactcgggatggatatcatgatcgggttcgacgtgttccccgatcctaaaaaccgggactcaaaccgattggtgctgggtactccggaacagggatcggatttgccattcaacgacaacatcttgaagcacatgtcccgggccaagcacaaagtcatagtaagcgaggacgaggaagactacgtagatgatgaagtggaggacacccagcacatgaaagcctacaagaacttcatgattggagccatgaagattctagtgaacaacacggattccaaagcagagatagaaccgtcggcggacaacttccaaaaagcggccgacatctacatcaaaatgtccaaggctctcatgaagatggagaagcaagcagagaatgcttccaaaaccaacaatacggaggatcgactcaacctgcaggacactctctacgtcagcgtacacgagctgcagaacatgaccgatcagcacatcttcccgaaggacccgttccccgtttgggaacggtacctgaatgaagtcttcgaaggcatacccgaggcacagcttgatctgagtcgggatcagatcctcactagcaacgcagatattctctatttgcgtttgctatcagactacctctcgcaaactcctctggttcacatcgagctgttcatctggtggacggtggtcgaagagctcattcttcacacaacggccgagatccgccggctgcactacgagtactacaagacgatgatcgtgacggaaggatacactccacgatcgctgtattgcaccggagccgtgaacaagctgatgggtatggcggtgagttacgccattgcggatcagaacttcctcacggatacgaagcccaaggtgaagcaaatgttgaacaatatccgtaaggctttcgaacgactggtcagagacaccacctggatggattggaagacgaagagctcaacgctggagaagtcacaggcgatgcggagcttgatcgggtttccggagtggatcttcgatcagggcaaactagagcttctgtacgatgcgatcaacttgagcgacacgcaacacctggacaacatggttcaactgatccagcttcgaaacgttaaattcctgcgtcgctggaggatgaagaacgtcctaagctgggacacccatccgaccaacgtaaacgcattccacgcctttcaggacaacgcaatcacgattccgattgccatcctgcagtatccgttctaccatctgggtctagaggcgctgaactacggagcgatcggaacggtgttgggacacgagttgacccacgggtttgacgatagtggtcggcagtttgacaaggatggtaacctaaaacagtggtggaccaacagtacggtacgggagtacgtcaaccggacggcatgttttgtccagcagtacaacggatacttcattgaagaagctgaagactacgtaagtaattttgttgtgctctttcaaaatgctctaaa

SEQ ID NO: 1114 - DNA, 2364 bp, Aedes aegypti
atggaaacgctgtcggaacaatcgtcatccaccacggtggcggtttcggtgcaacaacagcagggcatcctactggacgaccggctggaccagatgacgcacgattactacgacccgatgctgaaccggtacgacaccggtccgggggccgatctggacgacacccagcagccgggagcgttggccgcatcggcggcagcagcagcggcggccagcaagtcgagcgatttcgcccacagtgacactccggctgcggtccggattcggctgaaaaacacccgggacctgacggaggatggcctgcgggagctgtgccgcgtgtacggaaccgtaatcaacgtgcacaagcccaaacaggacgcgagcaccgcgtttgtggagtttgccaatcaaagcgaagcgggattggccattcaggagctgaaccgcaaactcggattccagttctatccggcattcgcccacgagaagaaaaccctaccgccgagggacatgaacttgcctgcgccgccgccaccgttcgaatccgccgccgaagtgcagctgatccagacgattgaagccagcggcgacgaggaaagctgggaaatgacgctggcaccgcgccggatcaagaccggattctcgattccgctgaaggtgcgctttccggagcagggcacgttggccacggctccgttctatgcgagcagaagttcgcccctgtcgcggatcgatgccaatcagatcttcagcatcgtgactgcgctggacaatgagcaccgtgggacgaagcctctattcgacaccaacgttgaggaccggattgagatcctatataagcgcgaaggtgtgaactgcgtggaacccaaaggccaaatcaacgggaaatccacattcggtttcagtggtctgcccgcggatcagagtgccatgtttccggattccttctgcacgcagtgtggccagcggggattcttcagctgtagtctctgtgggacccagtactgctcgaagcactgccagcacgtggattacgagcgccacaaaggccactgtcagcccaaaacgagcgaaaccgagtccagtcggtgttctacgccggggaccaagaaaggtggattccaagacctggacgaagcctgtctggtgcaggaagactttccgaagggttcgcacgttgtgattttgtcggtgctgagcccggaacgggtcttcgtacgatcgttggacaaggaaagcaacaaggagtacctccaaacgctgagcgacattgccaaggccgggttgtcggcgggtaagctgaccactctgccagaaccgggcgacatatgcctcgctctttatgaaccgttgaagatctacggccgcgtgctgatcgtcaaagtcacccggaaggaagctctctgcgtgtttatcgagtttggtctgatcaacgtagttcccatcggcgaacttcgtctgctgaccgacaccgacctcaaactacgcaaggtccgaatccacaaggtacatctcaagggcatcaccgaagagtacggccacatcgaaaaggccatggcctatctgaacaccctcatcgataaaccgctggaaatgaaggtccaactcgaagtgggcaacctcgtagacggtgaactgcgaaccgcagccggaatcagcgtcaacaagaaaatcaacgatctcataaccattcccatctgcaaatcgtcggacaatccggattcgtttgtcgactacaaaaccgtaccgcataagacccttcctccgaaccaaaaccttgacgtgatgattctcaaccggaccaccatcaagctggacttccgggtttcgctcatcgcctacgaggacctcccgtacctggaggaccttcagcgtaaactgcaaagctacggcaagaaggtgaaccgcttcatcgaacactacacgccgcgactgaacgaactgtgcctggtccggaacatggacacctggtatcgggccgtttgtctggagtccgtgggcgatggacgtcccactgtctacctgtgcgactacggctgtcttctgatggcccgactagacgacattcggaaaattccacccaccctagcgacggaagtccgaaccacggatgcgcgcgttttcggcgtggaggaagcggaaaaggccggtgttaagatcgattcggagttcctggatatctacctggaggagaacgagcgcatggcggtccagaccagtgaggaggtggagttcaaggagttcgaatttgccctgtccaaggaagaaacatcgatgctgacggtgatccgggtgccggatttgatcagcttcatcgaggaccgagcgcactgcggtgagtctttgccatctgaggttccttccaccagattcgggaaatag

SEQ ID NO: 1115 - DNA, 1278 bp, Aedes aegypti
atgtccctgaacacgatcacgatcgcgctggacaacaagctgcgctcgttgcgcaactcctccatcgactccgaccgggacgtggtggacacaacgctggaaagcgactgcgacaacagcagcagctgctacagtgccggcggtcccctgggggccaattcgactcccacgcgccgctcggtgcaccactcgcgccccctcaccctgggcgagaacattccatacgcggacgaatcgccggaacggccgctgatccagacccggtcgaaaccgctgcggcagcataacagcagtaataataacggaaactttccgaaggctacggtggacagctcgagcaacagcaatctgatcaacaacaacagcagtggcaacggcaacgcggacgattcggtgaaatcggcccaatcccagaagtccatcgacagcggcgggacgaccacgaactccaacgacagctgcgtcacgctggtcaacgaggacgacgacgaagacgacaaggtgaacaacatctcgctgagctcggacgatacggacacgtccacgacgagtaatccacgggagaagctgacctccacctaccggatcgataccgaagtgctgaagaagatgaaccgcattctgaccaatctggagcggaaggccaacaacctggagcggaagttcaacctgaaccggtcgctgtcgctgaactacaaaaaccacaagaatctggagtgctgctgtgggcatgcggtaccgacggctgctaccggagccgtgattccctgctgccacaacaacaacaacaacctgcacggccaccagaaccagaacagcatcccgagcgtggtcagcatgaacaacagcctgaatctgcggtcgcggctcatgctgaccaaggacgagaagacggacaagaacatcaaccggcggcggcagattcacgacatcagtcagacggtgccggcgtcggggacggaggccggggcgtgttgtggcgccggtccgcagattatcctgacgccgactacggcggcggtcaatccttcggcaccgagtggccgaacgcggcggcagatgggtaatcggtccattcggaggagacacacggtcgggggaacacacgattactactcgacggggacggcgacggggaataagcatagcgggacgggacacaacgggtgtccgcagcagcaacagcttcaacaaggtggaaccagagtgataggggcttgcggggccggagcggtgccgcagcagggggttcgcgggggcgatgagaaggaggtgtga

SEQ ID NO: 1116 - DNA, 1654 bp, Aedes aegypti
gacgacgacgtcagtaacacctcgctcacgtccactcatcaaagttggccgtacggcgaaaattgtgcataagcaagtgcaatgcgcacagtgaacttggatggatttgatcctcacggcaccgatcatcgaggactactaccagtgggatggcgcctacggtagtccgcggcactttgtcgacgctgggcaccagcagcgtcgcatccagcgcgagatgggccggattgtggttggcccggtccagaagaccatcgactacatcaacaacctgggaggtcagcaggcggaaccgcaacgggtggccgccctaaccagcgtgcaatcgacgagcaatgacgaattttctccggtcctctcggcgaagtcccaccccggaagactccgcagcagagctccgttagccgtgttgactccggcggccgtatccagcggcaatcaatcccacagcgggaaggaaagttccgataaggaaaccggttcgcccaagtccaagacctggaagggcatcgtggctcggcagttccggaagatgcaaggccaacccggatcgccgggtgcccaaaacgcggagatgctcctaccggacggagcatccatcaacgttccccttcaactctgtccaccgtctgacgagaatccctacgtaccccttctactggccaagtgcaccaacattgtcgaatccagaggtctcggcgtgatcggaatctaccggataccgggcaacaccgcagccatatcccaactgaccgaacaggtcaaccgcggtatggacgaagtgaccctccgcgatcccaagtgggacgacgtcaacgtcgtttcgtccctcctcaagtccttcatccggaacctgccggaaccgttgctcccgaacgagatgtaccatagctttatcaacgccgacaagctgaccggccagcaaagactgatcgagctccggcagctgctccaccggatcccggcgtacaactacgaaacgctgaagcacctgatgcgccacctgaacatcgtgtccacaaatgcgcaggtcaacctgatggatccgcgcaacctggccatcgtgttcgggccttcggtggtgcggtccgccaacgagtcgctcgagacggccgtcaaggacatgaaacaccagtgccagatcgtcgaggtgctcatcaatcattattcctacttcttcgaagacgatctattgccgagtgtggtggagaaaccgtcgacgaccaccgtcgattgcggcttggacgtgccgtcagcgtcgcttttgctggataatgtttctaaaattgaacccttcaaagaatcatccaaggagagtagctcccactttgtggctcagatcgtgcaggcggccaatagaaagattcgaagaacggcacaacgaaagagcaccatgtcctcgacgacgccggacaccctctcactggacagtacaacggtaagttctctcaatctcccaaagttcagaatcttactaaaacttctctccaaaccaacagtcagcggaatcgaaggaacagtcatcccgatcgtcgtcccagcaacaccaccaccatcaccgatacctacatccgagcagtgccggaccggttcccgttgcggaccacaaccagtcgccgccggatccggcggccagtcccggagtacactctga

SEQ ID NO: 1117 - DNA, 1302 bp, Aedes aegypti
caattacatttgtaactacagtaacctgaaacaagtgatacctattgttataatacgtgcagctaagaactgaaaaaatgccagttttgttcaacaacgatacaacgtaatcgacattttgttaaatatgtgatatgaatattaagtgatttcagttatgtaaattataattgtgatccaaatacgagcattatgagtggtttctctatatgttacaatggattaagttgtaccactttcgtggtgtttagacgtattacatgattttttgaacataactgtagtacggctagaactccacggatgttggcaatatagtcatcgagttaaacccataaatttatggcgccacacaattcattacatccagacacccacaatgacccatcatctaccgagagcgattcaaattccaaccagtctaaaaagatcaaatatgacgatagctaccagaatatgatgtttcgggcaggcttcaccaatatgcacaatgaatacatttacaacaagaatagaacacacgccctcatgatgcgaaacgatcggtactcaatgacttcaacaacatcatcgataatttcttcattggatgggaaccgttcaactccatcgccagattttgcaatgagcatgggtcaagtttcgtcgccgctattcaatggtttcatgcaaagcccaggagaaccatcccaatcaatatatgatcaatcacgtgttaggtcgcctgctacttttaataatccccaagagcataactatgccgtggattcgccccatgcattgcatactccggaaccaattatacgaccagctcgtgctcgggtcacatccgactcgggcaattcatccataccggaagtggatgatatcaacccactgtgcatgaatgattttttccgtgatgctgtaaatccagaacttgcggaaaagctgaacagtgcgctgacaaccattgaggccaaatctgctcaacacaaggaacgatatctggaaatgcgaatgtgtgaactgccaacggatttggaaataatctcctcgttgcgtttggacactacttcagttcgcttgttggtggatgctggagaaaaggctttcagccgtcgtagaacacgtagaccttcggcttccttaagaaattgaattaaatgattaacattgatgatctagaaataagtgcttgctggtaagatctaataaggtttatgtgtgattcgtttaccataaagcacattacattacactttatctgtatcgacgatatgctttggatgaaatctaaccgtgcctcttttcttgttttag

SEQ ID NO: 1118 - DNA, 2574 bp, Aedes aegypti
gtaaaatgcgacaaacccacttacgtcccacactcggtaaaattgttgacagctgtctgatgtcgttcccctcgacgatatcgcttatacagaaaaggcagaaaagcaacaaaagaaaattgcatcaaaattattgtattttaaaagtttacagtactgaaatttgtttatcagttttattgaaaagttcgcagtttaaccttcgttagaagtactaatttgtgaggtgaaaaactatgcgaataatagtacaaatcgttagctgattggtcgacagccgaagacttcaactcgcattgttccatatttcgggaaaatatgagaaaatgttcgaccgaccgagatgtcgtgattggagtccactatcgactcaacaactccgcctgcgaagtttgatacaaatctccgggcacaacatcgtttgtgaccatcccaaatgtaccgtatattttactctacatacgactacaatgtcggccccattctacaccagcgaaaaactagatatccataataacattatatggccggagataaactgtccgatgacggtaaagtcttcgttgcgctgcgtttgtgtccgagtgtggcaacataacacccaaagccaggatgaggccagtagtccggagagtgaggacaaacttctgtttctctggggaatttatttctctggattagttccgttggcgcgacgaagcgagaagcgactcaaagagaataccttagtttttcaaatgcatggtggctattttacgtcggctgagtacattttggatggtgaagaacagaaccgctcaacgacggttcctacagctaaaacaccaacagccgtcaccgatagcacccatttaggcttacttcccaataacaacaatgatccgctctgtgataatagcagtagttctcctagttggtattctcctagtagtgcattaaacatggaatgtaaaatgtccaaaattggcagtggcatatcctcatcgtcctttggacctcagttgcgctccaactctccagacgaacaatcgcttttcatgattaggacaactgtaagcccaacaccaactgaagttgagacaaacttaaaaattcgataccttctaatggaattcttcaaatccgaagttagaccaagctacaacatccaacggctactcgcagtacaagaacgacaacgcaggatacgatacgaaagcgagagtgcaaaagatttgaccgatcgtatctgcatgaaaagtgcgtattgtctcaacttggaactattttccgataagcagttggtttaccgctcctccatcagcacccaccaaaatcgaagtggcatgggcaagcagttaagccgtttgctctaccaggaaaaggaacccctaaagccagagatacttcttaaagcgcaagaactacgtcggcaaatcgagcgggctcgatttcggtgccgaattttaacacaggaaaaagaacgcatacggggtaacattcgacagctgcagcaaaagttgacccaaatgatcgacaacaacatcgaaaccgaatcgactctgatggaaaactacaggaattatggcaaggaaaaggagattttgtaccagcagaagctcgcctatgccaacgaaaaggagtgctatcgcgatctaagggacaaggtgttgattgcacgacatcggctattgagagggctgaacgaaatctactgtataaagaagaacaacaatggaacgtgtacaattaacgatatcgctctaccaaatgccgagtcgtatacggacgcaactccagcgctggcgctaagtgttgccttgggctatgttgcacatgctgtgatgatgtgttcttcaatactgaatattccactaagaaatcccatcaaatacgaaggatctcgatcgaagatgatcgactgcattaaacttctgccaacgactgaccgagagttcccactctatagtcggtcgggccccccaaccaacgctttgctgtacgctgtgttcctcctcaaccagaacatttcccagttgaagtactacctatgcttaagtcgtggagatccacgtgcaacgttggcaaacctgtacgacattcttaatgttccatcgatcaacgtgttgagccgcagcatcgaggaaccctttcaagctgtccaaacgaacatattcggctcatcatcggtagacctggacgtgccggatgctttcaaccagctgtcggtcactgatttgaaagaaaccaaatctttatctaggatatcccgatctgtcgatacgtacagcaattcaagtcgagacgatgaaaaaaggaacggcaaattcgcttcggatcccattttagcccagggacaactgcaagtgactggtttcgaaaggaagaaaaatatttaaatcggctgctccggggttggtaaaatatagtttgacgagtttgaattcaattttctgtgtatatcacgtaggaaaacgttggcgaatttatttatcggacttatttattgaaaattgtgcattcaaaatcctctgttaaatatgtagacgtgttagctctagtgggacatttgaatataagtagttcgaacaataa

SEQ ID NO: 1119 - DNA, 647 bp, Aedes aegypti
cgttcggatttcgtcgcgaaaactccggaatttttatttgaaacggtgaaaagtagtgtttttatatcttacgaatgtaatagttgttcgtaatcgatgcaattgtagtatggtgaaatcaaaatgtgaaaaaaatccaagcggaacaaatcctcccgcaaatttgcaatgtttcgaagtgtccgccaaagaagattcctatacgataggtgcttgggatgaacatcgtcgaccagcgattcctaatgccaatggtcggaatccggaaagaggatcgccgaagcaatcgttcacaacaatagaagttcgttcccggtggtctccctattgatgtttggaaagaggatccgtttttcctccggattagccaatagaaccacaactcctgcatccaccaacctacacggcacgtaaacaatgtaccaggtcagccgcaaggtacactgcaacggagtggagcataaaacgcgggacagctcgatttattattggatcggcgactacggtgaaacgggtcgagctctgtgaactattctactggttgcgaagggaaccttaacacatccgtgattgccttcagaataaataaaaatatgtaattaataaatgctttatttataatgcaataaaaaagtaattgatgattg

SEQ ID NO: 1120 - DNA, 1413 bp, Aedes aegypti
atggaaagctccagcccggaagcaccgcaagtacagaatcaagaaaaatccgtcgaagaagtaacatcaataaccgcagtggaaacaacggatctggaacgggaggaaccggaagacggtgaggtgctggaaaaactgaaaggcgatcggatcggcgaaaccatgtacagcgaacgatttgtgctgacgacgattctgaagcttccgcagctggagggaaccctggcggaagatgaggactatgagaaggacctgtgcagcctgtgggacatgaccatcgagcaggacgtggtactgttcctgctgaaacacgacgtgattgaactgtttgtgggaatctcggaagcgtccgaggataatcgtctggtggagattcttctggggattgtgggcaacatgtgctgcgtggaagagacccatcggttgctgtatgagaataaaggtttggtggtcagtttgtgcgggttcttgagctcgagcgacactttggtgctggtgcagttgatgaggattttgacgacgattttggagcgatcggatgatgaggagtactgctggttcaaggtggtacgcgaggtggaggacatcacggagaagatagcttttatactggccagtacgaccaacagggagctgattgagcatacgctggaaacggtacatgcgatggtcaatcgttttacggaagcggaagtggattacgctcagttgaatgagttctacaagatgttcgccaaaagttgcttgatcgagggattgatggaaggattcaagcagatgttccccgaaacggcggccgacaatcagttcgaggaggactttctgtcgaacaaggatctgaagacgattcagaagttcttggagatccacgaaaactttattataaacgccaatgaggtttacgaggatcaggtcgacaagatcgtgtactgtgtctatcgtgtgttggtgccgatgagttccgagggttgtctaattccactgtccaaggcgcacgtcagaatactggtttgtataaatagcatctacagtgcaatcgtgtaccatttccacgatggtacattcctggccatgttgaagatctacacgattctggccaaagagcaagaggggttgcaaaattccgcccaacaaccaatggacgaggaaaacgacgaaactgatggcgaattcgaaattcagacggcactgggagagattctggagactttgtacttcatggcggaaccgatgaatagctcaacgattgccaacactctgaaggttagttcgttcaacgaggaaaccattcaacggctctgtttggcgctgaaggaaaccatggccggcgatccactactcggacggacctgtgatttgctgttggagagtgcccgagaggcgtggaccgttgaggacaaaagtcggtcttag

SEQ ID NO: 1121 - DNA, 477 bp, Aedes aegypti
aggatgcctcgtcgccaaaatagacccccaacccgcaatccgcgaggacttggcgcagcaccaaggaacgactctcccgacagaagtgcacgcgcttcggcatcttgcaaccaaaggcgatcgctgtcggaatcgaatcttccccgttcagctgctgctgaaacgccgcaagctggaagatcaagggcagcctccgcggtaagaggaaccaaggtcctgaacgagatacggcatctgcagcggagcaccggtttgttgattcccaagctgccctttggacgggtcatccgagaggtcatgctagaatacaacgggcgccatctgcgaatcacatatgatgccctgatggccatccaggaagcggcggagatgtacctggtgatgcttttcgaggactgccaaaagctggccctgcatcgacagcgggtcacgattaccaaacgggacatggacctggcgctttacttccggctttga

SEQ ID NO: 1122 - DNA, 1540 bp, Aedes aegypti
atgcgcaaaaaaggacgtcgcaacaagaaagcgcccaaagtgaaggtggatgctcccgttttcgaagaaccgacggcactcaagaatgcaccgcacacatttgttatccatcgaggcgaaaggtgttcctcggtggtggcactgtcccgagatttccgtcgcatgatggaaccttttaccgctagcgccctgcgggaacgacgcgtcaacaaggtcaaggattttgtccacctgtccggattcttccacgtatcacacatgtgcctgttctcgctgtccccgcaaacgttgtcactgaaaatcattcgcatgccaaagggaccgactctgaccttccgggtgacgcaatacactctcgccaaggacgtgatcagtatgacgaaaaagcaatttgtggacgaggaaagcttccatacggccccgttggtcattctgaatagtttcagcggtgaaggaagacatctgaaactaatggcttcgactttccagaacatgtttccgcccatcaatttatcaacggtgaagctttcgtcgttgaaacggtgtgttcttctatcgtacaatccagtttccaaactgatcgatctgcgccactattccgtcactgtggtaccggtgaacttgaacaagggtgttaagaaagtcgtaacacgaaacatccccaacatgtccaagtttgaagacatcgctgattttgtggagaaaggtcatttgctgtctgactctgaattcgatgacgaagaaactcatgttgttcttccgcaaaatctacggagaggcaaccttgcggacaacaaatcttcgttgcggttgcacgaaattgggcctcgtgtaacaatgcgcctgatgaagatcgaggaagatttgctgacgggagaagttctgtatcacgactacatccagaagaatgccatcgaagtggaggagctgcgcaagaagcgtgccgccaaaaagcgtctgaaggagcaacgcaaggagaagcaggaggagaacaagaaaaagaaggacgttcagaaggcagaacacaaggccaagacttctggtggaactctcaccgacagggacaagcagttgctcaaggatgctgaggaagccattggcgagcagtcggatgaggatgatacccgatactatgaggatgctattggggaagcgccagaaaaagaactgttccaaggacaaagcggcaccagaaagaggcctttcattccaaagggatcgaactattcgctgaaaccgaagaagcccaaactggacaagaagaaggaatacgatgaagatgatagagatgaccgtagaggtcgggctgggccaggaaagaagggcaaaggttccttcaagggaaaagggacgccatctaagaaaggcggtaagttctcgggaaagaaaactggcggagactacaagggaaagtcaaagtatgccggtaagaaaggggaaggaaaaggtcaaggaaaaccgaagtttaaggggggcaagaggaagtagttaatcaggatgttacatttttaatataaacttagatggtaacaccaaaaaa

SEQ ID NO: 1123 - DNA, 537 bp, Aedes aegypti; identical to SEQ ID NO: 593

SEQ ID NO: 1124 - DNA, 546 bp, Aedes aegypti
atgtcgataccgaaccctgcgggacagatagacggcgcactggctgcgcccaagtacggtacgctcattccgaaccgggtattcgtcggtggtatcagtggcgacacgacggaagcggaactgtgccggttattcagctcgtacggcaacgtcaagtcaacgaaaatcatcgtagatcgggcgggcgtcagcaaaggctacggattcgtaacgttcgaaaccgaacacgaggcacaaagactgcagagcgatggagactgtatcgtgctgagggaccgtaagctaaacatagcaccagcgattaagaagcaagtaagttggcaccatacaatctgcgcgacgaacggtgccgtgtactacgcagccacacccccgacgccgacgatcaacaacatccccatcgagcagtttgcgacggcagtctatccgcccggtgtgccaacaatctatcctccgacgatgacgccctaccagccgttctaccagtactacagcgtgccaatgaatgtaccgacaatttggcctcagaactatcaaggtatgtaa

SEQ ID NO: 1125 - DNA, 363 bp, Aedes aegypti
ggaaataatagtcagggaaaaagtaagcccgagcccgagaaagaagaaaatcccaagagaaaggcaagaggagccaagagcaatcaggaagacaacgacgacgacgacccagctgagggaatagctgaagaaaaccagtttaattttttcgctcgccttccttcgcgaaacccacatttccaatcgaaacagcgaggtttttcttcctgtggtggtcgcccagagagtttgtcccggaaaattggtgtgttttcccgtcgcgtattgccaacttggtggaaaatcgagttctgctggtgtagaattggtgtttttctggtgtcaaacgttcacctggttcgcacgattcggttttctatctaa

SEQ ID NO: 1126 - DNA, 1677 bp, Aedes aegypti
tgatacatccacaaaagagatgcaatctcctagaatctttcgtcatcacaaggattcatccctgcacgttctgacgatacatcaagcgatgcaactcccgaaagataacctccattctaacgataatagccgaacattcgcagaaatgctttcttctggtaacacctttcaacagatcgtcagtatgccggcggcagccaccatggacgaaaccacattcagctcgggaagcatgtactccagtggagaagaggagatcctagccagcgaaggtcttcgtctaagccgttcggcccgttggcgcgagcgtacttcccgtctagtgaacttcgagccggcagtgtttttattttgctttgcgttgagcttatcagagattgaactgtcccatcaaataatctaccaaacatgctgcgaacaaggattccagcggagtgagtgtctactggtgggaacagaagcgaattcacccgttgttcaggaaattgaagctcaggtgaaacccgtggcggcaagtgtgaatacagtgatagtagctatcaagtcggtgataccggtattcggcgcgttacttttgggagcgtggtctgaccgttacggtagaaagcccgtcgttgtgataactggttgcggtttgttcgttacatatgttgcactgacagggttgaactatctgtcgtctttcgttcaggtcaatctgtggttctacgctatagctttcattccgttttcgattactggtggaattgctattctagtagcaacaatttatgcgttcatatcagatatatccaatgaccagattcggaccatcaaaatggggttcatgagtgccgttatggttgctggagctgcattgggatcgtttagttgcagatacattttggaatggactgactcgactacagtatttatgatttcaaccatttgcatactgttcggacttatctacattgtgctgttcattgacgacagtattattcccggtgctgacaatgaacttggaagcaatttgcaaacgttgttctctttgagcttgatagaagatgttaggcaggcggtagtttgtaaaagatcaagatttgtgtggcagatcttggtgttgatcgttgggttcatagcaatcgtggaattggctgctggcaacaattctgtagcatacacctatgcccatcgtcatttggaatggagcaaaaagcaatacagctattttcagttgtcggaaagcgggttaaaaatagttgcgaataccattgggatattatctttcaaaaggatattcagttggcctgatacacttctagcgctgatttccaccatcagtaacatcttatgttcaaccataaaaggattctcaacagttggatggcagttctatatggcaacaagtctcacttttttcaaaggaacggaacaagcggcaatgctttcggtttgtgcctacttgctaccatccaatgaaattgcaaaattctatgccctggcaatgtccgtcataggattagttactattggatcagaaccactttatggctatttttacaaagaaactgtgggtagcagtccgggaatggtctacttgtttgaatctggcctttacggtggagcacttgttgttcttgtgtgtgtccaattactgatgaacaagcgaaatcaaccagaattgttactgtgaaa

SEQ ID NO: 1127 - DNA, 957 bp, Aedes aegypti
ctctcagttctcatcgttacatccaaagttctgtaccgggtaatgcagttggttcttgtttcgctattggccaccgcctttttcggcgcagttgcaccatcacctgccaggagaatcgtcggaggccaatttgcacagaatgagaaacagtttccctaccaggtggcccttttcgagaaggatgagttcaagtgcggaggatcgattatcgccgaaaagtggattctaacggctgcccattgcatcgtgcagcttgatggaagtcctacatcaactgatgttttaaaggttcatgtcggttcaccccacctaaaaaaaggagggaaaaaggtgaaaccttcaaggattattcctcacgctgactaccccaagatcaattacgacatcggattgattgagctagaagaggccctcgtttatgataaaatcatccaaaaaattgagctctatcgaggggaattaccagtaaatgtcacagttacaatctccggccatggaaaaaccggaagtaatgagccgatctccgagatgctcaagtacaacacattgaccgtgatggacgagacagaatgttttaaccaaataattcattccgggtggaagaaaatcatgtgtctgaagaagcctgcggataataacggtatttgcacgggagattccggaggacctgccgtgttcaatggaaagcaagttggagtggccaactttgtgctgggaaagtgtggatcgatccgtacggatggatatgcctttgtgcctttcttcgtaccctggattgaggaaactatgaaacagcagtgagagatagtgatttcaaaagcctggagtggaaattatcaataaaaatggagtggaaaatatcaaaaaatcaagcaatcctgaaacactaaattcactgaacatgtctagagtagggtggtttaaaaaacaaaaaaaagtttaaaaatcccactttcc

SEQ ID NO: 1128 - DNA, 1852 bp, Aedes aegypti
aaaaaaaaaaactattgcagcgcaatttaaaagcggttacccaatctgtaaccactgcacttgagcctgcgcacaatctattcaatttccccatgccacagttatttgtgtacctacattggcaatgcaaagccgtgttctatcccatacaatgctcgttcagtagcactttgttgtgctcaggcagcggccgggagccactagtttgcttgcatctcacctccattatcagggatctgctagacaatgagttgcaatttaacgtgaaacgacgaacgtcaccggtggaaggatggatgatccttacgaggataaccttctcgtaagggtaagcgatggaaatcgttcttctagacgagggcttttcatcctggagcctccgatcttcctcattttctttgcactgaatgtatcaactgccgtattcaccgatcagctggtttatcaggcgtgcacagtttcgctcggtatcaaccggaccgagtgcgataagctaggcaaggaatatgaatctcctgaagtgcaagccctggaggcaagagttcaaccctactcggcagatattctgatggcagaatcgctcgcggattcccttttaccggcctttatgaatctttttattggaccgtggtctgatcgattcggccgcaagccggtactgttgctcaccttcaccggctgtatgctgtctcacctgttcataactgtgatatgtgctctgacgagctggtaccggctagatccgtggtattatgccatttcatttgtgccttctgcgttgtccggtgctacttgtacgatgctaacgagtgtgttttgttatttagctgatgttaccagtgagcaagaacgtgggaacaagatgtccatcatggaggctgcactgtacagtggaatgcttttggggaacataagtagcagcttcattctcagaatgactaacgctcttacggtgtttggagtttctaccgcatcggcaatactagccgtgttgtatatagttttttatatagaagaaagtattcaaatcactgcagaggatcgccggaggacgtgctgttccaagttgagatatcagttccgcccaagtatggtgctagatactttcaaaacgtgctttagttggagaacaaactacggcagggcgactatcctactcggtatacttacgctgggcgggaacatatttgcctttgaggccaacaacaccgtttttttcctattcgtgcggaaacagtttaactgggccgtccggaagtactcattttacgcttcagccgaaacagtgctcctggtgttgggtaacctgttggctacgtatgtgctagaaaggctaataggattaactgaggctgccatcgcttcgatcgggtttttcagctggatgctgaacagtattgttatcgcagtggctactgaaccgtggcatttgtacttggcaatcacgatttgcatgctcaagggagctaccgacccgatgaccagggcgttcatctccaaaggggcttctccggaggatatgggaagtatattttcgttctcgtcgacattcgaagcgttgatgcctctgggagctgccccactttataccaacgtttacaaacacacccttagttggcatccgggagcctttagttggattagtacgggagtgtacggtttgtgctactgtctaacgatgtgcgtttgtgttctacaagctatgaggcacctttcaacttatccatccatagactgatattcgtagtttagttacaggtaatgtgattcgtgtgatattgttaagtttattgatgcatgtgattgttagttgatgaaaatgaaataaacatatttcatataccctttagaa

SEQ ID NO: 1129 - DNA, 1084 bp, Aedes aegypti
ccgtgcggccttaagatcatctcttcaaattccatacctattacatctagattcccaccccacttgattaaatcccaacacttgactaaaccgctccaaatgctataaaagaagcccatctcacatcgtctaatcagtttaacccacggactcacatcgcacgaacacttcatgatggccaccttgataaccttttcgatggcactggccatcatagttgcagcatcggtagcaatgccacctcctggcggaaaaatcgtcggaggccaattcgccgatcgccatcaatttccccaccagattgcgctgttcttcgaaggtcgcttccgctgtggtggctccatcatcgatcgcaaatgggtcctcacggctgcccattgtgttttggacgagatgactccacttccagcaaaggatatgaccgtgtatgctggatccgccaatctcgaagaaggaggtcaattcttcacggtgtacaaggcctttgcccacgaagagtacggtgacagcaaaaacgatattgctttgcttctgctggatgacgaatttgaatttgatgacaccgtgaataagatcgaactgttcagtggagagttgaaaaatggtgacgaagttaccatctcgggcttcggacgcgaaggcacggaattgcccgcttctgaacagttgaaattcaactcgatgtttgtacagcaagatgaggtgtgcgaatttttgatggcgcaaaccgggccaggattgatctgtctgaacaatgacgcccataacggagcatgcatgggtgattccggtggtccagctgtattcgaagataagctggtcggagtggccaactttgtgctgaacgaatgcggcaccgtatatccggatggctacgccaaggtttccttctaccgggaatggatcgatggagtgatgaagcagtaaagatacgggaagcgccaatataacgtttatgtgcattccctttatagggcttctccattgttggaaacacttgaaaatggctggcaataaagtgttaccacgttgcaacaagtggtgtgactataatgaaactctaattaaaaatacataccgcctt

SEQ ID NO: 1130 - DNA, 1091 bp, Aedes aegypti
cctaccagtggccgcagcaaaagtgtcctaccaagcagtgcgatactcgagaaaaacttcgaccagcgataaccgtaatcctgatgacaaccctcggagtccggaaagaggatcgctgaggcaatccatcacaccgtcgctcttggcggtttccctattgatgtggcgaagaggatccagttttttcgccggatttgtccatagaatcaccggtgccggaaatcgccatctggtggagttctgcgccggaaggatgaatctggtcaacaagatggttcacccggaaaaccggaagaggctggtctacgtgtaccaggcagaaaacgggttgatccacatttgctggaagaatcgcacgacgggaaacgtggaggacgatctgattgtgtttccagacgatggcgagtttaaaaagatcgagaacgtaaataatgggcgggtgttcctgttgaagtttaagagttcgagccgtcggctgttcttctggatgcaggaaccgaagacggataaggatgaggagtggtgccgccgtattaacgagttgatcaacaattcgccgtcgtcgaacaatctgggagagagatcgggacgcggcggaaatggaagcgacaatggggacctgcagtacatcatgtaaaacatgtcccagcagcagctgatgcagttgtttggacgaccgatgggaggattgtgcagcttgctagggtggatgagatcggtaggaaaaacatggctgaggcaatttaaacacatccttgagtgccttcagacttgtgttttatttggaagggttcactgcggttcctcggattcatcatctgaaacgtcctagttattatgctccataatttaacccaagatcagtcgcatgcgtgtacagagtacacgcaccctgaggaaaggtcgattttcataaacaacacgagcgaggtggtgctggagatggctgaatgcgtgaccgctcttgagttaaataattgtttagtacaataaaaatgtatatattatgcaataaaaagtaattgatgattgtcatgactctgtactaatattctccgttttaataataataataatatattttttgaaac

SEQ ID NO: 1131 - DNA, 1077 bp, Aedes aegypti
ttcccgtcgatatcgcaaccaaaaatcgtgggatgtttcagcgtaggtcccggaagggaattcattcctacgggcgaaaatctgaaatatctgaatttaccgcgcgacgacgaccggctacgaatcgatctcaacgaaggattcgaaatccgggtacccaaaccggacagtgccaagcaggagcgcatcgatcacctgttacggtttattgtggagaatttggatcggttacgtggtgaagatgtgcctggacgaggatccaaaccgttgagctgcgactttgtgtgcttccggggtttgttgaggatgatgatgtgtactccatacgagaggaggaccagttggatcatattggctacccggtacaaaggaacgatttacctgtgtgcgaaggatacgccggagaagttgcacgaggaggcacagcaaaccgaacagcagaagcggttctgctactacgggttcaacttcatgactacaaaaggtcacgaacccgacagccccgcacctgacacaacggccccggtgcaggaatcggaagaattctgcgccatgttcagcaccaccctcgaaggtaatcgactcctgtacggagcggaaatggatggcattctttcccaaaacaagccaatcgacaaggacaacccatcgccggacgttctgaaccggttggaattcgtcgaggtgaaggtgaagcgacgcgaaaccaatcaacggcaggtcgataatttctacaggtttaaaacgcgcaactggtggtgtcagagcttcctggtgaatgtggggaagattttcgttgggttacgagacgatcgaggtattgtggacgaaattcaggagatgagcctgaaggaactggatcgggaatcccggcagcattggtcggcgtcggtttgcgtgaatttcgggtcgcaatttttaagtcaagtcgccgacgttatgcggggagtagactctaaagacacggtctacagatttgagtacgatccaaacagatttagaaatgttttctatagtgtccataatggatatgaggagtcgttccttccggattggtattgcgctgttgtcaaatga

SEQ ID NO: 1132 - DNA, 3646 bp, Aedes aegypti
cttcgtgcaacagtcggtccgcaaggaggttgtgactcttgtgcgattttatctgaatcaccgattatccgttactgttgcagcaaaaagtgctgattgtttactttttagagatttaattacggcttcaacgagttgttgagttatggtgtattgtttaactttgttctgaagtgtttgataatctagtttatcggaagtctattagcagttactgtttattgtgctggttcggcaattgaacgagggaaaaacgttggaattgcgttgtcgaatataatggataatggttccggaggattcgttccggtgcagacgagacgacctcgcccaccaccagtacaacaacgtaacccccgaccacctttggaccattcaaagttcgcggccaaatatagcaagaacaaacccaaccggtccactggatcaggaacgaagggaaccgctagcaacgagactaatcgccagcacacgaacatcgttggccgtgtggaacgtcaccggaatgccggtggccaaatgcgacgctgcatctgccggtgggtcatgacctacggccgctggcttgatccgtacgaatttctgacgaactacaacgaaggccaggggtgcgctgtttgccgtgtgaacttccactcggaggagaaccgatcggaacacttcgacgagcacggcaaggagttcaacatctttgcgaaaaatggcgatcgccgcgtcactcgcaatgcttttcgtctggagatcaagtatttgccgaagtactcgcggatgatcattcgtgtggagaacgattctaatgcggtgttggtgttgcgatccgcttatctgctgcggttggacaagcagttagatgcgaccctggtaggaccactgagaatgaatccgggatacacgtacgaaattgagtacacaatcgagcactgcattccgaaccacgtctacacggtcgttctgatggcgatcgttgccggaagtcgggttgaactggtcgaacagtaccacgtgcagatgctgaagagcacgaagatcgttggaaagcctttgaagatggatattttggcgtaccaccacattccggattatcttataaccctgtataagaacaatttcgagcacagcaataatttcaaccgtttggcaattctttgcctggagaatctccgccaattcatcaagcaaggtttaacatcggtcaactacatagaacagcttcgacttctgaacatgatcgaggactacgacctgcagacgatcttttccacttatacaatccacaatgccacggtgaccccagccgagcagcaccggcggtacattataagggtggaccagttccaggtcgcgccggccatgctggaaatcgacggctacgttcggattaccgtgcaccgtagcaccggtccccgcggaaccaatctggagttcatcaacggttacatagatctgatcaacgaggacgagatcatcgtgacgatgcagcaaccggtccggttccatctgccgtgcaaggtggagttcccgctgaaccgcacccagtacaagttggagtacaacgcactgaatctgatcagccgggtggatttggagaagtttctcttcccgaaatcgctgcccaagaagaagaaacccgttcgacaaactgagttccagtggttccagccgacaatcgctgacaaccgcgagcaggtgacggccatccgaaacatcgttaacatgacgtcctaccctgccccgtacattctgttcggaccaccgggaacaggcaaaacatccaccatcgtagaggccgttctccagatatggaagaatcaaccgaaggccaacgttctggtggccgcttcgtccaacctggcttgcgacgaagtcaccaaacggctgaagcaattcataccggaagatgacatctttcgcttcttctcgcgatcctgcgaacgcaatatcgacgggatcgacatcggaatcctggagatatcgaacttggctacgggtatatacgaagtgccttcctacgaacatgtctatcggagtcgcataaccgtcagcaccgtaacgaattgtggtagatttgcacaggctcgcataactccgacatttttcgactatatcttcattgacgagtgtggcagtgccaaggagatatcggccctggttcctgtagcgggagtttgcaccgaaggacccaaaatacacgccagcattatcttggccggcgacccgaaacagcttggtcccgtagtccgtaccgagtatctgaaacaaaccgtgcacaacacttctctgctggaccgtctcatgtctcagggtatctacaaacgccaacaaggacaattcaacccgctggtcattacgaaacttttggacaactatagatcacacgaggcgttgatccactactcgaaccaatggttctacgatggcgaattgcgagctcaggctgcccctgatctcgcaaactgggcgatcggttgggattacctgccgaatccggctttcccgatcatcatgcattccgtagtcggcgtaacgcgtatggaccggcagtgtctgagttcgttcaacaaggaggaggcccgttgtgttctgcactacattcagaaaattctctccgatggaatcaacgatcgccagatacgtgaggaggacatcggtgttgtgacgccgtattcgaaacaggtatcctatctgcgccacggctgtcgcaactatggctgggataacgtcgaagtcggttccacggagcagtaccaaggtcgcgaaaaacccatcatgatcctgtcgacggtgcgctcgcaacgcgatcacgttggattcctgtcgaacagcaagcgcctcaacgtggccattacccgtgcccgggctctgatgattatcgtgggcaatccggatacgctgcagcgtgatccgcactggtatcgcctgttgcgatacatttcggacaatcagggcgtccggggagtggacttccagctcaggaagcccgacattgacctatccggtcaaccgttctcgtacgcgctcgaagaagccgattttgcttaatgttttgtgtaatttgttaccttctcactcttgaatttgaatgtgagtttttttttcaaggcttctgtgtgattttctcaatgtacatttatttatcaaccaaagtgccattagtaactggtttgcgaaacgcattgtacgatgtaagcgtttctgtgttgaattcgttttagaccaagaacaacgagggacttcattttactatcataaccattccattcaataaatacatatatttctactgttattaatctgtttttctcatttttataaagacacgccatattcatacatatgtatagtcataaaatggcttccttaggctctatcatgttctttcattgattaaattttaataatgaacaagtcatgctgtgattaaaccttggaaatgttcctaaatttaaagaaacttaatggatttacacttgaagaactggattatccatagactatggaacgtttagagataatcataccatctaccagagctgcggcaacgcaaacgagatgggaacaacacatctatcaccatcctaatccaattataccgattataccacgcataacatcttccgttgtctatcacctgtagtaggtaaacgag

SEQ ID NO: 1133 - DNA, 3364 bp, Aedes aegypti
atttcttacttccggtttctaagcgccttttttggcttttttgttttcccgcggctgaactgtcattcgttgtttgttgacgatcgctctttaatttcgttatcgttggtgtgttatatttttctgttaatttttactggatatctttatttcaaaagactttagatatcattaacttgcaaaaatcttcagtgatacaatggaaatcatctcaaataagtttatgcagcagcgattcgatcggcagaagcacgaaatcgaatcgtttgtggtgcgcatctatcggcacaatctcatcaaggacggcggaatcataaaaaagaaactccgggaaaagctgctggaggaaatccgtctccggcgtatcacccgagtcaaaatagacgaactgggctgggttctgatgaaccacgggttgataacgaagaccgccctgaagcaacagcagctggaacagaaggaacaacgggaggagtccgaggaggggccgaaacagtttaggtttaatatggaacggttgcgggatttgctggagaagcacgaacagcgacttcatgccgagctagccactaaaaaccaggacaaacgctcgcttgctcagaaagcgttgcttgccaacgatctggcccttaaggaaatccgggaaatgatggaagcacagcgtccattagcggaaatcctgtacgtaacaaccgttgagcgtttgctgaagtatacctttgaatcatcgtcccggagttgcttcgtttgccggaaaagtttcccctcgcccgaaaactataccaaacacttcgaatctgtacatggggacaacttcaagattgtccccgctaacgactgccttcagacgggacaaaagttgaacgtggtccatcattacgacgctttgagtccggtgacgctgttcacaatccggaacacctaccacacggccatgcatatcgattgtgtctatctgtaccactcgacgaagcaactgatgccggtcaatcgggacgtgtggccaatcacgatcaatccgggcgatagctacaagttctccatcaccacgggaatgtttctcgtgccggagcatgactacaccattctggtgcaattcaatcggatactggagtacgtggagcagtaccactttcgggtattgaaggtaccggtcgaactactcgtgacccatgaacccattgtgttgggcaagctgaaagattaccttccaccaatcgagctggtggcggtcttcaagaacgatttcgagatggtcgactcgtattctaagaaggaacgcgagctgtgcaacagtattcagacattcatgcagaaggatgaaggcagtcgacttaatgccagtaactatgtgaagatgctgcagttgatgaacaacattgaggactacaacgttcagcacgagctgtcccgctataacatggacgatgtccacctcaaaccgtgtggccccaaaagattctacagcctgaggctcaaccaattcagcacggcacccaagtcgttagtggaaggcgactacatagaactgacctacacgcgtccgaacaagtcgatcaaaaccgtcattggggtcatttcgcagctttgcgccaataaggttctgttcgaaacggaagaaccccttcgatacgacatcaagtggcgaatgaaattcaaccccaaccggacgcccattcggatggaatatcaagccttggaggtcctccagagacatgacttgagctcgttctttttccccacgaaggtggcagagaagttccaacagttcgaaagagaccgattcgagtggttcaacgccaatttggccggtaacgacgaacagcaaacggctgtagtgaacattgtcaacgagacggctcgccctgcaccgtttattctgtttggaccaccgggaacgggtaaaacctcaaccctggtagaagcgatcgcccaaatttggaagctcaaaccggacgcccgagttctcgtgacggcatcttcgaactttgcttgcaacgaacttaccgaacggctactcaacgtcgttcccaaggaggacatcctgcgcttcttctccaaacaggccgaacggatgatgtccgaaatgtcgtttcgcttgatcgagtgttcgaatttgaacaccggaacctatcgattgccttccccggaagaattgtacggaagtcgtatcgtcatcagcactctaacatcggccggtaaactcgtccaggccagagtaaaacccaaccacttcacgttcgtcttcatcgatgagtgtggcagtgctacggaagcgtccgccctggtgccaatcgctgggatcatcactacacaaagatcgatcaacggtaccattgtcctatctggcgatcctaagcaactcggtccggtaatccgctcagaatacgccgctaccatgggtttacgcatttcgatgcttgaacgtcttatgaatcttccactgtaccagaaagatccgaagaccgatgcctacaacacccgggtcattatcaaacttctccagaactatcgttcccacgaaaccatcctgaatttctccaacaaacgattctatcagaatgaactacaaccctgtgcctcttcggataatgtcgattgggctctcagttggtccgaactaccctcaagtcagttcccgatcatcttcgaatcgaccatgggtaagctgactcgcgagcaggactccaccagctactacaatcaaaaggaaatcgaactggtcgagttctacattcgtaagattctctccgacggaataaacgagcgatccgttgagcagaatgccattggggtcatcagtccttacaagaagcaatgcatcaaggtgaagcaaatgtgtcaacggcatggctggaacgagatcgacgtcggttccgtagaggcgttccagggccgtgagaagccgatcatgattctgaccacggtccgttccggggctactggcgtcggcttcctgagcaacgtcaagcggctgaacgtggccttgacgcgggccaaagcgctgctgatcgtgatcggtaatccggaaacactgcagcaggatccgaactggttcgagttcattcggtactgctacgacaacggtgccatccggggtgtgaagttcgagctggacgagaagcgccacatggtgaaggaactccccgccaaggatgcttatatgacgatgatccaggaccagctcgacaagatcatccagcatatgggagtagtcaaattgtaagcagatttgcatttgtgatattgttttactctgaagtctttataagtgccgaggtatcgttttattttgtaataattttataactgttgtttttgtccccaaatgtatgtgatattgatgaataaaattgtaatttaa

SEQ ID NO: 1134 - DNA, 1061 bp, Aedes aegypti
agaaaattaatgttagtatcagccttaataacttatggcgttttcgtttattgctggggcgaaactagtttcgccctaggttcgcactaacagctgtcaaaacgtttttttattggctcgggtcgaacccggatccgccctaggttcgacccaaacacaacaaggttcgctctgccgattttttgcgatccaacctgagcggggtccaactgtcaaaaatggattgtttacgtttttgtaattatcaaaattaactattgtagaaacatattagtaacaaaagatgtttaagaaagcatatggcatcattcattggattactaatgagacttctttttgcctttttgcatataagaaagttaaatttgatgaaactgtgtggctgacatgtcgaatgtaagaatgccacagttgacttgactcgaacctggatccgttttcgttcgtttattgcgagtcgggtcagctctgaccccaggtttaaaaccgaaaacgccattattcgacatgttctgaggaaatagtctgtgataaactattacgatgcgtattcattacgagctgaggcctttgttttgtaacctaatcgccccacctgctgtcttccagatgagatttaggtgcactccggaaacagttaaacaataatgtactctatgattaatatactactacaccacgcaatcttggagttatcatataatcagttcaagaatttatcaactccggcggcgaaaagaagtgcatgcatgctcgcattctccgtttgctcctgacgggtggctcagtagttaacaatctgaacggtatgaagaatatcctgacgaacggcgggaccagtatgtttcgggaaaacttcatcaacgttatggatgactatcatctgggtgttttcagtggacgcaaaaaggatgaacaactcgagtaacaaatcccaatcctctaaattgaataataatcgaacaccttcattcaagttggtatttctaatagattcttggaagaagtacatatacatattcattaaataataaataatgttgattattcaattttaatgt

SEQ ID NO: 1135 - DNA, 2288 bp, Aedes aegypti
atgtacaccaactccaacctcagtctgaccgttccgccgttgatgggcatcgaagctggagtttgcaccacgcccaggacgccggaaatcctcaactcgctgatggccatgacaaacccgctcgagtattcgtacccgagcgcggcaacgacgcaggcaaacacgacgatatccgcgggcgtcctcgccgggtcctccgccaatactgccagctcgcaacaggtgtcacaggcttcccacgacagtcattccaacagttccgattcaccgctggactctcccgcagccggccatcgcaagactccgagcgtacaacagacccgctcgcaactgatcaaggccggtgtgaagctgctgatacagagcaagcgcaagcacagcggatgcgactccagcgatgggaacgaatcgtccagcggcggaggaagggctggagctcctcagtccaagaaacgccgcgacaccgacaatctgacgagcgaggacgacgtggagagtctgcgggcgaacaacagttcgtcgacggggggcggcgcaggaggtcccggcagtgccagcagtcctcgatccgtcactgggttgactccggacgatgaggatcgccgccgacgacgtcgggagcggaacaagatcgccgctacgaagtgccggatgaagaagcgagagcgtaccgttaacttggtcaacgagtcggaaactctggacgcccagaacaaggagctgaagcagcagatggcagacctggagaatcaacggcggaagctgatcgaggttctgcaggctcatggtccgacctgtgtacaccagaaaggttaccaacccctgcctagtctgtccaccatcacgaacaacaactgcaagtttctcaacgacctgaacttcctggatagcacagcggaggagatcaaatactcggaatgtctcaaatccggcggggagttgggcgatttctccaaacaagacaacgtgctacctcccggttattgcaaactatctccaacggaggtgaactattcaacgcctaccgacgtcatggctatcaacaacttcacagaagcgctgaaatgcgaatacattccaaccaaccaagaaaagccggcccgcgccaaaccaggacccaagccacgtcagaaagccgccaagcgttcgatcactgtaaccagtacaacgactacagtgacggaaactctgccttcgatacccgtaactctacccagcgccgactttatcctgaaaagtgagctcatcgacaccaacagtccatataccacagttcaatcggccgatcgcttcctcttcgagaattccctggatctgtacaacaacaataacaacgacagcaataccctggacggccaccacacaaacgacagtgacaaactgacctccctggccgtcaaggacaacgcttccaacgccctgctggagttcagtgctaccttcgacaccatcaaaccttccgattacggactcctgtcaacgcatcaacatctacccaaccaacaacaccaccacaatcatcaccaacaacaacatcaacccctacaacagcagcagcaacaacaacagtgccatctacagcagaccctcggtaatctgcaactccagcagcaacccctgcatcacagcaacaatctgcaccaccagctactctcgcagtcgaacgtgtccggtctgctcgccggtaccagcatcgtgaccaacgacttcctgatcctgccggaacacgacggcagcgagttcaccgacctggacagcggcataacttcctacgccaacatcaacggaggatgcctggcgtgaccaccgtcctcgccgttgccaccgttaccgctgatgttgtaggaagccgaggccaactttgatcactagagcgctagaacggaatgtttcttcagccgttacacacggagaaaagtttgccaaatttgtcgtactcttagcatcaacaccccagtgatcgccgctacgcgcagttaccgtactcgtttttagattttttagaactttgttttaaatatttgtatttatatacttctaatcggatcccagatttaggaggcgtgagtgtgtttggtagtcagtcagtcagtcataagacgctcttgaagaagacgcaaaagaaactcaaaatccaggattttgttttgcaacccaaatgcagggccggctcaaagccggctggaaacgggtgtgggccaggaaaatggatcacgtatttttttcgattctaggattatgtctcaatcatcaaagtctctctctctctcagtctctgttgtcactcg

SEQ ID NO: 1136 - DNA, 1548 bp, Aedes aegypti
taaatccggaaccgaccgtccgacttgggctcccagttctgttcatgaagttcgaatagtgttgcggagttgtgtcaaaatttcattttaatcggttagaaattgtagaaataagaatcaaaaattacgtaaatatggttttgacaaatatgttaggacgtaaaggttaatcgctcatataataattggtattctttaatcatataccctctgcttccgtcctctttcagccatcgaacaccggcaaagagtatgtcattcatttgaacaaaatcaaggacgattctgaaacggtagtgcaaaatattcaggacatcgacagccgttctgttgcacaccatgccctcatcgaaacccggctgctgccaggtggattctacgttatgggaatcttcgtcatcaatccgaagaacgtcttcgaggacccaaacctgctgctgacggtcaagacgatgctgataggcatccaaaaaacgttcgaatcggatgtgccacttcatgggaactgtgaagagttggatggcggagaaaagctagtctttttctactcatccagcagtaatttctactgttgcagagcgtcgcactcaaatcccctaacctgtccgttaaaccctgcgattggaaattccaggatcgagccaccagctggcaagtgatgaacacattcttcgagacggacgaaacgtttgcgttgcgtaagaaaaaggacgaccaatacgatacggaaaacaacctgaccgcatgtgtcgaagttctgcagcatcaactggacaaaagcgtcgtgtttttcgacggtgcaccgaaggatggcaagctactgttggaatctgcgctgcaagacaaaaaagaagaaccattcctggtgcacgtttacacgccattgccatcaaacaacgacatttccacacgtaagatcgaaaccttcgacggaaccctcaagttcgacggcatcatcagttccaaggtgtttgtccatccgaagaacacctacgctgaggtggagtcgttcatcaaaacggacatcattcgttcgctgatgtcgcgggtgcaaattcactgcgattctctggtccagtcggtggacgaaagcgaccaggacacgatcgtcctgaacgagttgccccgccgaatctacttccccattcaggccaagtcgaacccgatcctgttcagcgagtacctgttcctggaggaagtgaaggagacggccattccgcagattcgggacactctggatttggtggttatgcccaaggacttgaacgacaaggtggaagtggtggccgaggtgaaggaagaagagcgacacgatgcaaaggagtgcgagacgagtgtcgacgagaagggagaggggaaactgaacatgacgctggttggcgttctactggccgtggtggtactgttgattgccattttggtgttatttttgatgaagtagaagagtatataacgactcttcgaccagtgcatgtttcatattatgtagtgtacttttttctgtttttgacataattaagtaaaatatacacaatattttaatacgaa

SEQ ID NO: 1137 - DNA, 495 bp, Aedes aegypti
atggtcctccatctctttggtgaacgtaatggccaggactttccggtagatgtctatcatgtccatgtagttctccccagggtatgtgtacatgtaccggttagcaaactgctgcagcatggtcaacttggccgcatcgtccgcgtcaccatcctcgagcagctggttcaatgccatcagatgtttgagcgggaccggtgggagtttcttgccggctgccttcttgcggcgcgccttggccgcgtcacacgagtcacaaatgcaatcgaagtggtacatggtgagcgtttggcgccgttcgttatcggtgttcttgatggccaggggtccgtaggagatttgaatctgctcgtccgctgctatgggtcggagggcgatgagcttgagctggtcaaaatggacggccgcaagcgtgttcgggtcgcaggaatggttacagacggaagcaatcgagaagagctggttggtgaagttctgtcggggtccaatgattag

SEQ ID NO: 1138 - DNA, 777 bp, Aedes aegypti
atgcaagcatcaaactcgcgatcgttcggcgatgatcgcggaagcggcggtcaccagtttggaggcgttgcgtgtgacgacctggtgctcagtgtgctcaaatctccggtcaaggagacgacgaacctgctcggtagcagtagcattggtggccaaacgatctccgccagtccaagcgccgggagcaatggactggccacgggaatcaacaccggtgggaccggaacggccacaacccaatcgccgagtccttgcgcaggctatcaggcgctgcgtggctcggaggacgacctggtcgacgacatcgaatcggcgatcgaaactaccgagctgaacgctgccaacgcggcggcggaacaaccgtcttcctcgccgcgtgcgttgaaatttctgaggcgcttccggaccggtaaaacggggcgcttcgagccgcaccaccggcgcgtgccgactccgatgcgtcggaagaaccgaagtcggtcacgatcccgctcgaatgcggacatcctcgacggggtgacgaccggggatgatccgtgcgatgtgctcccgggggacgacgatccgtgcgacgtggtcggggacgaagcgggggccatcgcgcagaagattggcgttcccgatccgtactatcccatagcactgccgatcgaccaagcgttcaaagccaaatatgttttccatcatcgcaggggcaaaaccgtgcaggagcggttctacgtgttcctcgagcatccggtcgggtggctgtgttttatatatcatttttctgtgtaa

SEQ ID NO: 1139 - DNA, 2137 bp, Aedes aegypti
agatgagccttctctccgttccccttcataacaaacggttggtttgtgtaaatccagcaccgtgtgcacgtttcattcgtttcatcgcatccagagtcgtagacgttatccggtagatttatatgcttatggtgcatttgtgtccggatcatatttccgttatcaaatacagattgtgaagtgaaagtggacgtatttgagcgaatcaagtccatcccgtcgaattgtttgaaccggtttaacccgcggaactgctgcagaaggatggatgcgctaaccgagttactctacgcctatatggccgcccagcagagccaatcgccctcaaatttggcccattcccttcgtatcaatcagaagcccatgtccctgtacacgaccgagttcctccgcctggctccgcatttggccaagtccgatgtggtcgcctatcggaactatgtgctgaaaaatggtcccttcatcgatgaaacggtcgctcccgatttgatcaagagcaacaaaagggcggccgatgttcgccaagcaggaaatcggcacttcctggccaaagattacctcgaagcgctggaaaagtacaacgagagcatttgctgggcggatgggcccgattcggaggatttgggaatcggttacgctaatcgatcggcaatctacttcgacatgggggagtacgagctcagtttggccaacattgctctcgctaagaaacacaattatccggaacgcttgatgcccaagttgctcacgagggagcataacagcaaggagaagattgccaccggccattccaagttggcaatgcgatgtccttcgctcgcaatgaaagtcgaatcccatcctaagcgcccctttatggctgccggcattgtccagaaggaattgcccatctacgggaggtctctggtggcggagcgcccattcaaagcaggtgacgtgatcctgcatgaaaaagcctggatggcagcgattagtccagagctcaagtaccagaattgcaatcgctgctcgatcgctaacttccacagcttgattccatgtccgaactgtgtttcgatcatgtactgcagcgagaagtgtctggaagaggacttgaagtacagtcacagattcgagtgtggcataagtgagaagctgcatcacatatcctacggaagcagtcgaattttaatgggtccccgagctttcttctatgggttgacccttttcaaggataatctggaagatatgatgaaattctgtgaagcgaatggcagagatggagcagatccgttgaccttggattactcgaactacgacccgttggaggaattcaaaatcttccacaaagtaaagcttccgactaacaatttcctgtacgaggattcattccggttctacgcggccgtttactactcagtctacatgaagcatccacttgtgcgctccctcgtcgtcaccaaaccccagaaagacttcatgcttcggtccttcctggactacacgcgtatcatcgggttcctaatcattggaccccgacagaacttcaccaaccagctcttctcgattgcttccgtctgtaaccattcctgcgacccgaacacgcttgcggccgtccattttgaccagctcaagctcatcgccctccgacccatagcagcggacgagcagattcaaatctcctacggacccctggccatcaagaacaccgataacgaacggcgccaaacgctcaccatgtaccacttcgattgcatttgtgactcgtgtgacgcggccaaggcgcgccgcaagaaggcagccggcaagaaactcccaccggtcccgctcaaacatctgatggcattgaaccagctgctcgaggatggtgacgcggacgatgcggccaagttgaccatgctgcagcagtttgctaaccggtacatgtacacataccctggggagaactacatggacatgatagacatctaccggaaagtcctggccattacgttcaccaaagagatggaggaccataggcgcaacattgctgttaaaatggcttgatttctccgatgatttacgattattgcaattgtttcttttttttaatgttcagatggattggaataatttgcaacttgcaaactttttgttgaataaactcgttgaaactcaa

SEQ ID NO: 1140 - DNA, 3287 bp, Aedes aegypti
gtgcgtttttgttgttggttatgcatttttctgtggcagcggtgcattctttctcgactcccgtgtgtcagatcagtgtaaaaaatcaagcatctgtgaattcgcggatcgaacaaaattgtccggattgtccgtcgtgaaacacgatattttcccttgctcgaagcagaaaagtgattttgatttgcgttgcctttattcaaaatcctgaacagcagccaaacatctttcggactaggacagaagcgtctcaagggtcgcgttcgtgttccgcgagattcgtagtgacagctgaagaaagtggtgtggcggtgaaaggaggtggagaagtgccaaaacggggctagaaaaacgcagtgagtgatactaaaatctggcagcggaaaaatcgaattttgacctcatcctcgtttgacgtgcgtgtgtcgaacggtacccggaacggattatcgggaagaatcgccctctgcccataaagagcgccttcagctgcgctcctctggaacaggaaaggaaaacttcgaatccgtaaaagtgttgccgatttggtgcgtgggctttttccttctctgtgctgctgccgtgacattatttggctttttaagggattggattctgccgaaggccattgccgtcgcgacgccgaaggaagtagcagcagcagcaagaagcggaacgatgggcgagcattctttgcagcagggacaaacgagttccgaccaggggcagcaacagggaaccgattcagctgcggcagccggaacatccacttccaatcgacagcaacagctgctgctggagggtgaattgcgtgacatccggcagctgttgtggggccccagcattcggccggaagtgttccgccggtggtcccaggggttcgattttagtcagcatgaaccttcggccctggtccagcacgatggcgggccgtgttgtgtaatcgctccggtgcaggcctatctgctgaagattttgctcatggagacacccggacacagcttcagtgatttaaccccggacaagtgcaaaaccctgctcatccaagccatctgccagattctgatgaaatgcaaatcctccaagtaccggatcgttagcctgcgcgctaaccggcaggcggccgccggcagtggcgccggaggttgcccctcgtcgtccgcggcagccctcccagaagagatagatggcgatgccgagatggtggacgccctggagaacgtgccgtcgcacgagcagctggaacttgaggtggatgccgccatggcggccaccgctgctgcctcggatttagtcaatcagaacaccatggaggagggggcggcggcagtggcgacggcagaagccctggaagacgccgccgaccagctgaatccggaaacgttccacgagcggctttgcgtcagcgagctggaacagatcgacgacgtcgagaagtattatgccggaaactttcacgtgctggccgatgagtgcggagtgctgcttctgttgtatacggttctactgacgaagggagtggataacgtactaagtgaggtgtcggacacatctgaaccgctgatacacggcacgtacggatacggtagtcaggcactgatcaatctcatgttgacggggcgggccgttccctacgtttgggacaacgaacaggatgtcggtggattaaaactgaaaggcatcacacagcagtcggacatcgggttcatcacgctgatggaacagatgcagtactgcaccgttggcttcttctacaagaacccgaagaacccggtctgggtgatgggctcggagacgcacctgacggtgctgttcagcaacgagcggaggctagtgtcgccggaaacgcccagcgaggtggcccggcgggtgttccggcagttcgacaccgagggcagcaacttcataccgagcccgctgctgcaggacgtgctgtgcgcgctggatctggtcagcgagccggagtacgtggacctcatgcgcaagaagctggacccggaaagcctcggcatcatcctgctgaacgatttcatgaacgagttcttcccgacggagaagaagtccgttccggacacgttcgaccttctgcactacaacgggatcccaaattcgaactgcgacaaccgggtgcgctacaacaagggccacgccatccagctggagagcgacgtgcggatgtgcaacccgtcggatccgatgctgacctgcctgcagaccaagtggcccaacatcgaggtcaactggaacgactcgcggacaccgtcgctgaattgaccgctcgatgcgtactgtttgttgttggcataatttacatttgcacatgacgatcccgttccccgatccggaaagggagcgacacgtgtgcattagggcatctccctttacctttatgtggatacaaaaccaaaatgctcctagatttttctttttgggacggcagacaactttaccagttgattgtatcggactaacacacgattgaaagcgccgtttctccggaacctgtttttagaagcgagcccacacaaatacagtcacagacatatatgtatctcactcacactcatacgcagttgaagcaaccaatcacacaaactaatctacagaacagaagaataaatagatactaactctgaaacacaaagtagaaaatttaacgaaataagtagagacaaccaggtaaccagttagcacataaactactagagacagagatgcgagtttcactatctacttactacaattaccaaaaaaaaaaaacagaaagccatcataaccaatctccattttctcagactattcaaataaccaaacaacaaatcaatcatttaaagtataaaacagctgcgcagcaaaacaaccaacgagaaaacaatacaaagaagatatagaagatgcaatctccctcagaaaagcgacaagtgacctgcgaaacaacgtgaatgcaacaaaaaaaaaaaagaaagaagaaacagaaggcgcgaaacgaaaaccgggaaacagggaggaagatttgtgtttagttcttggttttatcacccccgccccattcttcctcctcgcgagatattataacaaattgaattccattttccgcaaacgtgtaatgtgtagatttgaccttaaatgattaaagaagaaaaaaacaatggaaaatacgcgcgtaggattatatatattagaagaatcaagaaatacgaaaacgaaatcaaagaaaaatgtaccgtggaatgaagcgatataatatatatgaatcacagataccttattgcgacgaagaaaaacaa

SEQ ID NO: 1141 - DNA, 1145 bp, Aedes aegypti
gtcgtccgggcgcgtcttgcaagtttttgtaaaagttcgtaaaattcagccgattctccagtaaaagtcccgtaaatttctcttaaaatgctcaaggacggcaaatcgaatctgccgtgggtggaaaagtatcgcccggctacactcagcgatcttatttctcacgaagaaatcatctccacaatcaacaaattcattcaagaggaacagcttccacatctgctgttctatggccctccaggaacgggtaaaaccagtaccatcctggcgtgcgcccggcagctctacaaaccgcaatccttcaaccagatggtgctggagctgaacgcttcggacgaccgcggaatcaacattgtccgcaatcagatcctgaactttgcttcgacgaggacgatcttcagcggcggctacaagctgatcatcctggacgaagccgacgccatgaccaacgatgcccagaacgccttgaggcgtatcatcgagaagtacacggacaatgtacgtttctgcatcatctgcaactacctgagcaagatcattccggctctgcagtcccgttgcacccggttccgctttgcaccactctcgccggatcagatcctgcctcggttggagcacgtgatcgatgccgaagggatcaaggtatcggacgacgggaagaaagcgctgatgacgctggccggaggtgacatgcggaaggttctgaacgtgctgcagagtacctggatggcgtacaaggacgttacggaggacaatgtgtacacgtgcgtgggccatccgctgaagatcgacatcaccaacatcgtcaactggctgctgaacgtcgagagcttcaaggagacctttgagaaaatccaagaactgaaaaccaacaaaggtctcgccctggaggatatcttgacggagattcacctgtatgtgcacaggatggagcttccgccgagggtgatgtcccagctgttgatcaagatggctgcagttgaggaacggttggcggccggatgtgtcgagaagcctcagatggcgtccttgattgcggcgtttcagattgcccgggatcaggtcatcgtggaagcctaaggttgagatatggattaaggtaagctaggaaagtagttctttgaataaatgttcgttttgtaatt

SEQ ID NO: 1142 - DNA, 1450 bp, Aedes aegypti
ttctcaatcatgtactgacattaacgcggatagttgaaccaattcaatgccttgcttgtgcctatttcaacacaagtaaatcaaactgtaatttgtttgtgttcactaatgtgttttctccttgtagtgatgaggagagcaccttcattccaaccctattaatttaaattttgttgtcaagttgtttatctcaaaatattgatcttcgagttctcgagttgtagcatatcagcatcctcacattcttcagtcacccagttcagtcgggtgtggcctgtgcacaatcggcacgtattcatcagcaaaatgggccgggatcgcttacattccatgataatgagacgagagtttgcggcatctgtcgagtcgcttgcccctcagcatgagtacgggacgttgctcaaccagaggcagattatccaggatctcggtcagttcacggaaatcttccgttggatccgtgatttgcagcagaatgtccttgacatcgagaaagagctcttcggcggtgggtccatcaaggccagtcaaaagctgggcgcaaatgcaaggctgtgcgataagattcactctgccgtcagacgactgcaagaggatttgcaaaagctgaatcagcagaaagccgagggaaatgcagagtcaagtgaaaataacgatatggttagtaaagtgcggcacatacagtttgaaagtgtcaaagctgcttactatgagacgtactggaagtttcggaaattggttatgcattacgagctagtggtgaaaaagtgcgatcaaatcgcaacatcgcagctaagcctcatctcgaaatcacagtacgacgtctcgcaactgacagccaatttaaactacgacggactagaagccaatcaacaaccgtctcgacgccacactttacacgaagaaactgaagtacccaaaaacgaacagattcatcccccgaggtgcaccacaatcattattgaggacaacgcagcggaaatcctccaagccgtcgaggaacgccaccaggagctgcgggcgctggagaaaacgcttttcgatatgcgcgatgtatgggtactgttttcaaccctggtgatgcagcacggcagtatgcttaatgtcaatcagacggaatccaaagttcagcacgcgtccaatcgagtggctactgctgcagcggctactaaagaggcccactactactaccggaacacaggcggcactacgtgttgctgcatcaatgtgtttcactgtttgttggtgttgttggccataatggtgacgatggctgtttatttggcgttgaaaaagttcgttaaatgatccggtgcgttcttgcgttgtttgatggagaggaaagaatgccaatgagatgcaactacgatgcgacttatatcagtacacccttcactttgtgaagtatcatttgaattataaccctattttcaattgattgtttaagaac

SEQ ID NO: 1143 - DNA, 1661 bp, Aedes aegypti
gtaggtctcatctgtaaggcctgcttcatggcccggccctcggtggtggggagttacctatatttatcgatacaaacaatgcttccaatattcagttcgagaatcagcttcctccagtgaatatcggagcatctttttgtggaaattcagtttctgagtttggggtttttgatttggttgtgatttttcctattcttgtgagaatgaagatcttagtggttttggcttgtgtggccatggctgcagcccggccagaggctcctctccatggatataactatccagctccacgacctatagtgcaccaggctgtggcatcttccgcagggcatgccactgctcacggtcacggaggaggttactaccaggctcaggctccaatccaagtctcggctccagtccacactccagtcttccatcagagcggatttggatcagctatctccggtggagcattcggctcaggttctgcaactggtgcatctggtttcggaggttctggtttcggaagtgccttcggcagtggagccggtcaggcccaaagctttgctcctcagcaaaccgtagtgcagaagcacatctacgtgcacgtgccgccacaggaacccgaagagacccgtgcccagcagatcgtgagccagggcgttccccgcaagcactacaagatcatcttcatcaagacaccgaacgtgcagccttcggccgcccagatcgctctccagcaggcccaacaggaggagaagaccatcgtctacgtgctggtcaagaagcccgatgaacaggccgacatcaacatcccacagttgccatcgctgcccccaagcaagcccgaagtctacttcatcaagtacaaggccaacaaggctttcgatgccaatgtcggccagactggactgagtggactgagcggttccgtgagtagttccggtgccggaattgccaccggacacggtggttcgggacatggcttcgaagctaccctgggagccagcggtagcagcagctcttcctccgttgttggcggcagcctgccgcacacggactacggagcccccatcggtcaccagggatacccctaaaagggtcacctctggaggctcgagaccccaacgttactcccggctgatcaacccgcgatacctcccgtatttgctttaaaactagtctggataggagcgtgcgagcgaacgcgatttgctaggtgcgacgacaatactcggttagaccccccctcctgctgcgatttcgaaccgttttatgacatcggacaacactaattggaacaagaataggggctataatagaagcgatcgatggttcattcgtgtctgggagcacactgccactgacggtcatctttcttcgcgtaacggtgacagaggaaagatggcaacactggcaaccctatttccatttcatagcctactacctattgctagacccccctctatcccagagcacgaatgccacggtcgcgacaacgtggaagactaattttatttaatgctgacaattttttcgctgttaaattattgaaaccaacccgaaaagatcgtaattttaaataaggtatttgtagaaaactagaggaagagagaaacaaattgttacttatatttaagtaccatataaataggacgaaaataaaagagagattctat

SEQ ID NO: 1144 - DNA, 1113 bp, Aedes aegypti
gacgtaatccagaacgtgctgggtgtcccgtcaacctgcgtgcaccagaacgtcgtccgccagtgtcggctgtcattttcctgctggctggaaggtggccgtcatgtttccggctgtggcgacagtcgatggctgttttcctgctgcgtcaaggacaatgaagtttcctctgctccggcaatgatcacctcgaagctggcgttcgctgcaccgatgcgacccatggttgctcctgtgccggtgcttccaatgaaaaccgtctcctacgcgacctccaagaaaagcagtttcctccggagacgatccgatcagatgggaaacatggactgtggcatccctcgaacggcgcagaataccctccagaagcgtatcatcggaggccgcacggcgaactttgccgagtatccctggcaggcgcatatccgcatagccgagtaccaatgcggaggagttctggtgtcgcggatgttcatagctacggcagcacactgcattcagcaggcacgtctcaaggacatcgtcatctacctgggcgagctggacactcagaactccggcaaaatagccgaacctcttccggcggagaagcaccgtgccgagctgaagatcgtacatcccaagtttctcttccgcatgacgcaaccggaccggtacgacctggcactgctgaagctgactcggccggccggttacaaatcgcacattctgccgatttgtcttccggtgagaccactggagctgattggccgcaaaggcattatagccgggtggggaaaaacggatgccaacatgggtcaaacgggaaccaacattctgcggacggcagcggtgccgattattagtacaaaagagtgtcttcggtggcacaatagcaaacacatcaatgtggagctctacaatgaaatgttttgtgcaggtcattcggacggtcatcaggatgcttgtttgggtgactccggcggtccgctaatcatcaacgatcggggtcgattcacactcataggcatcaccagtgccgggttcgggtgcggagtggaccaccagccgggaatttaccacaacatccagaagacagtcaagtggatacagaatgtgattttaactgcgagttaa

SEQ ID NO: 1145 - DNA, 1993 bp, Aedes aegypti
atgtttcgcatcctcatcatctttctaccgttcattaccactgtcgtacttgcatccaattacaccttatcattccgatccagcaatgtagtggcgaatctcgataccacaaccaggaaactaattgtggaacgcaatggaaaaccagtgcaaacgattctcatgaatcacgatatcgaatctgatgctgccttcggactgctagataacggattcaagttactgaacgctgacagggaagttaccgagttcaccatcgactgggatggagaggacttctcgctgttcaccgttgcacggcgaagtcgccatcactcccgaattgtagtggattgcctcaaactcggcgtggatgtaaactggttcggtggaccgatgcaggccttgcagtactggccggtccagaaacagaagttcaacgagtactcctacatcaataaagccgacgatagctgttgcattgcggaacggtactggttgaactcgctgggatcctttgtcttcgtggacgaagatgctcccctgtttatcgatcagaactatggtcaaccgggttatctgtgtttggaggcgaagaaatcgctgccgttcgacatctacgacgatacgtactctttcgtgtaccagattgggattggtagagacgcacggggagctcacatgggagctattcagaagatcctaggcaggccgagtggtcatccagcggaagcaatggtcaagtatccgatttggtcgagttgggctcgcttcaaaaaggaaatcaacgattccgtgctctacgtgtatgcgaatgacatctacaaatacggctggagcaatgggcagatagaaatcgacgacgactgggagatgtgctacggatcgctgcagcccgatagtttgaagtttcctcgcatgagacacaccgttggggtgttgaaggcgaagggttttcccaggattacactttgggtgcatccattcatcaacagggattgcgaagcagtgtactccgaggcacttcgcaacgactatctggtcagaaaccacgacggacagacggaagcgcaatggtggaacagtgaaccggatgggtcggtgcatttggactttactaagtcggaggttgcggaatggtttacagaacgtctgaaatccattcaaacggaatttggcgtcaacgggtttaaatttgatggaggcgaacccaattatatgccggcggatccagtgttaaacggtcctcgctccaagcatccgtttttaattacggacggatatcttaggacggtggccaagttcgaaaacctggcggaagttcgttcggctcgtcgaactcaagatctaccgatcttcgttcggatgaacgacaaatcttccgcgtggggatggtcgaatgggcttcagacgttgattcccacactgctgatgatgaacatggtcgggtatccgttcgtgttgccggatatggtcggcgggaacggttacttcaatcaatatcctagtaaggagatgttcatcaggtggctgcaggccaccgtatttatgccaagcattcagttttcctacgtgccgtgggagtatgacgaggagactgtgcggatttccaagaaaatgaccgatttacatgagaaaattactccgaagatcatggagagatttaagcttgctgtatccgacggtcatccagtgaatccacccatctggtgggtgtctccagatgattttgaggcccagaaggtgtttgatcagttcatgcttggagaggacatcattgctgcgccggtcgttcagaacaatgtccgggctagggatatctacctgcctaagggagaatgggtcgatgggaatattgctaccgtttacgttggacctcgatggattcggaactacacggtaccattgaatattctgccgtatttcgtgagaaagggtgtcaaaattcactaaaagtggttccgtacacatgtcttcacgatcgcgatagtaaattagattttattaatcaatt

SEQ ID NO: 1146 - DNA, 1802 bp, Aedes aegypti
atgctttccaattggaacacgaacaggctgaggacggcaggtatggagtcaattcttgagaaggattaccctcagagtgatctgcttctgtccaaggacaaagaagtttcctcgagtcaaagtttcaattccacagtcctcagaggaatgtttggaacagcacttcaaaaattgtctgcagcgctggccagtatattcatacctcctgaaacacaaaccaaatcaatggagaataacaaaaaatcgtttactgtacccgatatatccgtcgatattaacattaataccccgatcttcgaagctgtgcaagggaaagcaaaacttacgattcctgaagatgttgtagattgtgatgaacccatctccttaccatttgaagactgtattttcgttccacctgtcgatcacaatccggataaaagtatgcattgcagtaaacggtataatacggcgcgtccaggaaggatacacaataatgtggctcaggacaaaagttttgccaatatggacaaaaacaactgcaatctaacgaagaaagtatcaaactggacaccacttcacctgtataataagacaaaagcatgtaacaaaaatcgtaaagtaaaaaatcgacaaaccctgcagacaaatataacggaagatctgtggcaaatcgcagacgattatgaatcaggttccgattgcgaaaattacagtacgccaagtctaggctgttcggtttcgttttcatcttcgagtgtgagaagttccatcgacctatctgaatcgtccttcccttccattagctcgtcatttccgatggctcccatttacacggatttacccagacgttcctcgcaatcctgcaatagtgaagacagcttcgttatggtattcgatatgacaactccattgtccagaattgatatctgttctgcaagcgccataaatcctccagtgctagctaaccggcagcggtgtcgtcagatatccgaatgcagcgacgacggtatcgtgttctgttacgaggatgaagagaacgatattgtgccacagactgaattcgattttgacgatgaagacgattctgaagaggatgaaacagatagcagttgtgcggaggatagtgaaggcaccgtgtcccatcaaccagattctggatttgaggaaaaaaaggtgcaattcaatctgaaaccagaagtgcacgtgatgagaacctgggatttcgcataccgccaggcgaggaagggcgaatgggaaatagctgccagggatcgagagcgtttcaaaaatagaatccatgaaacaggaaaagtgctcagcactgtgttcgataaaaatttgcgtgataaagtttataaggaaagatttagcggctaatgtaaatataggcgatgtgtatttctatttcttcgaaacatatgggatccttgtaaatttctattggtaaaatgctatgcaaattttctggctcctggcatccgatgactattagcagagtaatgtaaaaatattaagctacagacagtggttgaactacattctcccttattagatatggtcttgagctcaatgtaaatgttggctactgtgattgattattttccagataattagttaatcttatctcttttattcgatggtcaccctcatatcgactaaaagaatatttattgtattaagaaacagaaaaaaataaatgaaaaataaacatccaggtactaataatattgtttatgttgtttttgaatttgtataatgaaatataaatatgtaaggaacactaaatttaatataaaaataaaaaacaagttttgatttga

SEQ ID NO: 1147 - DNA, 1512 bp, Aedes aegypti
atgaacttaacattcttaccggcattaaaaacacaagctacgtttaaaagtcaaagccaacaaaaacagtggtatggccacgatcagaaattattaaaatgtcactgtgacatttgcaaggaccagaactacgtgtgcgaaacagatggactgtgcttcacttccctgtcgctggagcatggcgtctacaagtactcgtacagctgccagccgaaaaagtacgagctggccgatcggcttccgttgagttgtctcacctcgaaggaaaagcgtaactcgttcacgatcgagtgctgcgccattgacttctgcaaccataacaaactattgcaactgcccaagccagctcccgaggtggacaaggtggacaacgtggttttcgtgatagtgctcttcgtgggtgccggagtggccatgacggcagtcgtcgggttgatgtttgtcatgtttgtgatgcgacgccggaagcgaaacagcggagcccggcagatcttgccggaggactcggtgtgcggagcgagctacccgatactgaacggacacaccacgatacaggacttcatcgagatgaccacttccggatcgggttcagccggactgccgctgttggtgcagagatcgattgcccgtcagattcagctggtcgaggtcatcggcaagggtcgcttcggtgaggtctggcgtggcaaatggcgcggcgaaaacgtggccgtcaagattttctccagccgcgaggagtgctcctggttccgggaggcggaaatctaccagacggttatgctgcgacacgagaacatactcggatttattgctgccgataataaagataatggcacgtggactcagctgtggttggtgacggattaccacgagaatggatcgttgttcgatttcctcacttcacgcagcatcgacactaagacgatggtcgagatggcctattcgattgccaccggtttggcccacctgcacatggatatcgtaggctctcagggaaaaccagcaattgcccatcgggatctgaaatcgaagaacattttggtgaaatcgaacctcacgtgctgcattggagatctgggattggcggtgcgtcacaacgtggcaaccgatacggtggatataccgtccacacaccgagtcggaacgaaacgctacatggctccggaagtgctggacgagacgatcaacgtgaaccagtttgactcgttcaagcgggccgatgtgtacgcatttggattggtcctatgggagattgcccggagatgtaatgtgggtggcatctacgacgagtatcagctgcctttctacgatgtagtacagccggatccaacgatcgaggagatgagaaaagttgtctgcaccgatcggcaacggccgagcataccgaaccggtggatcgcgtccgacacgctccattcgatctccaaggtgatgaaggaatgctggtaccagaatccggcagcccgcctaaccgcactcaggatcaagaaaacgctggccaacattcgctag

SEQ ID NO: 1148 - DNA, 714 bp, Aedes aegypti
atggcgtcgcgaaatttcttcggagcgaaagcacaagcttctattctgccgctacgggcgatttttcacactacgattcgccaactggcgtcacaacttggcggcaagcatgccgacgaaacttccccaatatgcgctgcggcagcttcgtcaaggatccttcggcatacgaacagcaaacgcagcagcagtagtagtcccaacgattatagcgattcggcgacggggtcgttagtcaaggaacagcaccatcgccaccaacaacagcagcagattaatggaaaatatttaaactcgaatgagaacggtggctccgaggacagtgccgggattgaaactccggccggagcgacactattctcgtcatcggcatcatcatcattgtcatcctcgctgtcatcgccgctgtcgcataattcgccgcaaacattgacgctgacggcggataaaaataaaacaagtaagtgtttgttccgcgcggcgggcgacgccaagatcgttcccgtcgtatacatccatcatgaaaatagctcgcttgatatccacagcacgagcatggtgaagatacatgccctccttcagtgcgttcaacctgttctactgccccttttgaaccaaatcccatataacgaagctcccacatacattcacagcctagtaatacgtatacgctctgaagcatacatgtgtggaaccaacctgttctacgaataa

SEQ ID NO: 1149 - DNA, 3843 bp, Aedes aegypti
tacatcatcaaatgcgatccattgatgcatacatccatctatctcgaacagaaggaggtatgatacgtaaaccatttttcctatcaacgggtagttgttagtgaacagctactgtgtatatgtgtatttagttcatttctgcctgatgtctttctaagaacccgattgaaaataaacgaagaaaggattagctttttgatacacgtcaacagtccagagcgagggaacaagtgcagtgattcaatagtaggtctcgattacatcaaagcccagtatatccctggaggagagagcatagaacggagcgcaaaacctgtttggtatctagaagaacagggatactaagagattcgcaaacccgacagaaccaagttcgggtggtagcctgggccaagcggtatataaagcattccgtcgtcagtgaaagttttctcagtgtcgaaccaataccggaacggaacgtactgagtgcgcgcgcaactacgaattcaggttcaggactcgtatagctgccttgaagagaaccatccgtccctaacgacatcccccaaaagagtgcgtttggtggcgagagaagaagcctgaaacaacaaacccaaaatcacaatcgattgctacacggtgagaggaggtggtcgaccacgaagaagtacgtgtgcggaaaaactggtacccctgttggagactagctagttggacaagtccaagccaaacgcgcgcgcgagagaaggctaccagtgtggctctgaaaactccacaaagtcataaagtgacgatccgtggcagacagctcagtcgtttgtgttccgtattcgcgagaggttcatcgtcgttgcctcgttggacttgcgtttttctcaccttcgaagacttagtacataattaagtgccgtatcggttcgagctcgtatcgtgaacgtgtgtgcttaagtaataaacatagacaattgccagcgtgtgttttgcttcgccttttttttctactgaaagcgagcacctgaagaaactgagtacggacaaacacagttgtgtgtaatcaaccgataaaatgtgtggtatttttgcgtacttgaactatctgacgccaaagtctaggcgcgaagttttggacctgctgttgacgggcctgaagcgtttggaatatcgtggctacgactcggctggtgttgcagtcgacagtccggatcagtcggggatcgtcaccttcaagcgaactggaaaggtgaaggtcttggaagagtctataatagatgcaactaaggatggcagttacaacgataacattgaatcacatgtgggtattgcacatacccgttgggcaactcacggagcccccagcgccgtgaactctcatcctcagcgttcggacgaaaccaactcgttcgtggtggttcacaacggtatcgtaactaactacaaggacatcaagaaattcctggaacttcgtggatatgtatttgaatcggatactgatactgaaaccattgccaagctggtgcatcacctgtatgtccagcatccaaactattcgttcagagaactggttgagcaggttgtgcaacagattgaaggcgcctttgctttggccttcaaatcgaagcacttcccaggagaatgtgttgtaactcgtcgaggctccccacttttggttggtatcaaagcgaagacttgcttggccaccaaccatgttccaatcttgtacggcaagggacatcgtcatggatctacgggaaatattcagttcgaaccaactgcagataacacatcggatttcatcaacccgggagaggaagtggaatacttctttgcatcagatgcatcggctgttattgaacatactaatcgcgtcatctatctggaggatgacgatgtggccgcagttaaggatggtgcattgtgtatccatcgtttgaagaagagtttggatgatccgcatgctcgtgaaatcacaacactgaagatggaaatccagcaaattatgaagggcaactatcgttacttcatgcagaaggaaatcttcgaacaacccgaatccgtcatcaataccatgcgaggacgtgtcaacttcgaatcaatgaaggtcaccctaggaggtatcaaagactacattccggagattaaacgctgccgacgattgatgctgattgcttgtggaacttcatatcacagtgcagtggctacccgtcagctgctggaggaactgactgagcttccggtgatggtagaacttgcttcggacttcttggaccgtaacacacctatctaccgcgatgatgtatgcttcttcatctcacagtcgggagaaacagctgatacactgatggcactgcggtactgcaaacaacgcggagctttaatcgtcggaatcaccaacacagtaggaagttctatctgtcgtgaatcgcactgtggagtgcacgtcaatgctggaccagaaattggtgtcgcttctacgaaagcctacacatcacagttcatttcgttggtaatgttcgctttggtaatgagcgaggacaggctatctcttcaaggtcgacgagaggagattatcgaaggacttcgccagctggatacgcacattaagcaggtactgaaactggaccaaaaggttctggaaatcgcacaagatctctatcagcagaaatcactacttatcatgggtcgtggttacaactttgccacttgtatggaaggagcgctgaaggtaaaggagttgacatatatgcacagcgaaggtatcatggccggtgaactgaaacatggaccactcgccctcgtcgacgacactatgccaattgtgatgatcatcatgagagatcccgtgtacgtgaagtgcataaacgcccttcagcaagtcacagctcgcgagggacgaccaattatcatctgcgaagaaggggacaccgaaacgatgtccttgggatccaaaacattggaaatcccacgcaccgtggactgtctgcaaggcatccttactgtcattccaatgcaactgctgtcgtatcacattgcagttctgcgaggatgtaatgttgattgtcctcgaaacctggccaaatccgtcacagtggagtaagccgaatccttcgggagaaatctacattcttacacgtttattatgtacttgtgtagcagtatcaatatgcttttatttttcatagaagattatgaaggcggtgagtttgtaaaatactcacgtttctaaccgcaacagattagttgacaatgtacgacaaacatcaaaaagataagtttagagagagcagacggggctacatgggacgatagtgatatggaaacctccacgtctgcaaggtgtagtttctatctaatctgaaccgtcaaaggaaagcggactttgcagatgaattcgcgagcccagtatatacctagcaagtgcaataccactaccgagatgaatcacacgcgaaaagctacttatcaacagggaatttctcttccctatctgtctacacggccgtgcaacttcctgagggcggtgtaatcagcaactacacagacgaacggcttattgacggatgaaaaatggaactaattgatgattgtaatcgtggaaatttgatagcaaatgacacgaacacgcgaaattgaatggcgatcgttacttcccgctgccaatcgtgatttgtgtatgtatttgataatcgaattcgataaaaatgtttattgtttactctagcgaagggacatctcagaaaaccctcaaagttgagtcaagtttatttttgtaacatcgtaaaaaagaaaagttctgttttattattatatgtatgtaatttgaacaataaagtattagtgcttattccttttttcaacataaca

SEQ ID NO: 1150 - DNA, 1756 bp, Aedes aegypti
atggatgtggagcagcacaattcccggactatatcccatccgttgagaaacggcgatgatggcgcgaccgatgaagacaagccattgggactggtccgaaggaaatgcatcatgtgcttgctacccttcgacgagctgggatcgatcgaaaccgaatcaccggaagagctgaagcggatcgtggataatgtgtacaaaattgccaagattgagataaccccctcgaatggcaaaatcggacccctctgcggtagctgccgtgccaaattgggctacaacttcgacgaggatgcctactacgaaatgctgagcaaaatgtacagcgaatcgggcacgcaaagccaccagacactaggcgtcatcccgttggtagttcctagaggtcagcagccaccgggttcggaaaactccgattatccctcacccggaagtcccttgctggatgctgcttgtggaacgttcgttgttaccgaaatgggccgggacgaatcggaaacctcctcggacctgaagtgtgtcatctgctccaaggtgttcaacttcaaatcaacgcttcggctgcacatccgcagccatcacaatagcaccacgattcgggaaccggaaacgcacaaaattccacggaaaccacgaatgtatgagtgcatcgagtgcaatctaagcttcaaactgaagtacgactacgacaaacatcaagccatgcacaatcgagcaaatctgttccaatgtgacacttgctacaaactattcaaacacaaatcctactacatgatgcaccggaatgcaaaacgctgcaaggcgatgccactgaacttgagtgccgacggaatcggaagcattgtccgaactcaaccggctcgagacctcagaaacctcagtgagggcattcgaaacacgagctagaaagatttatctaactgtttttgaaaacgaaccaagcttccttcgtttttgccataactatcatacacacacattatatgtacgtgtttttaacaattattagcgttagtagttactaatagatgttcttgatgccgaacggtgcgagtggagtggaatcgataccaaatttgtcatgttcctccgatctagtccggaattgtcaatcgacaaagttttatttatattaagtcacattgttttctgttgaaatatatgttttattttatgtacccaatcaaaattgtacaataaggttattttaattttaatgcacctccacccgacacgttacggcgtcaaacaaatcggattctggtctcttcgttttagtcaataatcttgtaaacgaatgtttaatcgaatcaatcacagctgcaaaacaatagaaacaggcactcggtagatttattcggtgacagaacacttcttagtccataagtcagattatatcaacaacgctctatttataaacaattctcttcggaataactatatagaaggcaaactaattcaaactaatagtattcgacttcctttataagatgcaaccaaacacaacataaattgaaaacaaacgaatggacattcgattcctaaaaataataagaaacaaaaccaatgtgcaacatttctattgatagggaaaccaagtgtgtgaaaagaaacaaaaaaaaaacgatggaaagaaatgtgttacttgtgatgaaacaaattgtgaaaacaaaacagaaaactacatttaaagaaatacgctagcaattaggatcctacattttatcttcaatgaaaataaaagtgatttttacaaacc

SEQ ID NO: 1151 - DNA, 4343 bp, Aedes aegypti
atgacgcaatcgctaaaatcaggattgaaaccattcaaatgtccaatttgtgaaaagtgcttcacacagcaggcaaatatgttaaagcatcaactattgcataccgggcttaaaccttacaaatgtcccgtttgtcagaaagcattttcgcagcacgccaacatgatcaaacatcagatgctacacacaggtttgaagccttataagtgtccagtgtgccaaaaggccttcactcaacacgccaacatggttaaacatcagatgcttcataccggcttaaaaccttataaatgtcctgtatgtgacaaagcatttactcaacaagccaatatggttaaacatcagatgcttcatactggagtcaaaccgtacaaatgtccaacctgtggaaaagcttttgcccagcaggcgaacatgatgaagcatcagatgctccataccggactaaaaccatacaaatgtagcacgtgcggtaaagcgttcgcccaacaagccaacatggttaagcatcagatgcttcatactggtattaaaccgtacaagtgcagtacgtgtggtaaagcttttgcccagcaagcgaacatggtcaagcatcagatgcttcacactggagtgaaaccctacaaatgctcagtgtgcgacaaagcattcgcacagcaagccaatatggtcaagcatcagatgctgcacagcggaattaaaccatacaaatgtcccacttgtgacaaggcttttgcccagcaggctaacatggtcaagcaccaaatgctgcacactggtgaaaaaccattcaaatgcaagagctgtgataaagcattctcgcaacgtgccaatcttaagaagcatgagatggtgcatctcggaattcgtccgcacacatgtccactgtgctccaagtcgtactcgcaatattcgaatctgaagaaacatctgttggtccaccagaagcagtccatgaagcagcagcaacaaaatggccaggttatgatgattctgtacaattgtcaaacctgcaaaatgcagttcgagaatatcctcgaatttgaaaggcacaccaagcagtgcaatgagctgaacaatgggaaccatggccttaagctggaacagatcaacataaagagcgaaatcgatatggatggcagctctaatccgggaattgcccagcacatcaccatacctcacagtcaatcccagccacaaatgcacataccgtcggcgatactgacttcggtgatctcatctgcttcgacgataggtaacggtcataccttaagcacgagccacattcatcatcctacaaccggccaccagcaacatccacagcaacaacacactcctccagctgtgatcacacaacatcaacagcagcaacaacaacagcaacagcagcagcaacaacaacaacaacagcaacaatcggctgctcaccagcaacaacattctccagttggtcatcaacaccttacgctccagcagcagcacaatttacccatccatctccagcagcaactctcacatcacctgatatcctcacaccttccgcaccaggatcacgttacggcagacctccaccatcaggtaaacttccatcatccacatatctcccacatcccaaacctaccgcacaagatcctatccccattattccacatcccccccttcaacaacaaccacagtacataatggaacgcacggcggggatccccactgagtggggaatccccagaacaggctatagctaagagtccttccgcgtccgattctgctgctgctgacgactccgttgattgtaggacaccaacaacgccacctcaataatgcttgaccatgagcagcaaacagtaactctaatcaaaactagatacgacagccaaaatgcaacgttgatggcagtacactactataagaatactcagagagtattactgataaaaaaaaacacggcaatgaatatgttgaaacagttctactattattaggattctagtgagtaaaaaaggaaactactgcgaacgttgcagtagattaacgcaaaggctttctctaactgattttttttactattgaatagtacgaaaggcacaacacggttcagttgttgatgcagttgaagttgactaggaatgtaaggaacacaaagagggaattctgattgttgataagcatagcatgttacttatatttgcgtggtagtggtcgtcccgtgcgaacccatgtcacactgtttcgttttcttcttacaacactacactgtgtgtgctgtaaaggatcgtgaaagatgattaggcgcgcccattttttgggagtgagtctctgttatagaagctgatatatagatggaagtacgaaacaaagaaggatcattagttagaatattgaaaagtcgataaggcgaaaagatgagagaccaagataataaagtgaaaggattgtgattacgaaagtcgtgaagttttcgtattcgttcagcaacctgatgtgatatttttccgggacatgagcagggtttctcccgacagcacactgcgacggatgaagaatggttaatctaagaaaagggaaaaaaggactaacgaatgaggaatgatatatcgatgtgtcacttgtttggttttgaaacgattttttattgctttttgtttatgatgattgtagtaggaaaacaccatttagaatcatggttgagcatcgaagaatttacaatgctattaggtttttcgataattagaaaagcatatgtaacgttttattaaggtaaaacagcttagaaaccaaatacaataatgtgccaaaacttcaaaggcactcatatcgcgaaagatgcatcaaatcgcagtgcaatttctattttagctttttacattgggagaaaataaaagatgacttcgtacgttaattatctttacttttacaacggcattattatttgcccgaggtttcgacacgttgtcgtttacccctttaggaagtcgcaattcccatgtcgaaacgtcgagcaaacaataaggctgttaaaaaaaataaaagcagcttagtcaagaaagttacttgatagctttttattttttatggaatgaccaatgctgaaaactatttgttccaattggtattgaatgcttactaaacagtcattgttcagctcccacgaacagtttgaaatgtcgaagaatggctcaaaaccgataaatgaacttattggcggatctatttatttatttgatttatcaaacgggcccactagacccatatactctttgattcagtatagattaacacgattgtagacgcataggtttgccagtacagagatttgcttactaactttcgtcactaagtaccatgcccacacagttacggatcacccacagtgacggatcactttggcgttcaacatcggataactcgctcaaaacataaacgttggcgtaaaacatatttttcccatgttatactatttgtcttccaccatttgtaatgttgagcacaacattcaaccgctaaataacggtgtttttggcaaatgtttagttggtaccacacagctatcattatatggtcgttttctgtaagaagtgccgtcagcattcataagctcccacaggtggtaaaattcaaatgttatagcatgttttatgctcgttcgcttcgatttagtataaattcatctttggaaaacattttacttgaatttttattcaaaataccgaatattagcacttctaactagtgatccataatatggaccaggaaatgattgtttaccacggttatggatcacttccaaagaatgtagatttctgctattttatgcattggattcgacatttttagacaacagcactaaggataaaaaaaggcttgtaaatttcaaattttagcagacaaaaatgggtggaaaacttggtgtggagcggaaacagttcatgtctcagttactacaatgcagtatcacaaaaaaagggcattttacccttgtttccagctctaacactgctattttttgcagtaatatatgacacattgttaactttcgccataccatgcaatacagatgcattgagttgaaaatatcttgattttgcgcactgatccgtaatatgtcacaatttgatccataatatgaaaattgatccataatatggttttcaggaaccgacacaatttttaatttttatgcaatcctatgtaaatattacactcaaaacagtttactaaccgaagttccaatttgaaacgattcgattcgtgcttttaaattacaattttacgttttccatgtcgttttattgaattttataggttggactccacactatttgatccataactgtggggtcatggta

SEQ ID NO: 1152 - DNA, 1139 bp, Aedes aegypti
actggaagttgcagacagccataaaatagttgtttatttaggtagcattcctgttttattttccgcaatcctctttcgagcgaagaatagacaattccaaaactgccattttgctgccttcatcccgtgaagatttttccctctattatatgtaggtatgtgattttaagttgtgtggttgcccattttttatattccttcagctattttgcggctgtggtaatagtagttaacgtacagtttgttcatttttctcgcgttcatgtttaatttactatgtgttacacacatttacatctcacgatttccccccttgccgaaacctttccgcgattggaaaggtttgcgcaaggcgatcacttggatacacatcagaaaacataaataaaaagggattaacataagttacacgttctttgacaaatatgctatgattgggagttccggaaggtagaaggaaaaagaaatgaacgtttctctgtctttgaaggatagtttgaggagaaatgaattttcttcgccagaccaaaaactgaaaaacaatcgttgttccgaacaaaaaaatacctcctttattagttgatgagatagcaaaaatggatggatggtgttgctaatctgctttctttttggaatgaataacggagagcagcttgtgaagtataatataagccaaaattttaagggttcctctatcgaagtacgattccttcatacgtccaaagcatttaaattgaaaatatgttttttttttgttacactgtcctgtttcgtttgccaatagatttctcaaaacttgtagcgttcaacagttgctgcatgtgttgctttcttctctatgagttgttgtatttgtttttttttgtatcttaacggcggttttggtgaagaagaaaaactaagttcctaatttagcatctaatgcgcttgacagacaccacactgacagagtcaacggccacgctccttcggttttccttgttttcgttccatacgttccctaggtgcagcagcggaaatgcacttaactggtggcacactgctgcactcgcactcctggaccgtggtggtcttcgtcctcgtcgtaagcgttcttgtagtggccacttcgacgatcgtgctctgggtccagttccaac

SEQ ID NO: 1153 - DNA, 2442 bp, Aedes aegypti
atgtcgattttactagcggatatcgatgcgacgtgttcggcactggggtgggatgatggatgcaaatatcatatggaaccggatgccatcatgggactgaagcatctgatctggatattgaaacgggacagcgacgatcacgaatatcgccggtacattggccagaagaaggtgatgcaaaccgatctgattccgatgctgatgagcaacttcgataatccggacgtggccgacgttttgctacgtttgatagtgaatttgacctacccgaccctgctgctctaccagggcactcagccgaaggatgctgttggtcggaggaactatctgcatctggtggaaattcttcagggctacaaggaagcgtttgccgttcagcaggcttgggctgccctcggggatcggctgcagaaagtgctacaagtggattgggcagaacgaatcgaagagcaagagttaataatcgaacggattctcactcttacgcgaaacgtcctaaatgtcccatcgaacatggacatggagaagcgcttcgacaacgatgccagtttacacgatcaggtattgtgggcattacacgaggcgggtgtcctcgatttgatcctatacattctggggtcggaacacgaacaccagtatcatctacatgctctggaaataacttgcctagcatatcgggagcaatcggccaccagtttggcggatgcttcgtatcagagaagcgccactgaaaagcatcgtgatgaattggaactgctggcggccaggaaacgggaaaaggccaaacagctcagcaggattccggctgcgcgccattcgcgttttggtggaacttacgttattcagaacatgaaatcgatctcggacaatgatctgatctgccatcaatcgctgcaaaaggccctgcagatggagtttgacacggacaaaaagcgggtgaagaaaagctttcgaaatgtgcgcgaaacgggaactatcgagcggaaaagtgcattttcggtgcggttgttcttgcgtgaatattgtatcgaagtgcttcggtcgtcttacaacaatttggtgcgtcaagtgcgtaagattttggagagaaatgctcacggtcaggaggccagcggcggacacgacgattcgtatttgctgtgggccattcgcttctttatggaattcaacagggcgagtggatttaaggtggagctagtgagcgaatctctcagcgtaccatgcttccattggatcataacccggatagaacacttcgttgacatgatgggttcggataaaacccgcgctcgtctttgggctaggcgtctccatgtggctgtgcaggcttaccgtgagatgctgcacagtctgcaggcgctgcaaaagatgccagacgagaaggccaaagacctctttctgatgctgcagaacaatatcttctacgtgctggaatatcgggaggttgtgctgcacttgctgataaactacaaagaaactaacagcacacgagcttacttacgtgatgtggtggagacggcccatatgttcttcaagatgctggaaaagtattgccaggggactgtgcgtgtccagagtaagaagcgcgccaagcagaagcgcaacaaaaaccgccaggacaatgccggctcacgaaaggatccggagctaaatgcggacgaactggaagagctgtggctaacaatggctggcgaagtttcgacatgtctggctaatcagattacgcttcccgaggaagatcatcccattcctttcgacgcggcttcggacgtccccatcgatgatcagaaaggagactgcatgataaggattcattccttgctacgtgacggcaaatacgaacatgcaattattttaatgcgatccgccagggaagtttggcccaaggatgattgttttggatcgttggcgtccgcaccggaagatgaattaatgctgctgaaggaaattttcttggcaaatcttccacggaatgagttcattgatcagaacgaggccgatgattacgacgacgaagaagaggacgaagaagaggacaatcatatgactgaaattgattttcgcttcgaagatttcgccaaaagattgctgaatccgaaagttgtacacgcttgcattctggttctatccgattgggaagagatctccgtggaatccctcaaagctaccgttaccattctgcatcgcattgcagttggatccaaaatgccagctttgctgtttcaagcgtcgctgttccggatcttccaacgtgtattccacgcccccaaggatgctcatcacgaggagcttcgccggctcggtgtttatatcgttcgacagtttaccgcactggcaccgaataatccgaaaatctacgctgaactgctgttctacaaatcgattaaggaagcgaacggaatcgaaatgggatacgaggatatctacgggaacaacgtgtaa

SEQ ID NO: 1154 - DNA, 1625 bp, Aedes aegypti
ggagcatgcaagagattcaacggatccaacactattgacgcgtttatttttttttcaccggcacactttgttttttctttcgcgataaatttgtttcattcttagaatgataaaggaagacttaaattttccattccagaaacatttttgtacgtactgtaacaaaggatttcaatacgaaagtgctctcaaaaaacatttgttagttcacaccggactgaagccccatgtttgtgaagattgtggaaaaagcttttcccaaaaaatcaatctttcgatacatcggcggatgcacacgggagaagtgccggtgaaaaagtatagttgttccgtttgcgacaaaaagtgcatccgattgagcgagttaaaaattcaccttaaaacccattggaagaaactaccccatgcatgtacgctttgcacggaacgttttgccgaaattaccaactattatgaacacatcaaatcgcagcacaaaactgaaatatccctccaggagtgcatcgatatgatagcccagaatgaaaatgctgagctgatagtgcaaggcgatgaggaaacgataaccgtcgacgatgggctgtatcgctgtatggtgtgtctcaaaacgttcaaaactgaaaagctgttgaaaaagcacaaacgaaagcttcatcccaaggtatttgtctgtgccagttgcccgaagcagtttctctacaaaagtttgctggataaacatgctcgcgttcatactcaggaaaaacctttcaaatgcccacagtgtaatacttccttttctcaaaaaggtcggagcatagaatgcaatgaacatgttttcacgggaatgttcttgattttgataaaaaaaatacttttgcccccttaagcaacatgacttttcggactttggtatttgctgggacaccctaaccagcaacaattctttccttaataggtcaatttagaggtgcacctcggcaagaaacacaacattcatgtgcggagtgtgcagcccaaaatgtttatctgtgaatattgccaaaaatccttcgaccggccatccacgttacaaatccacattcggacgcataccaaggaacgaccgttcgcttgtatggaatgtacaaaatcgttcacgtcgaacagtgcactggcaatgcatatcaaaaccaaccatcggggagaatcaatcctgctgcaatcgattcaacgacattcagccgtaaacgcagagagtattatcctggaggaacaaagcactatatctgagataattgaagatgtagaggacgatgatgtcaaattcatacaatattcgattgagtttgtgaattccgatgaaagaagggatcttctgtaaaagaaagtatgtgtgtacatatacgcttatgaatatttgtaaaaacatagagcaacaggtacctttttaaactcatttttacactatttgttttgtgaaactccatttcgaaaatcttggctttagatgttttatagatcattatgattttcattgtcagttgaatcatcgaattgatgatttcttacgtatcaacactaggaggtcaatatgttattgttacatcctacttgcgcacgcctagcgcaatcgaaatagtaaatagtttacggaacaagttgca

SEQ ID NO: 1155 - DNA, 1751 bp, Aedes aegypti
atgcctttcatctcgaaggactggagatctcccggtgaggcttgggtcaaaacggaggaaggctgggaaaagctgaaagtgttggaatgtgtcaaacgaaaaaggtgcatctctgaatgtagtagttctagtgataccgaaaacgacattgaaaacggagatactgaaattccaccacactgtcacataacgctgaaatgcactcgcgaaattgctggcttcaacggcctgggagaggcagtacggaggctggacttccgcagctctgtacgagatggccgtcggttcaactatgtgtgtgctctgttgcggctcctggtctctggtaaaggtatcacaagtcttcccggtggagcccagaggctacttctgcaaatgctggaggaagtagcgacctacgtaagcgactcacagcagaatataaacgttctgaggggcctggtacagcagttgcgtcttctagtcaaccaggagaatcaaaaatgttggggaaaacctcttggaagtcaaagcctgtgggacggacacgtgcaaaccatccaaaggatccagaacattgctagtcagattcaaatcagagaacctggtccaaatatacgcccaaagctacacgatctgccagaagaatgtgttcgtgagattattttaaggattaccgattacaaagatttggacgcttccgcctcggcttggtcgctcatggcagcgttgatttcagaacaacgtgtatggcgggagctttcccattatcacttcaacaagcagcaaatcgacttcatcctggacaaaatgtgtctccaggacacgaaggaacgtcaccgcaactggcaggcaatctatcatgctctacgaaaaacttacggtgtacctgaggagctgcaatacgccgagatattggcattctgtcgtctttgccgttgtctattctggccatccgcagggcacccgtgcattgccgatcagtgtccggatatacgacagcgcatccgagatgcaggtaacagtgataatacggaaactcagccggtaccgccggcccaattcctcaagtatttctcgttgtaatttccgatgccattagaagacgaaaaaatcgaatttgtatgcaatttacttcatccaagggatttagagcggattgcttaacacaataacagaatttgtcatatacattgaacgattacgaagatctctgagatcacagatacagtacacggaattgaagccaagccagaaaatatattcttctagacattttcttgatattgtatgtgttcagggtagaattcagcggatatagatgcttattagattgtcagcagcgaactgatggtcattattttccgaaagctgttctgaaattattgttttgctgttacacttactttcttgttttacggtaaatgaactctataagtgttttcttagatcgaccttagaacaaacgtatttgtttcaaaagatatgattattcaactttttgatcgttatatataatgtaagcccaagcaagtatttttctaaagcttgttagttaaattggtctaactatcgttttcctgttggataacattcaaattttagctttgatcctagaaactattgttgaacttggattttacgttaaagcttaataaaacgcacagacttcgcaattataatgatttgaaatcgttgagaattgtcgttaaaaaacataaatgccgttgaactacgtaggtttgtaattgcttcaaaaacttattgaaata

SEQ ID NO: 1156 - DNA, 3924 bp, Aedes aegypti
atgtctgttgccgcagctctggtagatggacgtaacaactttcttcgtcacgatgatgcgttaccgaaaggatgcacctggaccggtgcggtattggaagtttcgcaggagaaaagatctgatgagctgcagtgcaaaatcaaaaccataaccaagaccgagagtctgctagctaatataagtagttatcaaattgataggataaaatcgctcaaattagagtgtaacgacataatgttcttcgaaagttccttagaatcgactactacgcctggaaactttctaggcaatttaaacagtctgctgaaattgtcgatagagtactgtaaaattaagtacatcccagcgacagcgttttcgaatatgaaaacactgaaaagtttatcactgagcacacacaatattgactggtctgttatgaacctagagctacatccggatagcttccgaggattaaccgagcttaaggagatgcaccttgcggataacaacatctggagtctaccaaatgaggtattctgtcctctttacaccttgcgggtgttaaaccttaccggaaacagactgagtgatatttctcagctgtcactgtcagattggggcaaaggtccaattgcacctggcaaagcttgcaacacaggactagaggtgctagatctgtcaggaaacgacattacgctcatgcccgacaacggtctctcagcattgagatcacttaatgcactttacttgcaagagaatcttctaaaagaaatcgctgaccgagcttttgtgggtcttggaacacttgaaatccttaacctctccaacaataagctaaccgcattaacgccagaattgtttcaatcatctcgcaagattcgtcaagttaatctacaaaataattcgctttcggtgttggcacccggagttttcgaaggactagaccggctcgaaatgcttgacctgtcgcgcaatcagctgacctcgacttgggtcaaacgagacacattcgccggtcaagtgcgcctggtggtattgaacctcggctataaccacctcactaaagtggaccagcatgtgtttaaagggctgtacagtttgcagattctgaacttggagcacaatgccatagaactgattgccgacggggcgttcagtgatctgaaaaatttacatgccctattcctctcgcacaaccgtttgcgacagatcgaaccgtaccatttcagcgagttgtacgttctgaatcagctgatattagaatcgaaccagattgcatacattcacgagcgtgccttcgagaacttaacccatctacatgatttaagtctaaacgataataggctggaagagataccgtccggtatgaagagtttgaagtttctgcagtcgttagatttgggtaaaaatcaaatatctgaaataaataactcatcctttgaaggattggaagagcttatcgggctacggttagttgataatcagataacagaaatttcaagggacactttctttgcactatcaacaattcacgtgctgaatttggcaagcaatcggatacgacacgtagaccagtcggccttcagttcgaatccaacgcttagagccatcaggttggataacaatgaactggaggatgtagcaggagtgttcacctccctcacgtcgcttgtttatttaaacatctcggataacaacattggttggtttgactattcgcactatccgcagtcgctcgagtggttggacatccacaagaacaatatatcagagctgggcaatcggtacgacgttggtaattggttccagctgaaaatgttggatgtttctcacaatcgtataaagtacatcaattcaagctcgtttccgaaaaatatcgaaaccttgctgttgaacaacaatctaatcgaggaaattgccccggagacatttaccagcaaggagagcattgtgaaggtggttctttatggaaatcacttgcgtcggctggaaatgtcatcactggcactgacactggtccctgatacgcgaactatgcctgagttttatattggagataatttaatccactgtgattgcagcatggaatggttacagcgcatcaacgagctgagttaccttcgtcaatatccacaggtgaaggatcttgattcggtgatgtgtacaatggagcacgagcgcggtgagttagtcaggcccctgatggaaatgaaggccagtgagtttctgtgtaaatacgagagccattgtttcgcaacgtgccactgctgcgattttgatgcgtgcgattgcaaaatgacgtgtccagaccggtgcaattgctatcacgacacagcatgggagtccaatatcgtagactgcggcagtgtgggattaaattcgattccggttaaaatcccaatggatgctacggacatttatttggatgggaataatttcggtcagctggagagtcacgttttcatcggcaagaaaaagctaaagtcactgtatctgaacaatagccacatcgatggcctgaataataaaacgtttggcggaattccggcactcagtgtgctgcacctggaacacaatgggctggaaagtatcagtggagccgaattcgagcagctgcgtgaattgaaggaactgttcctggatcacaattccatcagtgccatcggtaacaaatcgttctattatcagaaatcattggaagtgcttacgataagtgacaataaaatcagtgaattgaagccctgggaactgatgccactgggcggtaggttccggctaatctcgctaagtggtaataaactggcctgtgcatgtgaatcgatgggtaaactagtggactgggccgagcgacagtttaacgaaacgaacggactaagtgaatttcagtgttcgaataataaattactaaaggacgcgattaaggagtgtgagagccacaagagtgctccgattgcgacacctaccgtgcagcggacgattatcgataatgattttatagactatttgccactgttgattgccgtgctagccggactagtgctgacgattctcctggtgacgctggtgttcatcttccggaacgatgtgtgtctgtgggcgcattctcggtacggagtaaggatctgtaaggatccgctaaatgcgatggagcgatgcgaggatagtgagaagctttacgatggatatcttgtttatagtgctgccgatgctgatatggtcactagtcaaattgcacaagaattggagcataatggttacgcactttgcctgcactatcgggatatacactcggcagcctttctggcggattcactacaaggcgctgccgacgcatcccgcaagttaattctatttataagtgtgaaatttatgcaacttgaatggtctcaaccagagttccgagccggattgcaagcggtgctagagctaatccgaccatcccgacggaaacagaagcttatcctcattacttcggtgccccaatcgatgctcacgatggatcccataatggatatcctcacgcgaacctgcaccgttatctcgtgggacgatcgtcgattctgggacaagctccgttttgccatgccggacattggcaaaaattcccctgtaaataaagcccctcatcgcaaagccattaacatccggtatactccggctccaacaaatcctaccgcaccgacggccacctggccaaaacgtctgaactctgaagtatgcgtacagtatccaccgcagtcggctcattcccccaaccacagtacttacaacaccgaggatgaactttcgactgcttcctcgccacagtacgaagccccaacgcttcaccacgcatccaacaacaccaacaccctgggccacgtgtactccaccattccggagtcgcagtacaacacccatcactccaatcgcagcgatagcaatcgaccgtactttgtgtaa

SEQ ID NO: 1157 - DNA, 914 bp, Aedes aegypti
attagaaactgattggatctttctcttttattcaattttcagagtacctatacgtgtttttatacccaagatctaatcttgaacttttaatttgtgatatacttcattttaataaattaactatgagtgccgaaaactaccgaagtgctaacaaatctcatgatcctggttggaatgatcccccaaagatcagctacagtcctggagtggctgccgggtccggaccgacgtcaaagttaaacctgaataagcgcatagcttttcccgtagcaaagactgacactcgctcaaatcaaccagcagtaggagatgggggtactcttcctcaattcgtaacaggtgcttccgggggaatcgcgagcccactcccacctgccccaaccaaccgatctgggccacctttaccgccaatggctaccacaggcactcctccccggtgcagtaaaccgggtactaatgcatcagaggaaggaactctgatcctcccatcgaacgaagaaatgaaagattcggtgaagaccacgctggaagagttacttatgaaaacggaaacttccagacaggcggaagttcggaaacgattagatgtaatgctacaatcctggacggacgggaagcttagcgatgggctgaccagaaaactataccaattagctcaagtgcttaatgaaaagaaaatagtggaggcgaacgaaattcatcggtctatcatagtcgagcacgggaaggaatgcgttcagtgggctcccgctttaaggcagttaattcaggttgttcccaagcaggaagaaagttcatcgaacgttgaaacgcaagaacctattgtaaacccactgtaagtggacttggctacgtgcaaaattgaaaagaacaccgcaatagtattgcgaatatataaaaaataaaagtatatc

SEQ ID NO: 1158 - DNA, 1578 bp, Aedes aegypti
catcataacatcaaattcacgtaaaaattgcatccacgccattcggtctctggaaaaaaatccaatcaacttacattgaatttctaagttaaaacagttttcatttcaaaattattagttctttcgcgttccaagtgttcccgacatggtcagcgaagtggagtccagcgataccgatcagtggccggcgagtcaggaggcttcggaacctggagattcacaaaccctgcccaacatcggtggcgaaacagttcctccggatcgcagcggcgggaaaacggacgaattaagccacttggaagccacatcggatgtccgggagaagaaagcgtttagctgtacggaatgtggactgattttccgcaagcaggacgatttcgaccggcatcggtttgcccacacgggagtgagggaataccgttgtccggagtcgggatgtggcaaggagtacaccaatcgggcccacttgaatcgtcacatccgatcgaaccaccggtcgaaaatcccggaatcaacgaccaattccattcgatgcaaacacccttcctgtggcaaaaccttctcctcggatcagaacatgcgaaggcattacgacctgaagcatattctgggcaaatcgtggacctgtgacgagtgtggcgaacggttctggcgaaaattgcagttgaagcagcattccttccggcacacgggtcaatatcctcatcggtgtgaccactgcgacaagggattcatgaacttgaagtcactgaggcatcatcggacaacgcatgctatccacaaatgtgattcctgcccatcggaattcactcgctggacggacctggtggctcaccggaagttgcagcatgcgacactgtatcagtgtgatatttgtcagggcaagttccgttccaagaagaacctcaaggctcacatcgaagttcaccgaaaaaacagcgaaggaattgagcaggaggtgttccagtgcccgtacgaaggctgtcccaagttctacgactaccagcgtaacctgatggcccacgtaaaggccaaacacgagggaatccggaagttcgtctgtcccgttgaggactgtggccgctctctgtcctcgcagcagaaactggaccaacatcggcgaatgcacgaatccgccgctcggagtgtcccccgtatgaaggttccagggaaaccggtggcacggcggaaagacgccggtcaacagaagcgatcgaccgcatcgcggttggccaatgtgcgcctgcaaccggatgtggagcggatactgatcgatcagagccccgatcagaggccggcaatcgagctggagggctcgttctcggtagattcggcatccgaatcggaggtggaaccgtgcgttgcggtgggggctgtcctgcagggtcagctggcaaggatacaggatgagattcggcggctgcaggagcggtcttagcccctagggttagcgtagctgattgcaacgggtttgtatacaaagtatgtttgatttgaattctaaaagtattacctacgtggtgtagatgccatgaacaaggaatatatgccacaaagaagtcgatattcgtccacata

SEQ ID NO: 1159 - DNA, 1365 bp, Aedes aegypti
atggctcttagtaggatggtcgcttcgcggtgtctgctgctcaggaacagttcggttgttctgggcgccctcggttctaactccggttcaggggcggtattcaacgagtgttcgaaacaggtgcgatggatcagtgccagctccagagccggtgagaagctggccctggccaaagccgaagtcaaaggggtccagaagcacgactggaatcgagccgttagcgaggcggaacagatcgttggctatccgacgtcgtttttgaatctacggtttttgctcagtgacgaaattgccaatgtggcattgcatctacgaaaactgattggaagcaatcatccgttgctcaagtccgccaagtcactcatctacaacgacaaaagtcagcaggcatgggggctaatcatactgctgatctccaagacggctggacatacggcctccgttccagaaatggatcacgatcggagcgtaggcgtactgcactcacagcgtgcattggccgaggtcacggaaatgattcgcagctcccagttgatccaccagggcgtgatcaatctgcaatcgatggacaatgccggtaacaacttgagcggtgacagcgacatggttttcgggaacaagatcgctttgctgggaggtgattatctgttggcccatgccagtaagcagatcgcttcgttaagaaaccaagatttgaacatgctgatgacatcggcctaccgagacttggcggaatctgccttcatcggcgagagtgacgatcagaacaatcctttgccttcaaaaccggaaactcctgccggtatgaattcgcatgaatgcacactggaagaattggacttcggagatgtccgagataacatggaaccgatgcgaatagaaggagtaatgggacacccggagaaggaatggtcccttaggcatgttctcggcggaggaagtctcctcggcaaaagttgccacggagcgctgatgctggccgggcaccccgacgaactccagaaacagggctacctcttcggtaagcacatgtctctggcttggcaagcttcgatcgagttacaaccgttcctgctcaatcaactacctctaggtaccacgtttagtttggtttcggcaccggttctgttccacttggagtacgatccaagtgtttacgaactcatcgaaccaggcaagaactcgatcgaagatgtggactatgcagccctacaccgggagatcattcgcggtcccggcctggaaaagacccggaacctccagaagaagcacagtctggccgcgatgaacgtcctggaccggtttccaacgacagatgcccagacggcactgcagaatatcattctggcgatgcaacaactgtaa

SEQ ID NO: 1160 - DNA, 1380 bp, Aedes aegypti
gaaagttaccaataccagctgcagtccatgtggcagaagtgctggaacagccaaaacctaatccaccatctgcgcttccgggaacgtggcccgctgaaatcgtggcgcccggaaaccatggccgaagccatcttcagcgtcctgaaagagggtctctcgctgtcccaagcagctcgcaagtacgacattccctacccaacgttcgtcctgtacgcaaaccgtgtccacaacatgctcggcccgtccatcgacggtggcaccgatctgcggcccaagggtcgtggacggccccagcgaatcctgctcggcatctggccggacgaacacatcaagggcgtaatcaagagtgtggtctttcgcgatgccaaagatatgaaggaagagcagatcatgtacggcagacattcgccatttacgttccaagccgacaatcctttaaactacgcaccgaacgccaacggacaaatgccgaccgctggtgctgaaggattgacacccgatgctctaacggccgctacagtggccgccgtccgacaacagatgtgcaacatggtagcagccgcccaacaccacccggaagcggcagccaatctggtggggttcaacctgccccagcaccacactaatctcagcatccacccttcgggaaacgccggtggttctagcggtggaattcccgtccctaaggttggttcaccggccgtcacccaccaaactcacagtaataacggcggttccggaggaatccaaatgccacggctaggctcaccggccggatccagtatacactccggcaaagaacacgacctccacggcccacctggactcaaccagagctcccatccgagcacttcctccattggcggcaatgccaacagcaacgccaccgccatcagtaaccgttccgagtcatcacgcagcagcagtggcagtaatcattcgtccaacgccaaccaccatcatccgttggcccatatgaacagcggaagtctcagcataacccgactcggttcaccggcttcagcgcacgacctccgcatgacgaccccaccgacggaggagagcccactggcatctcccatgggcctggccttggaaccagccgtcaacctggctattggaggtggcaacgccactagcggtggccaaacttccgaacatctaggattgccacaatacggtggcggtagcaaatcttcatctcgcgccgggtactcttcctcgtcatcgcctccacggccggagcatctcttccaggaccaggacattgccgaactggtggccaacaccagggcggcagctggcgcaaacaaagacctcggtagacccgtggcttcggccatcaaggtcgaaccaatgaccgagtgtcggggcgattaa

SEQ ID NO: 1161 - DNA, 468 bp, Aedes aegypti
atgtctcggtttcccgatggcaaaccgaaggacatcgtccagtcgtcgcaaataaacccttcgtcgattcgttcttcccgttccaccattgttttttctcccggaacaagttcagcattcagggtcataaacccggttaatttcaacggaatatcgttgcgcgacgctgcctgtctttctgttccgctggcctactcaggagaaaagagcccgtcaactcggaaagattttcgcttcgtcgaatccaaatctgtttccttacaaacatggcttaccgttcgccagcagatgacattgaggatgagatcagcagttggggttactcgacatcgttttcagactacgaacgcacgctgcaagcgactagaagtcagcaaccccagtgcaaggtcggaggccgtggacgaggcatcctcaatcctcagcacatgtcttctgtgcgtcttgcttcggaaattagcgatttaa

SEQ ID NO: 1162 - DNA, 2183 bp, Aedes aegypti
acaggtcgtgaggatctatcgccttccagcagtctcaatggctacaccgacggcagcgacgccaagaagcagaagaagggacccacgccgcggcagcaggaggaactgtgtctggtgtgcggcgatcgggcgtccggttatcactacaatgccctcacctgcgagggttgtaaaggtttcttccggcggagcgtcaccaagaatgcggtgtactgctgcaagttcgggcacgcctgcgagatggacatgtacatgcggcggaagtgccaggagtgccggctcaagaagtgcctggccgtcgggatgcggccggagtgcgtcgtgccggagaaccagtgcgccatcaagcggaaggagaagaaagcccagaaggagaaggacaaggtgcaaacgaacgccaccgtcagtacaacgaacagcacctaccggtcggagatactgccgatcctgatgaaatgtgatccaccgccgcaccaagcgatacctctactaccggaaaagctcctgcaggagaataggctaagaaacatacctctactgacggcgaaccaaatggccgtcatttacaaactcatctggtaccaggacgggtacgagcaaccctcggaggaagatctcaaacggataatgatcggttcacccaacgaggaggaagatcaacatgacgtgcacttccggcacataacggaaatcacaatcctaacagtacaactaatcgtggagttcgccaagggactgccagcatttaccaagattccacaggaggaccagatcacgctgctgaaggcctgctcaagcgaggttatgatgttgcgaatggcccgccgctacgacgctgccaccgattcgatcctgttcgcgaacaaccggtcctacacgagggactcctaccggatggccggcatggcggacacgatagaggacctgctgcacttctgccggcagatgttctccctcacggtagacaacgtcgagtacgcactcctcacggcgatagtcatcttctcggatcggcccggactggagcaagccgaactggtcgagcacatccagagctactacatcgacacgctgcggatctacatcctgaataggcacgcgggcgatccgaagtgcagtgtgatattcgccaaactgctgtcgatcctgacggagctccgaacgctgggcaaccagaactcggagatgtgcttctcgctcaagctgaagaaccgcaaactgccacggttcctggaggagatctgggacgtccaggacataccgccctcgatgcaggcccagatgcacagccatggcacccagtcctcgtcctcatcgtcctccagtagtagtagtagtagtaacggtagtagtaacggtaacagtagtagtaatagtaatagttcacagcacgggccacatccgcatccgcacgggcagcaattaacgccaaatcagcagcagcatcagcagcagcacagtcagttacagcaagttcacgccaacggcagcggaagtggtggcggcagtaacaataatagcagtagtgggggcgtagtcccgggcctcggcatgctcgaccaggtatagctagtgtagggcacggtttccgggccggtttccattccactgctggccagcgaaaccatgcttccgccaccgtcgtcggtgtcgcctttccccggagcggacgacattctgttcattgtcgatggctagataaagagggggaaagagagagagatatagagacgcactcgccgcacgtggcgcttacagattctacagattttctctatacctataattgtaaaaaggctttaatttatttcttctttttcgttttggactttgtttttgtatattcttgcggttttccttacgcgcgcgagcatgccgctcgtagggaccttgggcagtgctggacactgctggtggaatattgacttaagtaacaatacctagataggagatacgaggggggcgcagattagaaggcgagacggaacgacacaagagggaaattcaacattctgacagcatcgtccagtggcacggttcaacgtagcaagtgactgaattacaatttttcatttttttttttgtttgaaacttacatttagtagggctattacgtttaggttttgactttttcgcaaaacaataaaaagtattccagtagaacgcaaaaaaaaaaaaaaaaa

SEQ ID NO: 1163 - DNA, 1135 bp, Aedes aegypti
gatggagcgagaatctaaattgtgttccacactaatatacatacattcaagggacaatcctatgctaattgaacaatgatccttaatctaattattttaaaccctaatcgtatcaatcctacttttaatcatggagctattgcacgtaaagtcgaaacaatccgagaatctattgaatgagactcacattttacgtatggggtcacttttaccccttttaccatagtgtgtacatcggaacggaagagcaaagaaggagatttcatctgataccatgattttgtgggcattacacgagaaagatataaaatttacaaaatatgaaattgacgtagcaaacgatgaacacttttccgaatggttcctagagctgaatccccgtggcgagttgccagtactgcaaaaaggcctccttatcgtgccaggttccacccggattttggactatttggaagaaaactatccgaacaacaaacctttaaagttacgttggtgcgagaatgtgaaattacaaaatctcaaaaattcgctggataaattaccaataggtgttataaccatgggttcgttcctccatccaaggacagtagtagctccaaaatcgccctttgttcaaccagttcgatacaccattcttgagcgggacgaatcagtcagcaatcgcttgagaggctacgcaaaggcatttccagccttcagtgaggtactgcagaagaaggcagagtttcacgatcgaaagcgccaaatgctggccagcgagcagtactttttacaattgttggacgttttggatcaagttctggcagatgcggaggcggaactgacaaaatcaggcgacgataagatttggatcgcgggagcagacatcagtctgctagatatttcattgggatgtctactgtatcgtttgtacgttcttggcttggaggatcgtttctggacagccgggaagaaaccacagctggagaagtacttcaatcgaattatggcctcggaaaatttccagcataccctgcctacgaagacatccctgctcaaaacgatttggctgaacacgccatcgacgtacaaagccggtattgcagcattttccttttcctcgatgatcataggatctaccctgctcaagagatag

SEQ ID NO: 1164 - DNA, 4131 bp, Aedes aegypti
gccctttcattacagtttcagtgaacgaagtttaccattatggctacgtcgtcaggcaaaaaagggaagaagacttccaagaagaacaagctctcgctcggagagttcctcaccgatggtaacgcggcggcggtatcgcaggtgcaggtcgccgttccggtcaagttcagcaactgggccgacgagtgcgacgaggacgaggacgaccgtccggtccgcacccagctgattgctctgccaacagctccgcgggccacccgcctgctgaacgatgacaccgttccgcacaatccgcccttccaggcgtacatctccaatctgccgtacgatctgaccgacaacgatgtgtacgacttcttcgacggaatggagatcgcctcgttgcgtcttccgacgcgtgacgatggcgaacccggacgcctccgaggatacggatacgtcgagtttgtcaagcgccaggatctgattgatgcgctgtccatcactgaaccgatcatccacggtcgccgtattcgcattgatctgtccagcgaaagcgatcgcggaaggcagcagcgtaaccgcggctacgataactatggcggcgattcagatcgtcccatgggtaactggcgtgacggacctcgtgcgaatgctgatcgtgaccaaggtcagagaagaccctaccagaacaactacaaccgcgatcgtggagatcgcgaagatcgagaacgctaccctgcagacagtggcgccggcggaaactggcgccttggagatcgtccacagccaactccacagtcgccaccttccagccgaagaggctacgatcgtggagatcgcggtgatcgtggcttccggcgaggtggagacctttccggagatcgtggcggtcggagagatgccgaaccaccgatggagagaccgaaacttgtcctgcagccccgcacattgccacttccggagaggcccaagccagaaccggagccggaagagagagattccagccgggatcgtaagtacgactccgaggcttccgagaacaaagaaaacgaagagcagaaagacacccgccctaaacctaccccagtgcccgcggccaacattttcggagccgccaaaccagtggacactgcagcccggctgaaggaaatcgaggagcgaatgcaggagaaggcacgactggagaaagaggagcgtgctcgcaagaaggctgctgctgccgccgaagccgcggccgtggctggatcctcggccgacgaagacggcaaggagaaatccgatcccagtaaagacgaatccgccgaagaacattccgaggaacagcagcacccggagccgaaaaaaccggtggaaccggtcaactggcgggtgcgatccgatgacaacagagacagcgaacggcgccggcagtcaccccagcggaggtacagcccttcgcgcaactacaccaaacgatccgatgattactcagacaatcgggacaaccgggaccggggtatgaaccgggacaatcgcaacatgagagacaacagacgagattacaatcgaccaggcgatcgggatcgcgatcgcggctaccggggagaccgtgaccgggacatgacccgcggaggaggcggccgtgacatgcgtgacgatcgcgacaaccgtgaccggcgggacaacgtgcgacagtacgatcagccgcgcgatcgggaccaggtaccgatcgaggagcgtatgccaaaattccaggaatcgtctggacccaacctatcaatgaagaacacgttcgacggattgtcggcggatgaagtcgacgattagagcagttccaatctcaaatctagcaaaacaaaggaagcagacgagaagagcccttgagcccttgagggtagggggcgtaggttcacaaacatataaaagcaggaggagatcaactaactagtagtattctaatacaagaaacaagggcacctgtggtggggacaggaggagaaaccattttggattggaaccaatattctttgattcacagcggacacagaaaggaggacaggaggacaaggtactagagaagcgattaatataataatatcaaacagagagcacagcataaaaaaccgatagcgacggagcgtgagacgcatacacacatacaggcacacacatacacactcagagactagaacgaaccaccagtcggtcgatcggtcgctgactagaagggataggttacaaatagcgcttagagtgctagtgcatagattaagacaatgctgccgctggcaaggagctgacggggcgatggaaatgcagctctttccgtggctcgatgtgcggacttggggaagcgaagcattttcatcgcccggtcactttcagcagccaatcgtgcgtgtgcgaatgaacaaaggaggagaatgggaaccggggtagtagatcaaagtttgtaaaatattctattcactgtgtgtaatttatgtgtatgtgtacccaatggacccggcttcgaggtgttttaccgggaagttgcatgagatatgatgcgaagatgtatgtgtgaagtatgtgatgagcatgatgatgatgtgtgtgaatgcataccataaagatacttttgttttaaggaaattaagcagtcggaacacgttggatttccatttggtagaacagcaaatcgaaatcgtactcgacggtgatgatcccgagagaaagacagtcgaagatagcattcgcattttttgataagacaattttacaatcacaatctcacacattacacacattgattattgcagcagcagcatggtaattgaatactcgttcactatcgaagtatgattaatatatatgtatgtaaatcatgaataagagtaccctcatggaagtggcagtgtctgccttccctggtgggagttctgattccaatgtacaatgatctgaagcgacaatttagcaggaataagatctttttttctgtactcgtcgattttagacgtatgaagtctttagaaaagatctccagaaaacttgatctaactctttattcgagcttagtaaatcagttctgaatgtttaaacttgtggtggatccagtcaatttgtttgcttcgcggatgatatagacactgtaagccaaacatttgaaaagatggcagacctgtacacttgtacgttttatctttcgatcttttcattaattcattcgtctaaaatcaacgagcagacatcattcgtctaaaatcaacgagaacagagaaaaaagtttttgccttgccaaattgtcaattcggaccactgtgcaatgatcctctccaaaccttcgacttatcttttggaatataattttgttcgttggtttccttcgtcgtcgttgtcgtcgtcggtgtgtgcgtctcatcggtgtaaaagttagaatacgatgcgtgtgaccattaattcttagagaaaagagagtgtgttgccgaagaaatgattccaaaatgtgctgatagaatgtttaatttgttctggcaatgatttccccctgttcgtttcctccattttgttttttttacatatataaataggaatgtataacatttacaaatttctgttttattctatttaacctctgcgaaataaaaaaagctgctgcgaccccacaactattgcggggaggaaatcgcttaattgttatataacaatattcgctgaatttaggacgcgctatcgattaatatggttaggtagccgaaatctcagcaaaatattgtctaccttctttttgcgtatgatatacttacagacttacacagacaacacacacatacatacaaaccatatgaactggcaatgtttctttatattaaacagaagaaagctcgtgctcatagataatcaagaatgaagatataaacaaatagttaatttaattgtttaataaatgcatgggaactgtcaacaacaaaaaagtctaggaaagattgccacctttttgtcgcaaattagttatctattgaaactgattttttctgtatttttttgtcgggaggcgtatgatggaattatttagagttctactactattaattacccgtacccatatataggctaccatatacgggaagctaggaaaaaaccaacttgaaaaaaggcaatttcagaatacagcatatacatctaagg

SEQ ID NO: 1165 - DNA, 1247 bp, Aedes aegypti
cctagcgctgatgattcagaacactatcacatggacctgaaatgtggttgtgctttgatgtatgccatgtagtgttagattgccagatttagcttagtgcttagctgattatcggttgttgtagtttaccatttgcttctgaactgataaggaagcaatcaaacaagcttcgtcgatcgccctgattttgcgataaaatcaaatcaatcctacaacaacatgcagagcagcgaggcgcttcgtacaggtgatcagtgtcgccatcgttttcgatgcctactttgttcggatacgaacatattttgcgattgttacgcgcactgccataaagatcacccgaagcaaccgctagtgacggacgatcatttactcagccagtacggatccaaaacggactattcagaatactcggagatcagcgtgttcaactgtccctactgcgacaagcaaaagctcagcgtggggacactttacgatcacatcactctcgaacatttggatgtcccatttaacgtgcgttgtccgatctgcgtgtgcttcggatcgaacaattcgttgatcgaaggcattcacctgtccaagcacatagtagacgatcacagcgttaccatggagcagtaccacgaacagatactgatctacgacacccactgctacgatgagagggagttgctcatttttctcgcatccacgttgcctccgacttaccacggtggggaagactacgaggtggaatcggaaatcgtagcaaccagagcaccgtcacaagcagcaacctcgaccgctgggttgctgcgatcgccgatgcctcaggcggcctcatcaaatgccccccggacgattgcgagtacctgtgcgatttgtttggacatggtgctgacggcccggactctgccctgccagcacaagttccacgcggcctgtatcgatctgtggttgcagcagagtgcaacctgtccgatttgcaggaaacctacctagtggcgagagagctgtaggggtaaattttagtttaaagcgattattgttctaatgatcaaaagcaaaagtgcaaagaacattgatgaattaaaaagctgttttcataagttttgctttattttacgacaaattatcgattgtaatttttgaaagatccttccttcacaggttaaaaattagataccgtaaaatcgagtaaaattgttaattgtgtcatacgatctcatttacaaataaattacaactttcaatgtaagttttcagat

SEQ ID NO: 1166 - DNA, 1716 bp, Aedes aegypti
atggatccgtcagaaagccattgtatgctctgcgatcggccgaaccacgtcgacaatttagttcagtgcgaccgatgtgacgggtatttgcactattcctgtgccgaagtgggggactcgatagccgatcccgatcggagtttcacctgcaataggtgcatcgagagcgacgaagtcgtcacggtatcctcccatagctcccacaggacttcaaacagcagccgcagtgcggcccgagcagcactacgtctccagcagctggagaaagagagacagatccgccgcagagagcttgaggacgcggaaaagtttcagcgaatgcgccgccatgagcaacaactccaagaagagaacgaagatggtagcaccagtacgagcagagtaagctctagaaggatccgcgacaacaccaggaagtgggtcagagcagcgagtcagaccggtggagtgaaatgtccaatagctaccacatcgactcaaattggttccacaattcccactgggacctcgcagaatccagctatcgctcccgaaggtagcactgaagctaccctagcagttccgttttccagtggcataaccagtcgagtgccggcacctgtcatggcgatgagggtcatcggcaattctggggaacagcattccaaccatcctacggaagttcgtaccaccacgacaaccaacagcgaccaaggaatgatcacgcgagctgaaatcgttcctccggcaaatctgcagattgaccaacaacttccgggcagaatgcagcagatagcaggagcagctcggacgacgaccgattgcaacatgtcatcgggcaccggcggtgagcgagtaggagcaccaataagcgtaggtttgtctacagaccaggtgagaactagcattagcactttacacgtcagattacagccgatagacgaggctgctcaaactagtacgccgaaacaggcacctgtagtacaaacaagcgtaggaaatcagtcagggcctagagaaaaaccaaattatctagccaaatcaggcaatacgataggagcagttcagggtcagctaccactctctactctcttgaacatcttgccaggggaacctcctccgggtccaaaggggattggtctactaccaccctttaaatcaaccttgttaactaatccaaatccatcgattagtcaacaaccgaacagtcaaacgatcggtcgaaaaacgtcggtagtttcgtctttattggaacgtggacagtgcggtcaatcaaatccatcacttgttttgccagtgtcgggacatcagcagttcagtgtgtcgaatccccaagaatctcaaccaccgttgggacgagaacagtgcatggtgtttagtgaacgaaaccaatcagtgatccagcccccaccgggatacgaaaaatttgtgaggaattccgagacagcaccagccggttcctggaacacgtcgtatccaacgctcgcgaatcctggttcagcaaactttttccggacatcaggttcgtaccagcagacacgccgcctcccagaccatgcgttgaattcgacggaatatccaccggcgtttggtcatcagcaatgccaattaccgagttcgacgatattgggagcccaaccaggatgtcaagcatttccggcacctgaaccggatcaatccggaccacaaacgggacgaactcatcatatagatcggttggagtcagcactacgttag

SEQ ID NO: 1167 - DNA, 1384 bp, Aedes aegypti
cggatatttcatttcgcgggtatgcatcggaatggcaacacattcgagacctgctgttccgcacggcagaacacggagaatccaacagtgctttgctgctaggtcctagaggatgtgggaaaaccacgctggtggcatcggtgctggcagatttgcttccgaatgaggatttctacaaaaatacgttgattgtgtacctaaacggattactccacacggacgatcgattggctttgaagtcagccacagcacagatgaatttggagaacgccgtcaatggtaaagtgtttggatcgtttgcggagaatctggcctttttgctggagtgcctcaaggcgggggacaaaaaacggtccaagagtgtggtcttcatacttgaagagtttgatctcttctgcgctcaccataatcaaacgctgctgtacaatttgttcgatgtggctcagtctgctcaggctccgatttgtgtgctaggaataactgcccgcctggacgtcatagaactattggaaaagcgagtcaagtccagattctcccatcgtcaaatattcatacttcctagggaagacgatatagaagaacgagtggaattatttaaacttctgctgaaactgccaacggataaagagatcaaggaatacacaaagcgtaataaaccaatcccttgggaagcactacagaatgatgaacttccattactgcgacgagttttcgctcctagtgcctattcgtttgaagccaaatgggtctctcaatggaacaaacatattgatgcacttgctggcaatcccaaagtggtatccgttttgcaaaacatgtatgattacgatgttttggaagccacctttaaaacgttcctgtttgaactagtgtcgcatttgagtgaaagtgatccttttataaccgttgaagacatccagcatctgggtcaacagttcgaatgtgacgataagatcaatttactgtgcggattgtcagtgttggagcagtgcttgctgattgctatgaaacatcattcggaaatctacgatcgagatccgttcaattttgaaatgattctgactcgatacagcaagtttgccaattccagctctacgatgcaaggcattgatcgtagtgttgttctgaaagcgtacgagcacgtgaaaaatttggaaatcatagccccagtgtgtggttccagttctaaagttcagaaagaatatcagttacataggctactcttgacttacggtcaaattaatcaggctgtggtgaaaacaccaaaccttcccaccgaagtgagtcaatgggcacaaagttctttagtatagtattttgtactagttttagaatcgttgcaaattgtattctaattgtaataaaagttattatttattttaat

SEQ ID NO: 1168 - DNA, 1471 bp, Aedes aegypti
acattcatcattagaacaagtcaacaatgcccgtcctgatgaagcaagttggaacaacacgaaagctgttaaaatctcgtcttcaaacggatatttcgtttcgcgggtatgcatcggaatggcaacacattcgagacctactgttccgcacggcagaacacggagaatccaacagtgctttgctgctaggtcctagaggatgtgggaaaaccacgctggtggcatcggtgctggcagatttgcttccgaatgaggatttctacaaaaatacgttgattgtgtacctaaacggattactccacacggacgatcgattggctttgaagtcagccacagcacagatgaatttggagaacgccgtcaatggtaaagtgtttggatcgtttgcggagaatctggcctttttgctggagtgcctcaaggcgggggacaaaaaacggtccaagagtgtggtcttcatacttgaagagtttgatctgttttgcgctcaccataatcaaacgctgctgtacaatttgttcgatgtggctcagtctgctcaggctccgatttgtgtgctaggaataactgcccgcctggacgtcatagaactattggaaaagcgagtcaagtccagattctcccatcgtcaaatattcatacttcctagggaagacgatatagaagaacgagtggaattatttaaacttctgctgaaactgccaacggataaagagatcaaggaatacacaaagcgtaataaaccaatcccttgggaagcactacagaatgatgaacttccattactgcgacgagttttcgctcctagtgcctattcgtttgaagccaaatgggtctctcaatggaacaaacatattgatgcacttgctggcaatcccaaagtggtatccgttttgcaaaacatgtatgattacgatgttttggaagccacctttaaaacgttcctgtttgaactagtgtcgcatttgagtgaaactgatccttttataaccgttgaagacatccagcatctgggtcaacagttcgaatgtgacgataagatcaatttactgtgcggattgtcagtgttggagcagtgcttgctgattgctatgaaacatcattcggaaatctacgatcgagatccgttcaattttgaaatgattctgactcgatacagcaagtttgccaattccagctctacgatgcaaggcattgatcgtagtgttgttctgaaagcgtacgagcacgtgaaaaatttggaaatcatagccccagtgtgtggttccagttctaaagttcagaaagaatatcagttacataggctactcttgacttacggtcaaattaatcaggctgtggtgaaaacaccaaaccttcccaccgaagtgagtcaatgggcacaaagttctttagtatagtattttgtactagttttaaaatcgttgcaaattgtattctaattgtaataaaagttattatttattttaat

SEQ ID NO: 1169 - DNA, 1419 bp, Aedes aegypti
aagcctgttttagaagaattgactttgcttaatcgtttggatctgagttcgaatcaatttcgaatgttcaacatcggttcatttaaaggtttaagtaatttaacggagttaattgtagcagataacgagctggaacaaatttatggaagaacattcgaggacttgatcaatcttcaagcgctggatatgtcgcaaaacaggatcgactacctaccaagtgcagttttttcgataaacactaaactgaaaatcatcacactgagagaaaaccgaatgaaatatcttagtgcaaaagcattccaagggctgtacgaactagaagagctggacttgtctgcaaacggaattcatatattaccaaaaactatttttaggccattacataaattgaaagtgctgcttttgaatggaaataatttggattttttgcaggagtcaatattttgctcattgcaaagtttggaatttatgaatattgcagataaccacgtagttaagcttcaacagtcaatattcaaaccgttaacgaatctcaagctaaatgtcattcatcttaccatgtccaacaacaagttggaacaactatcgagtgacaaatttaacacggacattcatagcattcatttggatcacaacaaaatagtaacagttgcccttgatgccttcaaaaaattatcgcaactagaagagttgaacctaagttttaattccattggagaccttcaaccagcacatctaagcggcttattgtcacttaaatatttggatttgacaaacatcaatttgagaaaattaccggaaaaattatttgcctcgcaaaaccttctgcaaacactaaggatgggagacaatatgttagaagagatacccgaatcaacatttttcgcaatggaagaccttcaatatctaagccttgaaaacaacagaataagaaatttaattagagtgctctctcctacgcatcttaaaagtctcatcaatttgagagtactttctgtgttcaataacaacttggaatcactgcacaacgatcagtttcttaacaatgaagctctagaagaactgtttttggatggaaacgagatatcagaaatatcgataaatgcgttcaacggactcagccgtttgaggatactctatttatcgaaaaacaagttgaccaagattcaggaaggagtttttggtgcattggctgctctaacggagcttaaattagacaaaaattctctagttgagcttccagctgaattacttcaccaacaaaaagctctcgagttcttgtgtttgtcagaaaacaaattaagttccattccggaagatcttattcataacaacataaaccttaagattcttgagatcaacgacaatcagctaacaacaattccagaaggtacagtctctaacaggagtgctgcataa

SEQ ID NO: 1170 - DNA, 721 bp, Aedes aegypti
gcttttatatccgacgaattctgtagtcgttcgtagccgatgcgaattgtagtgtggtgaaaaaaaaattcaaatagaaaaaaccctaccagtggccgcagcaaaagagtcctaccaagcagtgcgatgctcgagaaaaacgtcgaccagcgataaccgtaatcctgatgacaaccctcggagtccgaaaagaggatcgctgaggcaatccatcacaccgtcgctcctggcggtttccctattgatgtggcgaagaggatccagttttttcgccggatttgtccatagaaccaccggtgccggaaatcgccatctggtggagttctgcgccggaaggatgaatctggtcaacaagatggttcacccggaaaaccggaaggggctggtctacgtgtaccaggcagaaaacgggttgatccacatttgctggaagaatcgcacgacgggaaacgtggaggacgatctgattgtgtttccagacgatggccagtttaaaaagatcgagaacgtaaataatgggcgggtgttcctgttgaagtttaagagttcgagccgtcggctgttcttctggatgcaggaaccgaagacggataaggatgaggagtggtgccgccgtattaacgagttgatcaacaattcgccgtcgtcgaacaatctgggagagagatcgagacgcggcggaaatggaagcgacaatggggacctgcagtacatcatgtaa

SEQ ID NO: 1171 - DNA, 1820 bp, Aedes aegypti
cctagatccgaagcgcgaaatttgcaaacaaacaaccgttacagcagtaactgttcaactcatccagtaaagcaccgttgcttttctggataaattctcgtgttctgtaattagagaattagtttaataaacaatctgctaaaacatttccggtttttcccgaatggataccaatgcaggttcgtcatgggaaccgttggccaaactggtttcgaacctcaagctgcttccgttgatcgaaagctgcgagctggtttggccgtctcgattggacatccagctcatggcaccaacttacgagaccgacctacacaagatgaagaccctactggaaggtgatccgtcgcagttgctgcaggaatccgaggacaacgacgtattgagatttcaggtatcgttcatctcttgctgttacgaatcgacggcgtttatgctgtccgaggaattggccgctgaacttcaaacgctgagggaagaatttgtttggggcaaactcatgaagctgaccacaagcgacacgttgatttccaaattgttcgagtactatcggcgcacgcttctcggtgaagattggttctaccagttcggagatgtgaccagtttttgttcgttcgtttgggatttggtggccttcgatcgggacatgagactgatggatcggaacggtatgcagctggttgagcagttttgcttcaaattgatgcgctcgaagaaggtacaactctttgtcaaaggcgtaatggttctggaggaatgtattcacaaagcacgcgatcgttccctgatggattacgagatggtttacagggaactggaaaagcaaaagtggcgtttgttaacggaggacgaaaggagtcaaaatgcgtccattatactgctgacagggatgctggaatgcgtgaaagtgctcgaagtggacaggaatcaactgatgaccctcatttctaacttcagtcagatttgccgagctgatgatctgatggaaatacttttgaaaggattgaaattgtcaacttcagttgggacgtcgattgccctattggatgtccttttgcaattgttggctgtagatcacaatgatctacgaatagtaccggaagaacccgctgaggaatgcgacttagatgaagttggctttccattgatattaatgaacggaacgcaaagaatcgatacctattccgatgattggtggaaggacatcatcgatcagaacagaggccgtttccatcggtggaccaaaaagctgtttaagctactgatgtccgaaataggaaaatatgagaacttcaacgttacacactttcagtatctttcctacgcgatgttctttacgattcacagcggagaatcggtaacaaccgaacagattgaatgcatttttcaatcaatggtgtcattcgtcaagagaatggtgaaccgcatcgaaacccagataacttccggcatgcccacaaactccacattaagaaactgcatgcgattggcagctgccaatgtggcgtgcacaattcactatggacgttgcatgtcgatttcggaaccagacgaacgagacgtctccggtcatggatctcttcagacacagagtttgaacaaacttctgctgaaagttcaacattggtagagagtggccaatcatgatctgcatggatcagggttgagaatttttattggtggtaagatttttttgattcgaattcgcatatttgactgtatgtttcaaagataacaataagtaatggtcgtttaccgatatcagattgaatggcctacaattctcaaatgaaattatacgcaagaagtataaatcccagaaa

SEQ ID NO: 1172 - DNA, 1596 bp, Aedes aegypti
ggtaatcaacagcaaatttatagcagcaacagcaacagcgtccaacagcgtcagcaacagcaacaacgagtggaaacgttgaaattagaactgttttctccgtgtagtttcttctgctgaaattgttgagtgtttttgactcagtgtagttcaggcatcataacaaaataaaatacgcaaacgcgctgcataggaatatggaagaacactcggacatgttcgcaaacgaagcatacgactatgcatatcttgacctaccccacgaagatttctccgcatactgccggctgtgcttttccatctcgcagctggagcccctcatcatgagcggccaggccagggaaaataaccagataatcagtgtgattgaaacgtgcgtcggaatcaagctgagcccggaaacggacagcccaacgtcgatctgccggcagtgccggtatatgttggacgagttcatttccttccggaagcagtgccaacgactgaatcgggtttatcggcggaaacagtacgaaagggttggtgaagtcggaacgacggactcggtttaccaagggaatgagattattgtggctgacgctgaatcgtatgtcgagccggaagtggcaccggcaatgatgtccaatgaagcgactccgatcgaattgctagatggaatgtgtgccacattagttacccatgaaccgtccgcctttgaggcttcggtggctggcgggaatgaaaccggtccagaacacttcaccgtgcatgatataaccaatgaagacgacgatggtttcgaatggattcgcgttcctgatgacgtcgagatgggtgaggatgataatgacacatttaccgctctggccaacgattggttccgctgcaagttgtgttccggcatgtacctatcatttgtccagctggcgaagcatcttcgggaaattcatccggaggcggccattgccctgcgaaacttggtgaacgactcatacttccatgtcaagggcagtgagctgcaaacctacaagcacgatggtcataatttggtcaaatgtgatctctgtgataccctattgtgcagtagagctgccattaggcgacaccgttggagatatcacggcttgttcgacgaaaacccggtgatccgttgtagagcggcggcatgtggctgcttcttcatggagaggaaagcactgaaccgacatcgggaggttatccacggacaccaaaggaagaggactgtgagaaagccgatgcagcaatcacaggtggcaggcgcaacctgcgatggtgccgcaacaaatttcgataacgaagggggcgacgacgatgacgaggacgatgatgtcgtgttcatttccgatgatagcgctcctcaggatagtccggcgatgacgacggatgcgatcattgatcagtgacttacaattgattaataatattaatacgtattaatgaaagataagctggaaatgcacgcgttcatgatttgcgagagaacattcaattcattcactcattacttttacctttccctgcaaaaccctttatctagatctagagagtaagggcatccagcacatcaacatcttagttgtgggttcgaatcctgat

SEQ ID NO: 1173 - DNA, 762 bp, Aedes aegypti
atgtcgatccatttttcccacctctccgcagatttccgaataatccgaacgctacagctaacggaaatcgtcgtgccggacgtggtcgatgttcgtgatacgcccacactgtcctgcagctacgacatgggaacgcacacgctcaactcggtcaagtggtacaaagacgaaagcgagttcttcaggtactcaccgatgctggagccgaacgtgcggacatttccggtggacggcgtcagcgtggtccgagactcgccggagcactattgcaaccgattcatgtgcagcatccagctacaaaggctcaacatcaaatcgagtgggacctaccggtgtgaggtcagcggcgatgcaccggagttcaagctggctcacggtgtctacaacatgacggtggccgagcatcttcgtgatatactttatcgtcctgttcaacgtcctcacttaaatccacttttcacgctttccgaaacaagacatcgaaacccgtcggtcaccgagcgacagaaaaggaaccgcacagcccggcacacaattttaatcttcaaattattcaaattcaccgaaaaccacaatcaattcaaattcattccgttgaacagatttagttcggacggcttgtctccgaacaaggaaatccctcttccttatttgagggtgcaagaggctggcccgaggaggaaagcggtacgaggggccatcatcttcatcgcctcgagttcaccagatttgtgggatggacctaaaaacggaaagatttga

SEQ ID NO: 1174 - DNA, 561 bp, Aedes aegypti
atgcaagaccaagtcaaacccaggcacgtcattccctatgccctaacgaacttgaccccatccggaaaacggaatactaattggctaatttttcacttctcatcctgtttcatccgcgcagtgcttccacagtacgaccccatcatcaacggactgcagcacaactacgccttgggcgatttcgtggtggccaactgctcctcggacatgtccagcccaccggctcggctctattggttcatcaacgatcgaatcgtcccatcggactacctgcagccgcagcaggaaacgaccatcgagagcgacgggttcatcctgcgctaccggacgctggagctgcgattccacatcgatgaggcgcggctcggcaaaatcaagggcaagctgatgctcaagtgtttggcacggatcgacgcgtttccacagggcacgcgggaaaccacccaggtggtgtacatcccgatgacggacgagctgcgtaaccagaagctcatcaactggcgaaacggagccggaatgaaatatttgggagagcattttcggcagaaggttaaattataa

SEQ ID NO: 1175 - DNA, 3753 bp, Aedes aegypti
atgaagctctcaatcactagaccagacacactcgttccgtggaagctgttccggcaggagctctcccaggtgcatcctatctgctccggactggaagcgatggcactcaaaaccaccatagacttaacgtgcaatgattatatatcgaattttgaattcgatgtgtttactaggctgtttcaaccgtggaatacgttgctgagaaattggcaaatcctagctgtgacgcacccgggctacgtcgccttcctaacgtacgacgaagtcaaggcacgcttacaaaagtatatcaataaggctggtagttatgttttcagattatcctgcacacgactaggtcagtgggcgataggttacgtaacggtggaaggcgacatcctccaaacaattccccaaaacaagtcattatgtcaagctttactagatggtcatagggaaggtttttacctttaccccgatggaaaggcccagaatcccgatctctcgtttgccgtgcagagtcctctggaggatcacattacggtgacgcaggaacagtacgaactgtactgtgagatggggagcaccttccagctgtgtaaaatttgtgccgaaaacgataaggacattaggatcgaaccctgcgggcatctgctgtgtacgccttgtctgacggcgtggcaggtcgactcggaaggacagggttgcccattctgccgggcggaaatcaaaggcaccgagcaaatcgtagtggacgcattcgaccccaggcggcagcacaatcgcaattcggccaacgggcggcagcagctgcagaacgacgaccacgacgatgacattgaggacgatttcaatattgcaacctcgtcactccacgcgctgagcaatagtatgacactggcacgcaatgaaaagcaaagcccgcactcttcaccgcggctgcctcggcgccaaccaaatcccaccgcaccagtgctaactagtaacgatatttatgcaggcggtccctccctccagtcccagtcgagcagttgcagctatgcgtcatcctcatccagttcatctgccagtggtagtggtggtagtagtggttgcagcagcggaagttccaacagtggacaacagatggcagccttagtgacgacgcctgcagcagtagcagcagccgcagctgcctcagcaccaccaatggccgccactgccacccatacagtcaatggaaatctcgtcacgcacaccaacatctcattgaacaataacagtcactgtagtaatatgtgcacaactggtggtggtggtagcagtggatctagcgggacaccaagccataatcttgtcaaatgtaacaagtcctcatcttcgtctctcctaccacagacacaaaccaacgtcgctccgtcggccagcacacactcacaacaagtgcaacaaaatcgactaagcgcaccggcaagctcatctgtagctacacctagcggaagcaatcccagcagttatctaatgtaccgggcactcagcaaagctctatcctccgagagtcagtcatctagttcgatggagtcaatataccaacctttacctcctccactaccccccagaaaatcctctcccggaattctaacatccactccttcctccgactcttccagatcaaaatctaccaatcctcgttgtccgtcacaattgctggcagcacgcaatacccagaaccaaatcaattcagcatctagtctttgcaacctctctaatcaggttgcaaccagccttaatctcagtcgcagttcagagaatctctcaagtgctatccgcatcgacaaccatgtccctaaaaccaatccccctccagtcccaaagcaccagactcccatcgaaccttgtccttgtaataacactactgctcctccaaaaccccccgaaccagatcctttcaaccaagaggatctagacaaagtaatcgtcggacccgctgaaaccatcgtcgggatcatcgacacccggccactggaagctcgtcaacccatcatcctcaaagtagatgacaaaaatgatcacaatctagtcctcaccagtacaagcaacgtttaccagttcaaaccaacctctatcagcaccaacatcaatggaatcctgtccaatgaggtaaccatctatcaaccagcacagcccatccttccgcaacctcatcatactccaaagcaaccgcaacctcagccaagacaccagcagcaacaacatcaacagccacaatcctgcgcaactatccaaggcaccaacccgcaacaccagcgacaccagtcgctcccagcaaacaacgccaccatcaacgctaaggttactcctcaaccgccttccaagtcaatcaccacttcccagctgtcggcggctctggccgcagccgccaccaaatccgacagcaccaacccactcctctacgagaacgtgcacctctcgtcgactgcgacctccacgacggattgcaacgggtcgagcacaacgagcaacaataaccacctgagcagcagcgctgtggctgcggcaatggctgcgtccggcagtgcgcacggttctgccgcagccaacaacaacaatacgaacgtgccctacgagaacatcaacctggagtatatcgcccggttgatgcaggaaggctactccaaggagaacgtcatcacggcgctcggtatttcccgcaacaacatcgagatggcgtgcgacatcctgcacgagtttgtcagcaaaagcggaggcgggggttagagtcttggctaccctttcaatcatcatgcaatacattacataaattacacgtgtatagaaactgtagtaagctgtcgcgtagcgaccaacagaaacgacatagactgctaggacgatgagatgatgagagagcagcgtgactctttggattctaatttattttctatgtaggtagaagtagcagtgtgagggttgacgagaaagcgaataagtgaaagcgagagtgctcgtagttcttagtacactaagaagtagtagttgaaaacaatcatctatagcaataaattgcagttcacaaaggcgaagggaagtgacctgaaatagtttctgtggcatctctcaatgttgacagtgtaaatagttagtgtgtgggatcatgactagatataagaataaacacaaacacacacacgcgtatattacatacatacacatactgcgcaactatataagcatcttgtgaaaagtgaagctttgttttagttccttactagcagctaattgaatttaatataaagaaatgactctgttctgtagaaactaattattaggagaaagaattatactcaagcaaatcacaacaaaaaaaaacgaaatgtcaaacagatcaaaccagagcaaaacagaattcaagcacgggttttccttattttctgtataattagtttagttttgtcatatgctactgactacgattttgaaatttcaccgaataaattgaaaatgaaccaaattactctcgatatattatgcttttcttcatattccacgcagtgagactggatagggcaattttcgtaatgccaagaaaaataagctacgacccatgtatgagtaacgattgttgttacaaagaaaatgcttgtaatactaaataatcgaagagatctatgacacttaaggcaaagtagtccgtcattgaaatttgaacgcgtcgttgatggttgttgctaattcatctcacgattttgaataaaagaaaaatcagttggttttgcactgacacagctgaaaaag

SEQ ID NO: 1176 - DNA, 725 bp, Aedes aegypti
attggatgagtaatcccttcgaccgagtggtgtgtggagattttgcaggtcccaacggatgcccgcgtcgacgaggccggcaaacgtacacccgcttccagacgctcgagctggagaaagagttccacttcaaccactacctgacccggcgacggaggatcgaaattgcgcacgccctgtgtctgaccgagcggcagatcaaaatctggttccaaaatcgccggatgaagctgaagaaggaactgcgggcggtgaaggaaattaacgaacaggcgcggcgcgaacgggaagagcaggacaagatgaagaacgactcgttgaaatccgcccagcaacatcacaacagccagaagcagcaagagcagacgatcgtcggttcccagcagtccagcggaggaggcggcggcggcggtggcggtggtggaagttcgagcctcggcagccacctgcaccatccgtcgatagtggcccagaacgatctgaaactcggcctcggcagtatgggcgtcggcgtcggcgtcggagggaatctcagcatgatgggaggtctggataataaaaccaatcaggatatactgaaagcccgtggttctcttgtccgggagagtttcttcacggttaacgaaactatattacgattacgatggacgacaagagaatacgttattgttgctttgttctatcctgtcgcagcaagttccttgcttttgaagtttcgcgattga

SEQ ID NO: 1177 - DNA, 1614 bp, Aedes aegypti
atgatgatgatatcacatcagatgaaccaagtgtgtagttctatattgaactccaccttccagaagctacagacacagatgctgaatcgttttcagatcgtgaaagcaaaaatgccacgcagagaatcagctcgtcgaaatcacccgctggcctgcgagtgcgacattctggaaacatgttcgatgcgtctatcactgctgcagatgacattcggcaaacatatcgagcggaagcactgttgcttctttcctggcgggatcctagatgaagtgtattcggtgctaaattatatccggagtacaccgacgctggcccgacccttcaaggtgaccgacgagctgtttgacctgtcgacaatggccatggagtacttcagggagcacctggaaccaaacttacctgatatagcatgctttagcaaggattacacatctagtacaaaaccgtttacgaccctggaggcatcgtcctccatcctatcgcgggacacatcacactcgagctcgtcctcgccgccccagagcaacatggtgctccggaagggtatacgcaaaatcaaacagggaatgaagagatacaataatcaattatcggtgttacggagtgagctgcgtacctgcaagcggaaggcaaccgagcaggcgaaacaaattgccgagcagcagaaactgctggcggaacagcagaagcaaacactcgactatgcaaatcggctcgacgagaacgacaaaaagaacgaggagatatcgaggaagttttccaccctgttacaggaactgaacaagtgcaaaaccgaactgcaatactggcgatccaagagtccagcaacgcccaactgcaatgcctgtggtcaagccatagttgccatgccgccagaagacctgcaagctctggtcaaccaaggcgttcggccggaggaagtaggcctccccgtaattggagaggaaccagtagatcaccaggctgacatcgacaacgccatgctagatctggacgctcaaccgatgtctccgctacctccggcggtggcagcagcagttattggttcacccaggagccaaaaacgaaaatatgaatgcgtcgaaagtgccagcgacgatgccccctcggctggttcgtcttccaccagtggaagtgaaccggcttccggatcatcatctccgttaaacccactatttgcttcggcacctttggcttctattgtggcatcatattcatcgtcagtgacggctggaccgtcatcaatgtccccaccccattcttcttcattcacatcggtggcctcggcgccatcaacgtcggctgtgttatccctattggtaccccctaactgttcctctccacctcattcttcccaggctaacatgctttccccacaagcttcagtggcttcatcatccgtttcctccaatctgagtgccactgctggttgcagcagcggtcccaatagtagtgatagtgttaatcataagaaactacgaagagtacaaaataaagctagatcacaaaataatcacaataatagcgctaatgtgactaacacaaacacaaaggcaactagaagtaagcagtcggagaaataaatccacccgaaagattgatctgaactatct

SEQ ID NO: 1178 - DNA, 1650 bp, Aedes aegypti
atgtttgcggattcattgccgcccaatttgaaccgagtgggtagtcagttccttgtgatggcttcaaacggcaactatcaatacggatacaatgatggacattcgataaagacagaaactcggtccgcaggaggagttgtagaagggttttacaaatacgtggatgctaataatgagttgagaactgtgcagtacaccgtacgtgatcgaattcccacccgcctcaacatcggaataatgctgttcatgtcctgcttcgtgagttacatgctgcgggtaaacatgtcagtgaaccttctcgcgatggtccagccgatccaaaaaatgaatcaaccagcagttaaacccatgttcaacggtaccaatgcaaatgacacttcagctaccatgccaatgccaacagctgccgccgtccataactacggacctcgctacaactggtcatcgcacgatcagagtctaatattgggcgcctatttctacggatatctggtgacatcgctaccggctggagtccttgccgaacgcttcggaccccggaatttggttggctctacgttggcagctagtgcacttctgacggcgctcactcctctggcggcaacctacggaatgtggacagtcgtagtcaaccgggcggcgttgggaatctgcgggggtgtcctgtatccagccctgcacaacctcgtctcccgatgggccccaccagacgagaagggcaaattcgtttcggctttgatgggaggaaccttcggaacggttgtcacgtggcccctggtcggtgtactcatcgaaactttcggatggtcgttcgctttctacgtcccggctgtgataaccgctatcgtcgttgcattttggctgatcatcgtggctgattctccggctaaacacccacgaatcaagaaagaagaacaagattacatcatcaagtctttgggagataccatttccaagcagaacctgctgccaccggtgttgaagatgataacctctttgccgttccttgctctgttggtgctgcacttcggtaacctgtggggattgtacttcctgctgacagcagcacccaagttcatgagtgaggttcttggattcaaacttgcgaaggctggattcctcgcagctcttccgtatcttgctcgagccttggctgcatttggatttggaagcataggagattacctcagaaagaaatcggtcttcagtgttaccacaatacgcaaatcattctgtctattctctcacataatccccggcctgttcctcgtggggctcatctatgctgggttcgatccgtacgtgtgcgtggccattatcaccctctcgctgggtttcaacggtgcctccaccatgacgaatctgcaaaactcccaggacctggcgccaaactttgccggcaccctgtacggaatcatcaattttgtcggaacgacaagtggtttcatttcgcctatgctggtggcacacttcacagctgatcgaagtaccatggacgagtggcagtacgtgtttgcgattggagcagctgcctacatcattccggccctggtctttgtcctgtttgggtccgctgtggttcagaagtggaacgagcccaagcagcatgaatcgaagcaaacgaccaaacaagtgcaagagacgtattga

SEQ ID NO: 1179 - DNA, 901 bp, Aedes aegypti
attttccaaccacaacgaacgagacgctgttagcaatcgggaacaatacaaacaattcggaaaccgtattttaccggtgaaaaactagtggaaaatagtcaactggaaaccaaaacgatgtcggcctccactggcaaggttgtgatcccggtggaatccccagcagaacaggaggagcatctgaggaacgcacggaagctgctgaaggacgtacagaacgtgccagccatgaacaaggagaacgttggaaagctgaacaagcttccgatgtatttgtcgcaggctcacaaggaactggccaagaaatcgctgttctcagatgcactggagtcaatcgagctcaaacggaagaagacgacaacggttcagtcccagtccagtcagacatcgccggagaagaaacccgccacggtaacgaagccaacaatcaccgctgaagacctcacatccctggagggacccagtgagcagtactgggaagtgttggccgaaagacgacgactggccctggaagaatctctggcggagaatcaggagctgtacgagaaggtcagctcgctggaagaggagctgaacctgtcgaaggagatgctccaggaggctcgcaatctggtggaggtgctgacggagcttctgcaggagggcgaagcggaaaaggaagaggcggctgctgccggtagtagtaaggagggggtcaagcaggtagacgacagtggcgtcgctccggagcccgaactacccagcgacgacgaagatctgtttccactgtttcgttgccaccggagcggttagtcgccgtgaataatctaacagaagtatatttgtattaattataactgtacgcgaaatgtggaaaagttataaaacaagaaataaatattaattaagcgacctctttttc

SEQ ID NO: 1180 - DNA, 952 bp, Aedes aegypti
aacgaccgaatttcggacgactttcctgatcagagaggaagaagaatcacaaaaatttctgcggtctcggttatcgggtgtgcgtccggtggattttccgcgacatttccggctaaagtgtttgtgcgttgattacgattggtgaccattagaattacggagttattattggttccagggagtagattagttcgagactgaggaaagaagaaagtttgctccccttgcttggaagcctcctttgaagacatcgcctgaaaaaaaaaagatcccatccagaatggctctcaatccgcagtacgaagatattggaaaaggattcgtcacccagtactatgccatgttcgacgacccgctgcagcgaccaaatctggtcaatttgtataatgcagaattgtctttcatgtctttcgagggtcagcaaatccaaggagcagcgaaaatcttagaaaaattacagggtcttaccttccaaaaaatctcccgagccctaacggcggtcgactctcagcccatgttcgacggaggagtcctaatcaacgttctaggtcgattgcaaactgacgaagatcagccgcacgcctacacgcaaacgttcgtcctgaaacccatcggaaccagcttctttgtccagcacgacgtgttcagattagcgttgcacgacatggcgtagctcgtttcggtgttcggtcgcgaaaactcgttgttataccccctttttgccccctctgatccggacagaagaagaacaaaaaagcattgcaacaacttccagctgctctgtcaggaatgctactaatctaataccatcgtaaaccaactacagtcgccccacagttatggatgagccacagatgtggattagttttggattaaattctcatggaatagttttacagttacgcaaaccttagtttacctgcgtggactaataagcttaacagcttcctaa

SEQ ID NO: 1181 - DNA, 1308 bp, Aedes aegypti
tgttttagagccacaaaggaggtaagttttcgggtcgctccgtgtgcgagattttcctcgagtgacggagaaaagttgcagaagcagcagcaggcaggaaaaagctcgcatcgtctgtcgctccccttctggccctctccctgcctgcgcttctgtcgtcgtcgtcgagaagattccgtttggtgctgaaaaggaaattaattgggcacttttttttttctcccggacacttattcccaacaggttatcggcgcatttgtttggaaccgatagaaaccagtaacagccccacaggaagtcacaatgtccggaattgcgatcgcgcgtctcggcgaggagcgaaaagcatggcgtaaagatcatccctttggattcgtcgctcgtcctgtcaaaaacgccgatggcacactcaatctcatgacgtgggaatgcgctattccaggaaagaagggaaccccctgggagggtggcctctacaagctgcgaatgatcttcaaggacgactacccaaccagtccgccaaagtgcaagttcgaaccgccactgttccacccgaatgtgtacccatcgggaaccgtttgtctgtcgctgctggatgaggagaaggactggcgtccggcgatcacgatcaaacagattctgctcggcattcaggatctgctgaacgaaccgaacatcaaggatcccgcccaagcggaagcatacactatctactgtcaaaaccgcctggagtacgagaaacgtgtccgggcacaggccagggccatggctgccactgagtaaggtgtgtaccgttttaccgtttaagctagtgtgtgacgaactgagacagtaagaaaatcaactaaaattatacttgaaccgtgcgtgctaatcggggtagttctgttctgcggaaaaattgctggtcaccggaaaagtgaccgctggccggggggaaagaaaacatacaaatacacagtcggggagtccttttaaattaagcaaactgcagcaaacaacaaacaagaggataacagaaaaaaaagaacaaccatactaattactttaaacatacatattatatgataatctttccacttttcgcaaaaaaaaacgcaacgcaaaggaagaatacccagaagaaaaagaaagaaggaacctgcagataaatttattcaaactatagatctaagccacttttttaattatttagatttgaaaagaaacaaaatggaaaatacagatcacgaagggccaataaaaatgcaagccgaaagatggaatccattctcacaaccaactcgcctagagtagaacaaacatggt

SEQ ID NO: 1182 - DNA, 1943 bp, Aedes aegypti
tgatgatgatatccgaagcaagcggtgtggtaatagtgaaaaaaaaaacgtttatttttttgacgaaatacaagatggtggctatatttaaaatagtctccattttttcgcttcaaatggaagctacattttttttatacgacaccactaagtttcctatgcatttcaagaaaagtatgagacacaagcgaaaaaatgtatatgatttatcaataacaattcctctagtttttgcacagcgacctagaagcgacaaaaaatggatagctgctgatagtcgtctggatttagtgtaacttactcacatgtaaactcttaaatgttgttacacagagaatatgttaaaatttcacagttttgtgttgaagtacaatctatcactccctcgtttacagtgtttttactcatttatttgcattggcggagcaaggtttcacacatggatgtgcggtcaaatttaatattatttcaatatgctgttcatgctaagtagatacaaatatacatgaaataattaatcgactagaaaatgtatcaaagaaacataaattaatatgctccgaaagtagagaacaaagcagcacccaattgttgtttattagttttgatgcaaagttccttctagttattattaatttgaaatgaatacaacagtgaaatctgtccctagcggaaacccgaacggctactgccggctgtgcttctccgagcgtaatttggttgcgcttttccgatacgatgaccgacctcgtcaatatttgttaaaagaaatttctaacttcactgggatacaaattgaagcaaatgaaaatcaaccttgctccatttgctggagatgtgctgtggctgtagaagattttcagctattccgtgaccgatgtttgaccaatgatgctatcattcgaagcaaatattctgaaacaactgttaagcatggcgaagctgagtggcttatatcgataccagtatcggagctgccgccggatttgagagttgacgaaaacgaagacaagtctctgttagagccactggtcaaatcgcaaatgtgctcaggaaatgacaatgaggaatctatcagtgaaaagatagaagcattggacacagaggaatcacaaatcagtaaatccatttcatgtcacttgtgtcagcacgaatttggatcacgccaatcattatacgtgcacttcaaagaacaacattccgagcatggacgaccatttaagtgcgatttctgccaagcaaccttcaagcgaaagagccatttagacgatcatgtgtcttcgcatactggtgagaccaggtatacctgtaaatactgcgaggcaaagtttaccagagctaagcagctaatgcgccatcgccgatcatgtcataaggagtatcctttgaaaactgaaccacctaatattcagtcatctttgtcagaaggacagtttaagtgcaaatactgcccaaaatctttcaaacacagaccgtcgctgaattttcacgtcaagacccattacgaattattacctttcgtatgcgaaacatgcaatgctcgatttgccggcgataaaggactacttatacacagaggcaagcaccatccggatacggttaatgctttcagaacagcatcacctgcgtcgtgggagcccacaaagactttgaaatgtggtttttgtcctcggtattttgaacagcaaagatatttgtcacagcacatgaaattcatgcatcccaatgaaattgatgagtcgaagaatccggaggatgagaacacgatgacggaagcggaccatattggaaaacatgctgatgtgcatgaggatacggatgcagtgacaataaaatttgaagttgaggacaacgatgatatgtacggagccgacaattcctaataatactaacgtaatgcttgtaaacacatgattaatataataaataaattaaaagccaga

SEQ ID NO: 1183 - DNA, 2692 bp, Aedes aegypti
catcaaagtaagcgtgtaaaaaaaacttttaaccgtgcacttctgtttgttgttttgtgtttgacgtttttggggactcgcaacagtaacatcacaatttcgacccagtatgtgcgacaccgatcccccgccgtgcaatgcgtacaatccggaatatcctctggaaagtgacgacgagtatgccggaagtggaaaaccattttgtacagcgtcttttgaaaacatctctgattcggaaggattagaggccaaggatgacgatccagatcatccagacccaaaccctgtgcccaaggtgtacacggatttgttctgcgtgaaagagtacactagagaagacttgtacccaacggaactggatccgacatgttacccggcgtggacgctttcgccctattggcccgtgtatgtgtccaacttcatgctgaacagtttcgacgaactggagaggaacacccaaatcgccacttattttgccagcaaaggacttctgagcagaatgatttacatatggtgtcacgatgaacctttttacaaaaggcaccagaaatgtactctggttctggacatgctggtgtactttaccagccaggaagatgccgatcgagcgattcgttgttgcgataaaacaacttactacggacacagactcaatgttatgcccgggagaattccgctgtatttcgatccggaacgaacgatatgtttcaaaatggccaagagggctatccatgttacggatacatgggtggaactaacccttcgcaatcttggaatcgagaacatcgacaccatcgtgaggcattccgattgtgaggtgtttgtggagtttggtgatgtacactcgatgagaaaggctgtgtcggaatccaaaaaatggatcccttctcgtttgacctgtcctgttcggaaacaacggttcctggaagacgattgcaaatatgacatgatgtttctgatccaggaagatccctcgttcctggatatgcttcccccagagtatgcgctgaatgatttactgaacggaaagctgcctccggtggtgagggattgggacaactggacgcgtccaaaagctttccggccaaaggtgcatgaaacaatcaatcaaaaccggttgaagcggaaacaacaattgatagacaatgccagagcaagacgagaggcgaaacgcgaagggctacccgtagcccctaaagggcccaatcacgggaagaaaacaaagtacgaagtactccgtcagaagcaagccattcttggtatacctcgcaaaaccgattggggcaggcaaaatttcaccaaacttgcggaggatctggcttccatgagaatgaaacttttgacgaaggaagaggttggaacgctggcggtgcgcaataagctattctacgccatgctgaagcaggagaaaaagctcggaggtttggtcgataggtatcatgacctgcaatgcgatgctctggagaatggtttgactgtggccattatcatagcgggtgagaatacacgcttcccgcagtatccaaccaatgtggaaaagtctgacgagcaggaaccgttggacaagctgtggcccgtctacgtgggcaattttccagtgaccgatgtggaacccaaacggcgtaaccagcaagtttgtgattttttcgcttcgaaaagctataccgtgaagatggtctacctggacgagaatgacaaattttacaattcctatctgaagcccgtcaaactgttggacatactggtgtactttgagtccaaggaagtggccgataaagttatcgaaacatatcacggagcaatgcatcggggttcgaaattgagcgtgtatcctggtcgttggaacgtatattactacacgagtcgtacagtgtatcttaaagtggacaaagatccaatcatcgccgagcagtctatagaacgagttctactcaatacttccccggaaggcctacatggtatcggtcgctaccccaagagggcctactttagcttttggaaacctcaccagcggagagctgcggtaggaagtggtttgaatttggtcttgatttacaagtcgagacctaagcaaaggttcatagaacaagacgtgaagcccgatctactgcgtaggatactgaacgatccggatttcttaaacagtcaaccgaaaggagatgatttgaagcagctgtttgttgccgaatcggtgcccccagaggaaggtggcgaaatagtttgggtcggcaattatctgcaacgcaagcagatgaacgaaaggatcggtagggtgctagccgaatgggaaaagctacagtgatttttatgctacttcaagtaagttatgatactgctttttattttattttcttttgttaatggattttgaattgaattcaaagcaatgaatttttacaagaatgatttgtaaaaatagggttaaatacattccggacatatatgttgggtgctgttcacttttattttagtttcattaaaatccatcgtcatcggtgagtatgtagcactaaatactgttttgtgcaacaaggctcgtaaatgtcaatcacgaagaaaaacgatgaggccgtttaatgagtggtcgatgaacattcatacagtgttatgtctgtttgtctgtgttattaggttcttcaaacatgtttcgtgtggtctctattttgatgcaagtctttcaaaagactctctt

SEQ ID NO: 1184 - DNA, 2173 bp, Aedes aegypti
atgatggtctactcagaagaacccatctggcctatgcctcatattccggccctctacgacgatggagactatggcgttaacgtcgttgaagcgctgcaggagttctggcaaatgaaggcagcgcggggggcggaactcaaaaatggcgctcttgtgatatacgaatccatcccatctactagccaaccgtacgtgtgctacgtgaccctacccggtggcagttgtttcggaagctttcagaattgccccaccaaagccgaagcccggagaagttccgccaagatagctttaatgaattccgtgtttaacgagcacccgtcccggcggatcagcgatgacttcatcgaaaaggctgtccaggaagcacgagcatcgttcaagggagaaaaccaagaggacgatggacccgacaccggaatcggagccttcagattcatgctggaaaccaacaaaggtcgaacgatgctcgagttccaggagttgatgacggtgtttcagctgctacattggaacggttcgctaaaagcaatgcgcgaaaggcagtgttcccgacaggaggtggttgctcactactcgaaccgttcgctagatgacgaaatgcgacaacagatggcgctcgattggatcgaacgggaacacgaaaatcccggtctcctcagcagagagctggcgattgccgaaagagaactagagactgctcggttggctggacgcgagctgcgattccccaaggagaaaaaggacatcctccagatggctcacaatcaactcaacggcggcagcaatattaatagttgaacgtcgaccagtacgatgacgttagtttttaagaatctgtagcatcaagacaaaacaacaaattcatattccgagaagtacatctcttgttatgaatgcttcacaagtgcagcattgaaattggtctcgttcttgcttttctggaatccataaagtgtgaaaattccttattaatttaatggatttgtttttatgcattaatgattacgttttttgtttgatatatagttttatattagagacgaacaaatcaagcagcaaggttttatttgcaaattaacttataatcgataacggacaaaaccagaacataagctcaagtaaatgtgatttttattcccattcttatcatagcactaacgagtgacaaatccatagccggtattctgagaacagtgtgtttttttcttaatttggtggtggtgatttttgtttactagttaactacttttacattctaatctttgacctttcacaactgattacgataatacccacgaattcataaaatatttccacaattcttaccgataaatcaaaaacaatagtgtagactagcatgtagcacagcattaatacaatagatccaactgtcttcagttatattgtacataacaaaacgacaaaactgttcaaacatccgctcattttcgattattgctattgtctgtttcgtcttccaatctatccggtgttccaagttgtatcgtctaaaaaaatcaaatcaaaaattatctcaacaaatcccacagccaagctgaccgaacacaagcaaagaactaaaatctaaaacctggaggcaaataaatatttttcgatgcgtgaaaaatctatttattcaaacaaaaatgtgattttaattgaaaagcaaaaatttagttagaaaaatttaagattttgaaaaatcgaaaattttaatttatttttatataaaaaagaagaagaagcagagcggaagcagcaaatatttacacctaaaatttaactaatctagacaatgtttttaactgtaaccacagaaaagaacccctttcggccaaatttaatcttaaaatttagacgaaaattgtgatgtatgcgtaacacttaaattaaaaagtaatattttttatttagcggaagaccaagtgaaatttttaataattttaacagtttagcgataaaataactaaaggcaaatcatattgatagagaggaacgcaaataataaacgagaatcgatgccggcgggttgaagagcgtacacaagaaccagggatgcacattggattaccaagtaccaattgttgcttgtcccgctggcaaagtgaatcagtaaagtgtaaagatgcagttctagcgaaaggaagcgtgaataaatagtttcgttttaaat

SEQ ID NO: 1185 - DNA, 225 bp, Aedes aegypti
cacagcattaatacaatagatccaactgtcttcagttatattgtacataacaaaacgacaaaactgttcaaacatccgctcattttcgattattgctattgtctgtttcgtcttccaatctatccggtgttccaagttgtatcgtctaaaaaaatcaaatcaaaaattatctcaacaaatcccacagccaagctgaccgaacacaagcaaagaactaaaatctaa

SEQ ID NO: 1186 - DNA, 853 bp, Aedes aegypti
gtttgtcttttgcgtggatcagtaagcacgtgttggttgctgatgtgatgccggttatattgcatcagctcatattaaactacggtttgtggtagttgcagtgataaaacaagctgaagcaataaaaaacggcaacatgctgaagccgatcctccagcagttggctaccaaacgtgtggtgttggcgagcggatccccgcgaagacaggagttgattcagaatattggtctctccaacgtacacctgtgtccctcgacttttgaagagaatctcgacaaaaatgaatattgcttcgctgactatgtcgccgaaacagcttaccacaaggtgctggaagtgtacaaccgcctgaccgcaagcagcgatcccgccgaacggccagacgtagtcattggggccgacacgatggtcaccatggacggcaaaatgtatgggaaacccaaaacgccggagagggcattccagatgcttagcgaattgatgggcagagagcataccgtctacacgggagtcgttatcaaacaccatgaccgggtggtgaagttcacagaagcttgcaaggtgcagttcgggaaggcaactggcgaacagattcaagcctacgtcgacactggagagccattagataaggccggtggatatggcattcagggcatcggaggtacgttcgtggagcgaattgaaggagactacttcacggtggttggcctacctctgtatcgaatatcggccgagatgtgcaaactgttcgggtatgacgtttccaagtgagtctgttgcaggcatttattgaagcgggttccttattaaacattacaatcgaaaaatgtaggccaagccgacaaactaaaa

SEQ ID NO: 1187 - DNA, 1092 bp, Aedes aegypti
ctttttggttgcatcaatttgaccgcttacttcttctgcttgtacagtaacgttttcagctgccttcgccagttcggctacggtttccttcgcctttttgtccgtatcgatgatttcttgcttgactttatccatgacttcctctttacgtttgctctagttgtttacttccggtttttctttggtgtctcgttccttctcatcttctttgtctttattttcgctgtattcttcgaaatcggcctcctcatgcataggcaagtctgccacttcatctgggtgcatcttagctggagttggtctttccagtggttcatacactgttggcagaggaggtgcgacctctacttcctttgtctcttcctttacatatttctcctcaatgacgagatcttccttgatttcgtccagtggaatacgctcgtcttccggcagggttggagccgtcgtggtagcaccagattctgctgtagccgaaactctttcctcatggtgactctcgtgtggtggttcgatatgttccttctgcactggttcaggttcattttcatctcttgtcttttctgtatcctttggttcttctttgacatcttcaatagcttctttttccaagatagtttctttgtcttcttgatgagtttcctcggctggatgttcctcatcaactttatcaccttcaattatttcaaccactgtagctgtttctccttccatcttgcccacatcagccttctcttgcttttcaccttccatactgtcgcgtttgcatttctcagattcctgagaatctcgttggtgcttttgaatttcttcttcctttatttgttagcttcttccttcttcttcattggttttgctgccattttaggcggtttggtaatcgtcttttttggaatcttttgcgtcgtcgtctttcttgtcttgaacgagtttcttttcaggaattgcttcttcagcggctaccttcttttcaagtccttcttttcgtctaggtcaatctttttgcttgattcaatcaacatgctgtcgatcttcttcgtcgattcggtagacgacgtcttgattactttggacttacttacggtaacctta

SEQ ID NO: 1188 - DNA, 636 bp, Aedes aegypti
ctcagaccaaaacagaaaaaaaaacagaatgttttatctgatccgatgctaaccggttgaaaaattctttttttggttaaaatttaatttttaagtgcctatcgtgtttcgcggttagatagcaaaaccctaatggttatcaccgtcaagagcatgaaggtggttacttgcctatgcggaacgtttcattctcggaccgaaaagcaggcactcttgataccaccagctacgttaagggagttgctcactctacctaactttcaagtttccaataaaccacagtaccgccaataaaaccagagcaaccaagacggcagatacttccgtttcaaaacgttgaacagtctacggccacactttgaagactccattccgcaacagaaaagcaagcgccgaaaagatgatcatctccgagtaggagcagtaaacctataaaatgtttagaaaccaaaatgaaaaatcctcacacatctttaaattcctagaatgttgcacaacatgcacaaaacaatacgcagaatcagggcacttgtgatatttttcttatataatgtttcagttcccgatgaagcttagcctcaattatttctataatcatggtcttttaaggaataataaattgtatttaataataaa

SEQ ID NO: 1189 - DNA, 474 bp, Aedes aegypti
atggacttcagtacaactctaggagaatgcggcttctcgtttcgtcttccgaaacaacctaaatacggtgacgaaattgcaatcaaaggagttcttcaaaacgatgcggaaagattttccataaacctgtgcttggatcggccggacggatgtgacccaaacgatgaaccagaatggattgcgtaccatttcgggttggatttcaccgagggcgatggcaattgtagagtgacacagtgtagtaagaacgtcaactggaatagcccgttgttcgccgatggcgaggtgttcaacggacgaactgtgaatgtcattttgcgtttggaagaggaaagcataaaagtcttctacgaagatacacaacacgttgcggactacgaatacagtcatcagttgccgattgaacagatacggaccatcgagttacgcgatgggatcgcccaggtggaagaaattcgattgaaattttcctga

SEQ ID NO: 1190 - DNA, 468 bp, Aedes aegypti
atgtccgatcgtgcctttcgggcatatttgcctactaaacccaaaagtggagacgaaattctgctgcgagcaaaactaaaagacgatgctgtcaggttttcagtaaacttttgtctatctcggccggaaggtatcagtgagtgtcattcaccgcctcatatagcatatcacttcaggacggatttctttgataatgaagaaagtgtaaccattcataattggaaaaatggtggcttttggcaagccgagatagaagaaccaaacaattggattagcgaccggagcgctgttttctgcctaatcttccggtttcatgaagagtatatcaaagtgtttgcagaagacacgcagcacacacctgactatgaattcgaacaccaatacccaatggaagcaatcaaaatgatagagctatgggatgatttcgagtatgtggaagagttaacattcaaatacaaccgttcatga

SEQ ID NO: 1191 - DNA, 566 bp, Aedes aegypti
catagtccattggatgtaccgctgaactactacaaaacggtgaaatgttcttaaaagtcatttcctttggagtcgttctatcatctctgttcaactccggacaaggtttgaactgcagcctgtgcacaacgctcgtgagctgggaagtctgtgacaaaggcagcgattactgggaatgctcggatgatgtggtacttcgtggccatggtttcatagcgaatctaaatcccaccctaccgttggataagacaaccgatgtggccggaagttaccagtgcttttcgctggaggtgttgttcggagcgggaaaactgctacacggatttgcccggggctgtacctttgcggcagtggatttctgttccgggtgggtcgatggaaccgaagttatcagctgtcaaacttgtcgcagcgaagatccgaactcgtgtaacggtgccgttggcagcgtgaatggcgaattctgggttcatttggttgggattttgattgtagtcatgggaatgctgtaagatgcttggtgaataaatgcggcaaatgacttgcactatagtgctgatcataac

SEQ ID NO: 1192 - DNA, 1421 bp, Aedes aegypti
acagtcgtcagtcgagcagccgtgcagaggcaaccagtaataaatcgagcgaaaagggtgaactcgaagaacgagcggcggtgactaaaatttacgcgacactaggcaatttgaaacttgatcgttttttgttcgttgcttccgaaaattttcacccataaatcgtgcaacgtgataggcagtagctgtgcgaaaccgaccgctaaaagcaaattaagaacacagtgaaaattgcccggagtatttttcgagaggattaacagtttttgctgcaatttgcaggacaatagagagaaccgaatgcggctttaccgaagttctatgaaaacagattcgttattttgaaacccggcaaacagttcattactcattgttgcgtgaataccctcgttccggtgttttggtgctttggagtgcagaattgtgagcagcaacgcgtgttaccgatctcacacactagcacctctgcccacgtagcattatcacgtcgaacccatcaaagaatcgttccactggagactgcagtctgacggtcgaaaaatgaagttcaacttgtttgctgtgctgttgattgcggcatttgtttgcgccggctatggggccgaaattccaccacctacagttcccgaaaatggagatgttgtgcggacataccaaggagtgaacgtgtacaaaactgaaagagcctgtgccagacagggaggcctgtgcgttcagagaaacgactgtaaatcacttaccgccattaaaggactttgtccggaaaatgccaaccgcggtgtggagtgctgttatgaagtgaatccacccaaaggacttcggtgccgtcagtatgatgcaaaatgtgacagatggtgccatcgtgtgcagcaaatgccagccgtagactgcgccgaagggcttgtatgttgtgcaagtgacagcaaaaaatgatgacttgttatgttttcttgagagcttgcctatataaagtacaaattttaaaataagttagttaacgatatatgtctaccgaacgtttgcttaaattcacttttataacgccatcaatgagtgatacaatcggaagcggttcatacctgtgctgaacatttgggcgaatgtatgacgcattgtcgatcgcaagctttgacacgtagagcaactgattgcggtgaagaagaaacatgttgtgtgctggtggtataaatgcatttctatgacaatgataaatttgaagatcaaacataggtgtatgcaacatttataatgtttttttttatgaatcaagtgtaaaactgagtacaaataatcgatgtgtttaattaatgttagtatgtattatataaatgtttttgaaatatggaaataaattacagacaacagttcaataaaactattaaaaaactggatggaaatacattacatgtgtaaaatatagg

SEQ ID NO: 1193 - DNA, 528 bp, Aedes aegypti
agaaaacttaacaccaactcaagcacttcttcgcttataccagtaaattccacctccaatggctgccacaatcactatgaccgcagcaccaattatgaccaggtgagaacttccatttccaccttcgttgctaccattggtgttgtcctgggccttgtgcccatcttcgtgatcagttttaccgggttcctccggcggcggctgtggcggtggcggcgaaggcgtcgtttgaggagaaggaactggttcaggacgaggtctaggaggcatcggcccggtacagcacattccttcaacctcccgctcattctgttcgcagttgctgtgccgatcagtcggcgtggcaatattgtgttcttggaggaaatcaagcatgtcctttatatttcggcactggaaactgtttccgttcaggtacacggctttcagcgatttcatgtccagcagatgggcgtagtcgatgctgtccatattattgtcattcagtttgagagtttccaaagccgtgaaaggatagaagatttctag

SEQ ID NO: 1194 - DNA, 1562 bp, Aedes aegypti
atgagcctctgcgcgtgccataaattcttttgttcttttgacttttactcaggagtaatagcagtgtccatagcggaaacctacgactgcaccatcgaaaaggacaatgatctggaaatatgcgtatttcgcaatgtgaaatacttcaaaaacacgacacaaattgccttctattcacccggctcgacaaagccggaaaatgtggccttcaaggacagccatatggtggccattcctccgaacttcttgatcgcgtttgccgacaacttaaaggtactgaaggttgaaaattgtcaactgcaaacagtgacaatcacaaagaatttgttagctctgcacgccaagaacaattacatcgaaaaggtattgatgtaccggaacaatcagtgcgaaaatctcagggaattagatttaagtagcaatcgtttgggaaatgttgccaatgtgacaagctgccttaagctcgagacactcaatttgagtgaaaatgaagatctctgggaggacagtactctcgatctgtcggtattctcaaacatggttcaactgcaagatctcaatctagccggaacaggagtgctatacctggacaacactaagaaaatcggtttacctctgttaaaaaccatagacctatcgaaaaacgacatattgccctcagatttgagactagaaatcttctatcctttcacggctttggaaactctcaaactgaatgacaataatatggacagcatcgactacgcccatctgctggacatgaaatcgctgaaagccgtgtacctgaacggaaacagtttccagtgccgaaatataaaggacatgcttgatttcctccaagaacacaatattgccacgccgactgatcggcacagcaactgcgaacagaatgagcgggaggttgaaggaatgtgctgtaccgggccgatgcctcctagacctcgtcctgaaccagttccttctcctcaaacgacgccttcgccgccaccgccacagccgccgccggaggaacccggtaaaactgatcacgaagatgggcacaaggcccaggacaacaccaatggtagcaacgaaggtggaaatggaagttctcacctggtcataattggtgctgcggtcatagtgattgtggcagccattggaggtggaatttactggtataagcgaagaagtgcttgagttggtgttaagttttctctactgcccataaacacataattctctcatgtgacatccagcaaacatgggactgacatgcatgttcggtaattacgggagtgcctcttatggcatagtgctatttggcataataccaaagctgatccttctttctcgattaccaaattattaaataagatactcccataataaccatatgtattttgtagttgtaaacttattgaaaatgtttatgtgccataacagcacggaaaagttgatagttttagttcgttttatcaaaaaatgtataacagtctcaaaaaactgaaaataaaatgatttatcctcgaaattgtcatttcatatttagataaaaataaatgataagttgcagcacaagt

SEQ ID NO: 1195 - DNA, 3675 bp, Aedes aegypti
ccagcacattgacattacgaaaaatcgttcctttcccgatcaaatgttcgttggttccgctcgttgggattttctcaccctaacactaagtcggtacgattcgcacgttgcagaaactgctttgagctgtataaaacgggtgttttttggggtaaaatagtcttgtttgattaaacattttatcccccagttcgcgcggttatcgattgaccgatcgagaccatctaattatactaccctcgaaatgcactaatttctgtgaaaccgcagcctataaaagaggaccatgatcgaggggcgaatctttagtgttaatttaaattcatcgtggtcaagttgcggtcgtatagaacaaggataattcggatggctcgtgagcaccgtccgcggtgattttgtcctcggaacgtgagtgtggttggatagaagagttgtgctgaaacatatctattgcggtgaacccttgccaagtgtcgtcattgcaccagacttaaacatagtgatcgatcatggagccgaatcgattcaaagtgcagacggttatacagatccaaaatggtcacgatcagtccggtgcccctgaaccacaggcccagttccggtggctagatgacgaagtgaagttgcaagtgccagacttgaaaaaccgcaatatcaacaatcgggtgtctccggcccccgcaacgactgaagaccgacgagtcagcatcatgggagtaactagggatccgctgccacgattggatcactatcgaacgtcgttgcgaaaaaataagcggccctcgattggcgaacttcatggagacagcgatgccaaagataagaaacaggaactagaaccggaagaaccgaaacccaccggacatctcatcaggttgggctggatccaaggtgttctcacgccatgtctgctcaacatttggggtgtgatgctcttcctgcgtctcagttgggttgtgggtgaagccggaatcgtcgataccatgctcatcatgctgctttcctatatggtatgtgtcattacgaccctctcgctttcggccctctgtaccaacggccaggtgaaaagcggtggaatttactatataatctcacgatcattgggaccggaattcggggcatcggtgggcgtggtctttgcgtttgccaactccgtcaatgcttccatgaacactatcggtttctgcagttcgttgaacgatctgctcgcttcctacggtatcaaaataattgatggcggagttaacgatattcgtatcgttggaacaatcgcactcatagttatggtagccatctgtgcagtaggcatggattgggaagttaaagcacagaatttcctgctcgtggctatcttggtagctattggagctttcgcagtcggagcgatcatgggacccagcagtgatgttgatagagccagaggttttctagggttttcaacggaagtcgtgtcgtcaaacatgggctcattgtatcggttcagcgaaggtatccagcaaaactttttcagcgtgtttgccatcttcttccccagtgttactggtatccaaagtggtgctaacatttgcggagatctgaaggatcctgccagcgctattccgaagggtactctgttggcttgcctggtttcggccatatcttacgttatatttgccctttttgctggtggtgtggctgtacgagatgcctccggaaatcttacggatctggttggagtcaacttcacttcttgcgatactgtactcaacaactgcaaatacggattaaacaacgattacgccatcatgcagctgattgctgcctctagtatgctgatctacatcggatgttgggcagctacactcagcactgcgttgaccaatcttctatccgttccgcgtctaatccaagccctcggaatcgatcgaatttacccaggattgatcttcttctccaaaggctacggaaagcattcggaaccatatcgaggatacgttctggttttcctagtttcctttgctttcattatgattgctgatcttaacacaattgccccgctgatctcgaacttcttcttggcttcgtacgccttggtgaacttctgcacattccacgctgctactgtcaaacctttgggatggcgcccaaccttccggtacttccatccttggcttagcatgggaggatcgctactatgcgtggccatcatgttcctgatcgatgtagtttcaacatttatcacaattgtgatcatcttcattttgtacctgatggtaatctaccggaagccagatgtgaactggggttcatcgactcaagctgcggcatacaaatctgccctgaactctgccctaaatctggaacaggtggatgatcatgtcaaaaactacaacccacagttgttggttctgagcggtaacccattgcatcgacctaacctgttgaatttcgccaatttgataaccaagaatcagtcgttgatgatcgttggcaacgtagtggaggagaagctgaactacaaagagagaaaggcgtacattcaaagcgggaagaaagtgctaaaagacttgaagatcaaggcattttacagcgtactggatgggcttccgttcgacgagagcgtccgagcgatgattcaatcgaccggttttggacgactttcgccaaatattttgatggtcggatacaaacaggactggcgcacatgcggcaatgcagaacttcacagctactataacatcttgcataacgccttcgacaatcgactagcgcttaccattctacgattgccgaatggactcgactgctcgcatctggttccaccgaaacccgcactggatcttgccgattcggcactgaacatcatgtcatcgatggcatacatcaacaccccacagggactgcgaatccagaaaggcctcatgccggtcaactcgaacttggatcttcatggaatggcacccagcagcgagcagatcagtgtgaacgttccaaacgaagcacaagacaacaaaacaactcctgaagcagctgctccaagccaggaacttaacatattccgcgagaagcaaccagccggatatatcgacgtatggtggctgtacgacgatggcggcctcaccattttgctcccgtacatcatttccactcgttcaaagtggtccgaatgccagatacgagtatttgcccttgccactcagcagaccaatgttgaggaggaacgcgaaaacatgacaattctgctcgaaaagctacgcatcaactacgtatcgctgatcatggtcaccctatcggacaaaccgcaagaagcaacaatccaatcgcacaaagcgctactcggtaccctcgtcgagggtcaggaaacggatgtattcgtgagtgcatcggaacaggctcaactggaagagaagacgtaccgtcaacttcggttgagagaactgctccagcagtattccaagaacgcttcgttgatcgtcctttccatgccgattccgcggaaaggaatcgtatccgctccgctctacatgtcttggctagagatgctgacgaaggatatgccaccgttcctgttggtgcggggtaaccaaacctcggtacttacgttctattcttaggattaagataaatgaaataattcatcaaaatgaatacatgtaaaatctcagggagataataaacaaacacatcaattggagc

SEQ ID NO: 1196 - DNA, 1055 bp, Aedes aegypti
atggacgctacaaaaagtgctcccctgatcgccgagagtggctccttctgtcggctgtgccttaaaaccgattccattgaggtagtggtccaatccccggaggacgcaaacgagtcgctgctcggcatcataagcgagtgcctttcgatatggctcaccgtgacggaggacttcccgctggccatttgccactcgtgctctatgtcgatcgaagccatccgtcagttccggtacaactgccagcagtgtgatttctacctgcgcagtcaccgatcggctgttggtgcgggacaaaatccgacgtcggcggttgtggtcgattccgacctggattccactggggagcaaaaacccgtgataggacagattgatcagatcgatgcgacgatgatgcaacaggaaacatactccgtacaggaagtacactacgaagaatctgccataagcgggacgcatgacgcaaaccaactcggaacggtttacggtggccagatgactgaacagcaagtttctgccgatgttaacatctcgctgaagaagtttgactgtcccgagtgtggcaaacagctatacagctccaggatgttggcgcagcatgtggttcgggagcatcgtttatgccacggatgcgacaactgcggaatgtcctacaacagtgagcagaagttgcattcccaccgggagagttgctcagggcggccttcgaagttcatgtgcactcagtgtcccagcgccaaggtgttcgccacggccatcagtctgtccatgcacctgtactacgcccacgacagtataaaatccgtggtctatcggtgcgaggcgtgcaagaaaaacttcaaaaaccgaacgggtctcaaatatcactacaatgcgcgccacggttgtacgatggtggaatgcgaaatctgccggaggccgttccccacggaggagagcctgtactaccacaaacaggcggatcactgatggatttttttatcaggatgatcggaacagtattgtacaaatgtatttcgactgaatattttaccatgcaataaatgcaaatatctttt

SEQ ID NO: 1197 - DNA, 2215 bp, Aedes aegypti
ctgttgagattttcagtgcttctttagttatctcgatacctgttagccatgattggcaccaagaaacgatccgttcaaagtgacggggaaaaagtggcgaaaaaaccgaaattagaaaaatctaatgaagcaccgaaggaagcgaagaagaagttcgccaccaaatcgagcagcttcggagacggcgatggcaaaaaggggaagttccagaagaagttcactcccggaggaggtggcaagaaggagggctttcggaaagatttcaaaggcaaacctggtagtgttgtgcccggcgagaaaaagcccttcgttgaaaacactccggaatcgaaacgcgaatactggaacagcttgaaggcgaagcagaaggaactgcgggaacaacgacgcaagagcaagaccaaggacctgtacgagctgagtgtgggagccaagaagatttatgaaacgctcaaaaggaaatcgacgacgaacaaggaaaaactggtcgcggatctgcacgagaaactgaacaaggacaacacgtacagcagaattgccaccagccacgacacagcccgggtcatccagtgtatgatcaaaaatgcttcggaggagcttcgtatgcagattgcggacaaattgcttccagacgtatacgagatatccacctccaagtatggccatcactgcattaccagtttgctgaagaacggcacgaagccgctgtgggcaaaggtcgtcgatggaatcatcaaacacgtagtcaaaatggccaaccattcgttttccggtgccattgtcgattcggtttacaatgaatacgccacgaatgaacagaaggccttcatgaggcaagccttctactcggaaatctaccagcaaaccaaggacaaaaacgtcacctgtatgaaggacacttgggagacgaatgcttacatgaagaagacggttctgtcgaccgtgaaaggccatctggttcaagcggccaacaaacagctcacggacaatgcattgcttcatacgttgttgctagatttcctgcaggaagccgctgaacttgaacgcaacgaagtcattgaactgtacctgccgcatctggctgccatctccagcacgaaggatggcacttcggcagccatattttgcttcctgaattccgtggtcaaggatcgtcgtgccgcgctgaagactctgaaaccgttcgtcgaaaagctgagcgtccacgagcatggccaccggttggtgctgtgtattatgaattgctacgacgacacggtcattctgggcaagcaaatcgtggccgtgatcatggagcacgtagaaccgatcgtgggcagcggcgagtggggcaggaaagtggtcggatggatcttctcccccgccgacaaggatttgctccatccgacgcagatcgacattctggacgggtatctgaagtacagcaaaaaagacaaggaaatacggcgaagggaggtttttgcatcggccgtggaagcgttctgcacggctgtggagaaaaatgccgcgttttggctgaggggaggacacacggctctcctaacggcagcgatcgtcaaaaatctcaagggagagcacctccagaaggttcaccaagcgctggccaaagtagtagccgatccggaatggcagattcaggagaatgaagtgaatctggagggagcggttatgcagtcgaaggaggagaagccaaacaacgctagcgacggcaaaaagacgggccggattcggaaaatcaaaaagagtccattcgcggaagataaggaaaaagcccgcgaaaagcaacttgctgccaatccactaacgaatggtgttgaacacgccggagtgcacatcgccctgaaaaagctgataaaactggaccaggacaaacgtcaagaagacgcaaatagttcgcagtttggcagcgccgtgctggacaatctatccagcgaagcaatcaaatcctggatcacccagaaccggccttgcttcctgctgttgctgatattcgaaaactccttggaacccattcagaagcagctcaagcagaagctgaagtcagtcaagactgatctgaaaaagcaaagtcacacaggagcaaagcttttagttgagaaactaaaactgtaacatattaagctgaaaaagcgttattgcgtaaaggctttctctaggtttaagttggtacaaaaaaatatatattgaatatgaactgttccattcaaaaattgat

SEQ ID NO: 1198 - DNA, 1213 bp, Aedes aegypti
tttcatcaaaacatcatgttttagctatgtcagtgcaaaactaatcgattttcattgatgtacatctgtgagacgaaatatccacaatcatcgatgcacagtacgaatttcaatgatggcctactctgccttaaaacaagcactaaacaaccaaatcaatgcccgatcgagatgtgctcaaaaatgcgtaacgctcttatcttatcaagcccaagtggtgttctgtggatgattcgctcagttcgttcaccgctttggttaaacatgactgtttggttaaatcaaacgctgcaaaactagagcaaagtcgtgtcttgtccgaataatggaagttgaagatcatctgaaggccattgcatctgaggaatggcatctattgcgggatgtttacaaacgtgactggcctcggcatcagttggcttataacactgtccaaaactatatcaattggattggaatcgatccgaagattaagcagctgcagatactaggcttgagtgacagttggaagaagaacgggacctgcattattttggaccgttaccaaatgtatgcctacactgtggaagattcaaatgattcattgaagcgtgcgcttttcctaatcgattgggactattcctacaaaatgtgttgcattcctatgcgccaacgttcagcttttgaagaaacctttgaaaacctatcaattgatctactgtgggatcatccatgtgttatctacgaacttccccgggaagaatgtctcaaattgagctcgagcattcccagtggccttcacaccaagaaactgtcaatccatcatgccactttcgccaatcgagtttggccccatcgatgtgagggatcggaatacttcctcaaaaggctgacggcgtggaatccgtcagtagggctgttcaacgaaataggagagctgctggcgtggtgtttctgttggccaaacggtgccataggaccattggaagttgtgaaagagcatcagcgaaaaggctacggaagtttgatggtaagagcaattgcccgagaggtcgcaaatgttggattaaactgctacgggacggcgattatgggtaacttggaatctagagcgatgtttgagaagctaggattcaagtcactgggtgaaagttgcttttacgcgcgaaatcgttccagaaaactagtcgaatatgatcattgattgtcaataaagatattatacagtaatagc

SEQ ID NO: 1199 - DNA, 1380 bp, Aedes aegypti
acagattggaagtgcgtgtcgcgtcagaatgaagttcgtagggacccttgtattgttcgcactggctgcactagttgccgcagagcaggtgacttatagagattacaaagtgtataaattagagttcaccaccagagagcaacaggctcaactgaaacgttgggaggatgttgaaggcgttgacttctgggaccgggctggccatcgagtcatgatccatccggaattgcagcagacttttgagaaatttttggtagcaaacaaaattgctcacgaagtcatcatccaggatgttgaagctactatcgaagctgaacgaagatacgatcaggaatataagaaatctaaagcagctttaggtcgaagcaccgttgatttcgtacatttctggcgtactcaggagatctacgattatatggatgagttggcggcttcctatccaaatttggtgtctgttgaagttattggatattctcgcgaaaatcgggaaatcaagtccatcaccatcaccagttcaaatggccaagtgagtggctcaaagccggttattttcatcgatggtggagtacatgctcgtgaatgggctggaatcatgtctgtcgtttacttgatccacgagctggtagaacacaactctgaataccaggatatgatgggaagtgattgggtcatcgttccggtggcaaatcctgatggctacgagttttcgcacacctcaaaccgcatgtggcgtaagaatcgttttccatcctccatcctttgcacgggcattgatctgaatcgtaactttgcatacatgtggtcttctggtagcaatctttgttctgacacttatcctggcacagaaccagcatctgaacccgaaactcaagccttggtttccctcatgaaccgttacaggaataatctgtccctctacctggcagtacacacctacggaaacatgattttatatccattcggatatgcttggcctttcatcccggtttccaatgctgccgaacatattgccatgggtgaaaaggctaaggctgccgtcttggccgctggtggtcccagttacgtagtaggaaacagcgcagaaatcctgtatactgcctttggagcaagtgacgattacgctttgggactcggaggattcacgtatggcttcacgctggaactgaccggaggaggctcgcaaggattcgatttgcctgcgagtcagattcaaaacgtggcacatgcgactttccaaatcttccgatccttgtctaatgatatttaggttgctatggatttttttgcaccgtttttaatgttggatattcaaatttgtgataaatgtattaataaacggatcttaatcgatagtgggttccacgctctagctcacttcat

SEQ ID NO: 1200 - DNA, 1104 bp, Aedes aegypti
atgagtgagcaagccgccaagaagatgcagattttaggcgcagtactgttgttttctgctctgctgacatcctacgcgatttgcgaagaagttttgtacaaaggaaattccaatgacattcacattcgtaaacgtcgcacagttgaacagaatgacaccattcctattgtgaatttcaatggagcaaatttcgaatacttctggtcactgaatgatatctataagtatttgaacactctaaatgaaaaatatcctaatctagtgaaagtagtagaccacggaacgacccatgaaaaccggtcaataaaagtgatcaccatcagtactaacggagaagttaatgggtcccgtccgattgtgctgttagacggaggaatacatgctcgtgaatgggcatctcacatggcagtggtatacttgatatatcaactagttgagcgctcagccgagaatatggatcttttgaacaacaccgattgggtgatcatgccagtagtcaatccggatggttatgagtacacccaaaaggatcgtttgtggagaaaaaatagatccccaaacaataacacggtttgctttggaacggatttgaatagaaatttccccattggttggggaaactttggaagcgaatgttcagttggatacgctggtgctagtcctgcttcagagcatgagactcaagctttgataagactaatggaaaaatattcaaatgctacaaaggtctacttgacagttcattcgtgtggggacttcatcttatatccttttggatacaaatacgaaagtgcgccgaacaggaagcaattgcaatcgttgggagagcaagccgctgcagctgtaagggcgataaatggccctctgtattctgtaggaagctcatctgctttgctttatccagccaatggaagtgacgattacatctatgaatgcttgaatgtagaatatgcttacaccttagagctttcctgtggagattccaacaagagtagcatatttatcatcagcatagcggagatgcaacgcatcaacaaagaagctttcgaaatgtttaaggtgttcggaaaatttgctggaaaacaaataaaatcttcaggatag

SEQ ID NO: 1201 - DNA, 2046 bp, Aedes aegypti
ctccgtgcccggtttcgtcatattgtgcggctcgtttattgtgataattatccctcacccaaaatggatcccaacaatgctagtctgagctgcgtggcgaacatcgtgtggaccaacagcctcggaacaacgatcaagaaggtcgcctacaaacaggccacgctccggctggttcggaacacgctgaaggaaatgtttctggaggtgtccggagagaaggtgaaccccatcaaaatgaaactgaaaggaatcaaggtccactccaagtttatggccgaaggaaaggcttccatccaattcaccgacgaaaaatgttcctgcttcctgtccaacgccccaccgggtttgctggttcaatttttgaaagtaattttcatcaagatcacttccgaccaaacatcgaacggagaatcgaaagaggacatgctcaagaaaacccgcgcccatttgctgtccgggaaggcgaatcagttcgacgacatcagtccggtcacgaacgccgagctggctcgtgcgaaaaagatggcctctgggaatggatccgtaactacaccgtcgccaccgcagaagcgaaaaagattatccggcgaggaacaaaggccagccccaaagaagctgtacgttccgtctcctttgaccgtagcctccatggagccggagaccttgaacgcagagcagaagatgattctggatgcatgcgtaagagggcgcagtgtgttcttcaccggttcggccgggacgggtaaaagtttcctgctgcgaaagatcatctcgacgcttcccccggacggaacggtggccaccgcttcgactggagtggctgcttgtctgataggtggcactacgctgcattcgtttgccgggataggcagcggtgaggcttcactcagtcgatgctacgaaatggccaccagggccaatagcggacagatttggcgacgctgcaagagattgatcatcgacgaaatttccatggtggacgggagctatttcgagaaaattgaagccgtcgcccgatacgtgcgaaaatgcgataaacccttcggaggtatacagctaatcctttgtggcgattttttccaactgccaccggtggtgaagcaggactccttctcgcggaatgctctgacccaggacgataattccgtgatgcgattttcgttcgaaaccaagacctggcaggagtgtgtgcagcaatcgttcgaactaacggttgtccaccgtcagaaggattcaaactttgttagcatcctcaacagtattcgaatcggtcgggtgaccccgcagatacgagacaccctgaccgcaacctcaaagcagcgcatagaaatggaaggaatcctcgcgacgcaactctgctcccacaccaatgatgccgatctgatcaatcaatcgaaactgaacaatctctcgggagaggagaagacttatcatgcaatcgacagtgatgcctacatgacaaagcaactggaccagcaggttcaagcgcctgggaagctcgtactgaaactaggcgctcaggtgatgctgctgaagaatctcaacattgccgaagggctggtgaatggtgcccgcggcgtagtcaccaactttgtccagggttatcccttggtcaagtttaagaagcgcgatttgctggtcaaaccggagaagtggtccatcaaaactgccggcgccgtcatcgttactcgttcgcagttgccactcaaactagcctgggccttctccatacacaagtctcaaggactaaccctggattgcgtcgagatgtcgctgtccaaagtgttcgaagcgggtcaagcttacgtggcgttgagtcgagcccagagcctggacagcctccgagtgttggattttgacggcaaacaggtatgggccaatccaaaggttctcgaatactatcgcgatttacggcggcagatacgtgaccgggagtacatcactccgatggctgtgaagaagaaggatggtggtctgaagaaatctctctctgccatgggcttgactaagtcgctgatgagcaaaccgttggtgacaatcaactag

SEQ ID NO: 1202 - DNA, 1895 bp, Aedes aegypti
actcactattagtcatgtgtatatagtaatttcaagacatttataaaaacgtgagcatatcttatgatcaatatatcttattctttaatcactgaaaaccgataacttctaaaaaaaatcaatccatggtttgtctctatcattatcatctggcgacatgtgccacaatggaagaagcaatgaaaacgaatatcgtaacaaatgctttgactctcgttgataacgaaatgtgttaaatagttttgcatacgaagtgataaattagccgctggcattgtgattgcaagctgtgaatagtcatctgttcatgatgttgctcggtcgatatcgcaatggaaagctgctgttgttgagtttttcgctcttactggttctgtgcacatatttgtacagaaagcacggaaaaccgacaaaatcccattacaatgtgatggtttggtggaacccatatgtaaaacaattggattatcacaggaaatgtggagaagtagaatgtcgtttcacaagcgatcgcaaggcacagaaggatccttttttcacaggttatctatttcacggtaaaaagatgtcgattcatgacatgcctgcaaaccgtagaatagaccagtactggggcttgtatcatgatgcgtcaccaagaaatgctccttttctcctacatagcctggatatcttcaacttctcatcaacgttcagtcgacatagtacggtgccgctcacattgcaatcattcacaactttggaagagcttatcaattataaaaatatgtacacatttgggctaaaaacaagcttccagaaaaaaatgaagttggctccagttttatacatacaatcccactgtgatactctcactggtcgagagttatatgttaaagaattgggaaagcacatatcaattgattcgtatggtaattgtttgaaaaacaaaacattccccgatggtataacatatgactcaattgattttgaagacacgcggaatttctatgaatatgtttcaaaatacaaattcatcattgtatatcaagacattatctgcgaagattatattgctgataaattttggaaatcgctaagcttaggaatcgttcctatctatttcggagcaaccaacataaggaactatctcccaaacccaaactctgccattttgattgacgattttgccactccctttgatctggcgcaattcatatcacaagcatcaaataacgaagatctgtatacaagttttttgtaccacaaaacgttggacatgtatccgatatcaaatcagctgttagtcaacgctatcttcaaggaggacatctattatttagcagatagaaaaacacgatcaatcgtagaattcgaatgcaccgcgtgtgtacaaagttttcaccaggaaaagttgcaaactcaacaaaaggaattatcgtgcgagcttccgtacttcccacctggaaattttactttgaaggcccttccgagagtacggaaatttgtcgaaagagctcgaatggaggcaacaattatgcataaaatggctggtgttagtgaaacatagatattggggtcaaaataaaaatggtgattttgccgtgtgttttttcttaatcaatcaatcaacattagaataagtcttcaagcaatattacaactaagatataaaaataaaattatattattttaataatactgtattgtttttatactatttgtttatttgttttacacaaacatttttggttaaataccacaaagttccgccagaatacaaactaagttaaaaatactgtggccgagatgtagatgtagagtaaaatgtgaataatttaagaacatatatgtttaaatttgacacaaccttcgggaaagcaatatttaaagtataccccttctatcactaaacc

SEQ ID NO: 1203 - DNA, 3140 bp, Aedes aegypti
ttttcgttgtttttgagcttttggccaccttcgaaccacggtgaagtggtgttctgcagcagaacggcaggtccgcgaatccgtccggtgcgagccgcggccgttcacgtggaagagcgagaccataaattgtgtgaccattgcgcgcgctaattctgatccaaatcacgtcctcttattacaaacagcaaacatccccagcccagatcgggtatgggatggatgacgcggaatgatgcccggtgggtgattacctccagaaatgccttcgcgcagagatgggttgcacaagaggacgacagcaaactcgttgtgataactcaatttggcatcgacgagaccaacccgctgatggcgacgatcaagaccgaaccgctcagtgacattccactcaagaaaccaaagctaatcaacgatgccagcctgttccacagcgcccggcagctcaattcggcatttcggccgtggcagagagcacaactgtacgccgcacaccagcagtatatgctagcgatggggggattcaacggcaacgggatgatgaacgggggtaatggtgcgatcggtgcaacgggttcccccggaggacacctggcgcttagtcaggagcctccggaactgcagaatccggaaagtgtcgttcggttatcggagagcgacaagttcgatctgagtttgcagcccaatgtggccctggctccccgcaagacgatactttgcaaagagcgcgaaagggaaagggagcgggagcgggaaaaagaacgatcggtaataaaatgtgatgtacaaatcaaacaggagagtccaccgacaccgccggcggaagtgatacccccgtccgtgataaagatcaaaaaagaacgaccctcgacgcccccgatggagatgtctcccggactccgggtaccttcttcgccaaggtcgccccctccattgccattggtagggactcccctgctcggaggagtcccgatcaaaaccgttccattgccatatagtcccggagcggatatgcatcactccggctccaacgaaatcacttcatccacctcacctgtacctcctgcggtcaacatgaccatcatgaacggttgcatctcagaaaaaccaaagctactggtcaaagagcagataagacctccatcgccccgaaggacgcccaccctcaacgaagaaatgcttcaccatcgatctcatccagcacctgcagttatactgaaaaatggtggaatctcaattgggccaccggggagtgcacctatcgtgggaaacccagagtttgagctgtccaccgataccgacgacgacagtttagctggcgaaccagacagcagcaatatttcgatggcccctctcgaaatcctcggcgatgtaatgaaagacgtcgcccatgaaacccgtgaacagctcatgagcattttcaaactactcatccaagaaacggcacaaatccggaatcggttactacaggataacaagcaaaaggacgatttaatagcggggctccatcgcgaaaaggaaagtttgcaactgcaagtgcaccatcttcagcaacagctgaaccgatctctcatcaaaattgccacctcggagtccaactccttgcagcaccagcaccaccagcaggacctggccattgctgccagtgcgaatgctggtgtggccagtggctccgccctttcatcgacaccaccctcacctctctcgttagcttccaacggcagcaacagccaaatcgtgatcgagaagatcgaacgaaggaacagttttccgcagaaatccgacgtcatcatgaaaccgctgaagaaatgcctgcgccgaagtcctgacgattcagtgttgcatacgctacaatcaccaccacctcctcccccgccagtagcacctccatcgacaattccagtcgccagtctgtcaattagtgccaccagcatgaagctagatccatccatacacgacgaagacgaggacgaagatgatgacaaatccccacagcaacaacaaccgatcgattctccgctgctggccaacggtgtggtctgcggagtgatagcatcgccctcgccacgaccaccatccaggccagcgtcaacggcttcgacggcatccaacggctccacaagctcagtgcccccggtgctagaaaacggttccagtggcggcagtatcaaatccgccaacaacgtgagccacgaggtcatcaaaagtgctaataactgatagttcatcatctacctttgataaaaagggccaatacgtacagagattgagagcgcggataagctctcttgcgttttgttttaatcgtcagattgtgcgcagtgttccgtctccccaaaacacgcaggttgatgttacgagacttcagggcgcactgacggtctcggggaaacgcatccaaaccagttcgatccgtactcaaacaccttttctttttaagtactgatcacccacggcggtgggtgatcgcactcgtgcattgtaaagtagaaatttttaagcttcattgtcgatatttttcccaccaaataatttctgtttgtttatttttaggcgaaaacaacaaacctttataagcttagattgtaaggccataccgtaagccaactgcaaagaaattacaaagcaaagcaaacaaaactgatacaaatttgaagagcaaacgcaaaacaaacaagtgtaagaagaagtttacaaattcttgttcgcatgaaacaaaaatcgatttacattcataatttaacgtagttgttcgttgaaaacaaaaggtaaccatttcaaacataagcataaacaaacaaaaaagagctgaaagtaaaagactaatgtgttttacaaaacaaacaaaaaaccttagtcaagtcgaaacaagcaaagcgaagaacaaattaatacaaagtcgaaaacgaaaaaataacacttgcaagaaattataggggtagaagaaccgattaagaagtactcaaaaatattattctcaaccactaagtggttttcaaagtcttgcgtagtgtcttgtataaagattaagtttattttaaaacaaaatcgaacgttctactagtagcgcaacgcccttactctagtgtaaatagtcagctgtgtaaaaagaaaagataaaacaagttttgtgttctttc

SEQ ID NO: 1204 - DNA, 1770 bp, Aedes aegypti
atgcgcttcgagaagttcgaaatgccaaagcatggctacgaccaggtggacggcagtggaatggccacaggagcaggcgacggaaccaaaggatacggggcggacgacggcgggggcgattcaccgatgtcgtttgaggaaatcgaacggccaccgctgcggcacatcgacaaatatgttcgggcggagtgtccctgcattaaaacgacccgcttcacgatcgccctgatgacctgcctggggttcatcatttcgttcggaatgcgctgcaatatgggcatggccaagctccagttcgagaatgcgaccgtcaaatacaactggaccgtcgccatggagagtgcggtcgactcgtccttcttctggggttatctggtgacccaggtgccgggtggttttctcgcttccatgttcccagcgaatcgaatcttcggaaccgccatcgcgtgctcgtcgtttctcaatctgctcgttcccggagcgatggcccttgatccggtggtgctcatcatggttcgagtactgcagggtcttgtagagggtgtaacgtatccggcttgtcacggtatctggcgcttctgggctcctccactggaacgctcccgactggcaacgatggccttcagcggttcgtacgccggagttgtgataggtatgccaatgtccggtattctaacggggtggatcagttggcacgcaccgttcttcttctacgggctgtgtgggatcacctggtactgcttctggttgtggctgtcgttcgagaaacctcggcagcatccaaccatctcgctcaaagagctgaaatacatcgaaaaatcactgggagattcggtgtcgctgccgatgccgaaaatatccacaactccgtggcgagcaatggccacgtccatgccggtgtacgccatcatcgtggccaacttttgccgctcgtggaacttttatctactcgtactgtatcaaagtgcatatcttaagcattcgtttgatttcaaaatcgaagagactggtattttaggagcactgccacatctactgatgacaattattgtaccatttggaggaatgttagcggattatttgcggaagtccggactgatgacgacaaccaacgtgcggaagctgttcaactgcggtggtttcggcttggagggatttttcttcctagtagtggcccacacaaatagcgctatgggagcagtgacggccctcacgctaggagttgccttcagtgggttcgccatttccggctacaacgtgaaccatctggacatcgcaccccggtatgccagtatcctgatgggaatgtccaacggcatcggtaccatagccggtctgatatgtcccattgcaatcgatcatctcacgaggggacagccaaaatcctgttggtcaacggtgttcatgatagctgcaacggtccatctggtgggtatcaccttctacggtattttcgcgtccggagagttgcaaccgtgggctgaaccgaccatcgaagagcagaaagcgtgggatcccatggccactgggtacgagaaggaaacgactttcaacgacgccaatggagcaggtggagcagcaatggcccccggagctccctacatggatccttcggcgcaaatcaacaccactaaaaccgtaagctatggagcggtttctcacgtggcgggcaatccatttgcctatccgaatgtgatcaatgaagaaccggtacaaccggaggcgaaggactcctacttacacggcaatccggacgagcgttcgtattga

SEQ ID NO: 1205 - DNA, 2443 bp, Aedes aegypti
aatcgtgtgcagaaaaagaagaaagtaaatgattggaagagtgcccagatgtgaggtgctgtgccaaataatgtgccgggcagagtgagcagagtttcgcacccccttgggttaatccaacattcaagttgatgtatttacaatattttatataattttgtccagtttctaaatgtcttgtccgcactgtgccccggtttccgatgaactgaatgaacgtcccagagaatgaaccttctctcgcaggattttgacgtctacgtccttgaacaaaaactagcattttttttctagtgttaaatcgaaagtcgtcggcggcggcggcaactcgcgagcggatgcagttctagtgtagtgaccgtcgcgttccgtcgtgtgtgaatagatgataatgcatcatcagctgacccaacaagttttgatccagtatcgtacatagggactcctgcatacatctaacgatctgctgctgctgctgttgcattcccgcgtttcgttccggagatatctaggacaccaaggatgactaaagattcacaaataagcagctgcgatcgctgcccaaggctggtcgcgttcggaaatgtgctgctggacatcagcgtcgagctgcacgacaacaaaatcctcaaggagttcgacctgaaggaagatgaccagcgggaaattccggcggacaagttggcccggttgggggccgttgccgtggagacatgcggtaaaccgaaatacaatcctggcgggtctgcactgaacacgtgccgaattttgcgcgcacttggcgagaagaatgtgatgttttgcggtgccattggcgttgacgagaatggagaggttcttacgcagatactgaaggatagctcgttagccacgtgcatccaaaccttgccggagcactcgacgggcacttgcatctgccttatcagcggagataagcgcagcctcaacgcaaacatcggggcgtcgttgcacttcaagaaggaattcgttatgtcacgttggtgccagagcaagatcggaagctgcaattcagctgctcataccgacagcgatgaggaaattcgtatcttctacgttgagggatattttgtgccggaaaagtttgccatatgcaagtacatctacgaaaagtactgcaagggaacgccaaatctgttcgtaacgaacctcaatgccagctacatactgcagaacttcaccaaagaaatgcaacacctggtcgagcaggccgatttggtatttggcaatctgaccgagttcatctcgttggccgaaatctatgaatgccccaccgtagatgatctggccaggtgtctgattaggaagtacttaaaaatcaatcgggagaaaatcctggttgcgaccgatggttcccgaagtgtgcggttctaccacggcaacggcagtgcattctatgctgaatcctatcaggttccgattattcccaaaaaagcagtcatcgatacgaccggtgctggggactcgttcgttgccgggttcctgtacaagtacatgaatggtgaatgccccacgctgttggactgcgttcgatatggcagcaaggtggccgccaaagtcattcgtcaagtaggatgtaatctaccctcctctctacctacttctccggttagcgggctggttacacccgttgatgaggttgaatccaaacttgcctagaacagaaccattgcgagccatatccttaaatgtacatccttagtaacttattagcccggtacaggtgtacttagcgcttattacttagtccccttagaacaaactaatggtgttctgtttcttaatctcaaaattttggtctataagaaggtagtgtgatctcattttatttcgtgtttagttttagtgcttaagaatagcatcgattgtacgctgactatacaaaggcaaagaaagtatacatttctaggtgctagttttgaatctctaatgatacctattttaatgatgtttcgttatatacgttcacaagccacaaataatgcaatcgctgaaaaacaagccacatttgttacataaggtcattaaaatatatattcaaaactgttgattacatggtacatatcagatgaacacagacaaacgaacgtaacatttcgaatcatttcagcaacgagatcagcattttgaaaacattttcgccatatgattgctgaaacacttcaaactcagaacctgcgtgcatccttgagtaacaaaataggactgcttgggcacctacatgaggggattttctcggtcaaattattaaaaactctatagtaaaataaacttcaatatgaagcacatataggcttattctaagagtgaggtgagctgagagctctaggtcttgtatagcgaggtgacaatactccactcgaatgaggtgagatctcatttaatttacacggcgaatcacttcattcgagtcgagtattgtcac

SEQ ID NO: 1206 - DNA, 567 bp, Aedes aegypti
atgtttcaactactattgattcttaaatcttccttcacccttagccccagatcgggacgaatgtcctcttgcagaccctctccccgtcgcatctctacctcttcctgtcttcaatggtggtttagccatcacaggctccaatgcattcaaacggtccgatggatgctcttcaaaacgaataactgtagttctaggataggcaatgacccgagtttcctgatgctgcgctatctcatctgcactgtcggtctcttcgtccgacgaagattcttccgccattcgagcctcttgcgatggctgttcctcaatgggaaccttcatagcgtcccaatcgaaaagatccaacaacttacgatatgttttatccctggaacgaacaatgtcctgatacgacgcctgccgatgaactacgagcacttcgacatccctggcacaatccggttcggagtgcacaacgttagtggtccactgatcatcttcggaaagcgacttaaagtatctgacaacggatggatgctgatggatgctgttgagggtcaatggctgtgttggtgctggataagctag

SEQ ID NO: 1207 - DNA, 993 bp, Aedes aegypti
tgttcctcacaatactgggctgtttgaaattagcatcatttgtgcgctgtcctgcattttaacctgttcaaaattgtcataaagtaagaatctgcaaacatcatcaatggacaaaagcaaataccgtaaggagaacggtaattttatccgtcgcgttggaccgatggagctggaatcctacgctctgcacataatcaacaaggaaggccaaatgcagcggatcattaatccaccggaagacgtcatcggaatactgctgaacgaaaacgcagatgaccaagccaaccccaaggtcgagtttgtctactcgatcaaaaagttggcgcgtaagcatggaaagcccacgggaaaatcttcggcaaaatcgcacggaaaattcgggctgcatgactttgcccagctttttgccaattccgagaagccagctccgcgaagaggttttcccacgattaatcaactggccgccggtagagcggaagtgcagcttccaaaaaattggaagcaagatctgaacaagactatggatggactgctggatcaagaggcgcgcagaagatgggaagaactgtcgacgaatttatgtccgtgcaagaaaaaggagatcctcgagcaaatcaggcaggaacgcgaactaatcgagatgcaacgtattgtcttgcaagtcttgatcacaggttatgattcatacataaatatgcttctggagcaattggagcgtaacgatttggtgttggctttgaacttgggagaagggaaacgaggtgtatggtccttggagaagagaaatactcgtctgcttgggacgaagctgatctccgggaagaaagaattttggagaagttcgcctcaagattgagcattattgtataattctacatctatacaaccgggattttaatcactgacaagaaaatcaattgagttttacgatatatttttgtaagttcattagcattagtgcaataaagtggcgtcaataagtttcgtagactt

SEQ ID NO: 1208 - DNA, 1200 bp, Aedes aegypti
atggtgttcaagtgccaggaggacagttttctaaaggaatacatcgctaaggtggtagcttgtgaaaaggtcgtcagtggcggattccaagttacgttcgaagacaccgtacttttcccggaaggcggcggccaaccctcggatcacggttggctgaacggaactgaagtccggaatgttatccgtaagggagcgaccgcagtacactttctggatggggaggaagtgccatttcaagttggtgaagaagttcaccagaagattgactgggaccgtcgattcgatcacatgcagcagcattccggccaacatttgattacagccattttcgaccgggaattcggatacagcaccaagtcctggtggttgggatcggaagattcctttgtggatttggataccaaggacgttaccaaggagcaactggtaaaagtggagacaatttgcaaccaactaatagtggactgcacccctgtagatgttaaagtttatcaaccggatgatccagctttgaagtcggaagcgactcggactcgtgggcttccggaggacgttagtgggcctcttcgagttgtgaccatcgatggaatcgaaagcaacatgtgctgtggcacacatgtaaaaaatctagcccagcttcaagcaattaaatttctgaacgttgaaaaaagcaagggcaaatgtctggttcattttcttgtcggaaatcgtgtcctgaagaagctcggagattgttacgagcgagaaattcaattcaacactttgctaaacggaggaccactgtcgcacgtggatctcattaagaaaatgctgacaacgatcaaaaactcgcagaaagtttgcaaaaaattcacaaatgaacttgctctagtagaggtggcaaaagtaaatgctttgaaccctaaacccagattcttcagcgttcatcgtctggacggaatggactcggacttcatcggcacctttttgagaaatgttaacatgtcggagtgcttcttcttcctaacaaatggcgatgaaacccgaaaaggtcagatggtactccagggaaagccggatgatattgccaagataggagacgcaatttgcaaagctctggatggaaaaggtagtggcaaaggtaccagatataatgccaaagtgaacaatttgaaagcaatcccggaatgcgaacaaatccttacagagcactttggataa

SEQ ID NO: 1209 - DNA, 630 bp, Aedes aegypti
atgagtaattgtgttaacctttatcttactatttttttcctttctgtcttctctcccctcgcaggtgacgtcctatccggagtgtgcttcgtcggtcagttggacacgcactcgttggccgtatttctgctgatccccctctgcatctacctctcggttggagcgctgttcctgctggcgggcttcatttccctgtttcgcatccgaacggtaatgaaacacgacggaacccgcaccgataagctggaaaggctgatgctccggattggattcttcagtggtctgttcatcctaccggccctgggctatttgggttgtttgttctacgagtactacaactttgacgactggatgatccagtggaaccgacaaatgtgcaagctattctccatcccttgtccgacgacgacaccgacgatgacaatgggcggttcgctgaagtacggttcggcagggatgatggcccaggacgaggagaagccgatcttccacatctacatggtcaagtacgtgtgctcgatgctagtcggagtcacgtccagcgtgtggttgtggtccggcaagactgtgatcagctggagacagtttgctgagcggctgcagggaaaggacaaccgcaatcgtggggcg

SEQ ID NO: 1210 - DNA, 606 bp, Aedes aegypti
atgaggaggttttatgcctattgggcgcttgtccaacaactccaagatctttatccaggaaaatccgtttacctgttggtattcggattgatcacctattgtcgcaatcacagaggatgcgttggacgacgagaaacggaaattgccctcacggaggtgcaactgtttgcagactgttcgcatcagctgattgagtcggctgaagaagtgggcaactttgtcgcccaattgggtaagagtctagcagagctgccctacaaacagcagcagaatgaaaagtacaaccaggagcagctgtatctggggaacgaaaagaagggctgcgtacgagtggagggcagtgccggattgcaccagttatatcagaatcaactggttaaaattccttcggttacgttggaaatagcagaggccatcattgcggagtatcccacgctcagtaagctgattgaagggttcaggatgaatggccctagcttgctggccactattcccatccgtcgagctggtggacccattacaagctctgttcgacgaataggaccggagttgagcaagaagctgtgcacgatatacagcagtttggatccaaaacagaagttgtag

SEQ ID NO: 1211 - DNA, 1128 bp, Aedes aegypti
atgtccaggtgctgctccattcccggatgccgctcccagttccggaacaccactctgttcagcatcagcaaatactctagcctggcccaatggtggaccacaacgtcctggtacgacgaagtggtggaagcttccgatccgcggcgggaccattcgatttgcatcctgcacttccgcgacgatcagctggacaaaagtcaaaccgagatgcggttgctgaacaacgttgtgccatctattaatctgcccggatcattcacgatatctgcggttcatgagaattacaaactgcacctgccacaatcggcagacagtggccatttagttctcatttactgtcgcttctgtggtaagaagcagaaaaccccactcaagaatcacctggaagatttgatcgaatcggaagatctgctgcaactatgtcttggacgtggtcgcttcctggaaggtttccccagtggagtctgtgatccatgccaccagactctgaaaatgaccaccatgttcatcaagaactgcgaacaagctcaggaaaagctgcagaagatattctttggaacctcacagcagatcgaggattcgttggacaacgaagaggaatccgatgaggcagattacacgttcgagatgccggaagccattgtctctttgaaggaggaaatacaatctcccgaaccggatgagctcgaagatggaggcatggagttccacgaaatgaaacgcgaggatccgctggatgagcttggcgtgttcagcaagccaaagaaaccttccaaacgggaactgaaaccgaacgacgagcagggggacatccggtgcaccgtttgtggccgaaccttcaaccgcaaggtggccctccatgcccacatggaatccgtccacgagggaaggacgtttgcctgtccgatttgtggaaaggtgatgggctggcgaaaaactctgcagcggcacatgaaaagccaccaggagaacttccagaagcacaagtgcgaactgtgcgacaagtcgttcagccggcccagccatctacggttgcacatgatgaagcacaccggacagaaggtgcgctgtgcgttgtgccagaatgggtatcgtattaatttgttgcttcgaactcgccctctgtga

SEQ ID NO: 1212 - DNA, 3218 bp, Aedes aegypti
cggtgcgcgaccgatcaaaaagtgtgcttttgtttttacgtctccgctcacgtttcgcatcaactcgttagttttattttccattgaattcagtgaataaagagtgtttcagaaggttgatagctttatcagccggcaggaatgaattcgcggaaatcgaatacaccggcgaaaggccccagtaggcctaaatcggcgcagcctacgcccgaaaccggaggaggctctcggtccattccgcccatcgatgccagtcccatacggacctacacggatggtggccaaaaactgctcctcgacggtatgaaatctgtactggctctaccgtcgggaaactcccgggacctgtatgatacgcatccatcgttcgtccggatcatggacacccaggccaacaaggtcctgcacatgatttcggacgttctgaaactgcacgaaatcaagggaaacatcgtcgtccgtgatcgagaggaaaagtttgagctcctacaggagttcaacgattccatgctcgagcgtatcaactccaacctggacgaagtggccggcatcaagaagaaacatgaaacggttctggtgcagagtgaaatacagctcccggcagaacctcggcagcgtctcagtggcagctggaacaacgccagtaaaacaccggcagcttctgttgctgctgtggttaaagctaccctcgtcacaggaacgaatatacaaagaccccaagtcaacttcaaagttcccgtagataactctccgctcaacccgttcgttcccaaaatcaaggagaagccaaattcgatgaaaccgctggcagttctgccggagtatgacgaagccgggaacatcgtaagctatctgcacccctatgagttcgaactggacagatttgaacccttgaaagaagctctgaaagaggttgaacccgaagaaccgctgaagcttgagagtacacctttggatataatagacaaggaaagccaactgccaggtcttttaaaggaattgaaagcagccaaggagctcgccatcgatttggaacaccactcgtaccggacgtatcaaggcttcacttgtctaatgcagatttcgacgagaagcaaagattacattatcgatacgctggctcttcgcgaggaattgcacattctgaacgaggtattcaccaatcccaaagtggtcaaagtgcttcatggcgcgataagcgacatcgagtggctccagcgggatttgtcgttgtatattgtgaatatgtttgacacgggcgaagctgcaaaggttctggagttctcaagaatcggtttacagtttctattaaagcactattgcaacatcgataccgataaggcgtaccaattggcggattggcgcattcgtccgataccgcacaatttcatcgagtacgcccgcaaggacacccactatctgctgtacatctacgatcgcatgcggaacgagctgatcgcaaaaggcgccagcttcctgccaaccgtgtacaacaagtctacctacatgtgcaagcagcgttacgtgaaacccgtcattaacgaagacgccgttatgaatatctaccgtcggtcgaagcatgtgttcgatcagcgccagatgtacgccttccgggagatcctctactggagagacaagctagctcgccaggaggatgagtcccccggatacgttctacctcagcacatggcactggacatcgcttccaagttgcctcgcgagatgcaaggaatcattgcttgctgtacgccggtgccgtcgctcgttcgtcagcatctgcacacaatccatcaaatcatcctcaaggccagagagatatcgctgaataaatcggttgcggcagcaatcgagcaccagaaagatacccgccacaaaatgcagtcgacgttcgatttgaacaatccgctattctgtcctcacgattcaagccaaggagtgcacctggagaccaatctgcctaccttactcaactcgaccagcaagattggagtttgcgagaaggtattggccggtatgctgaaggaacagccggatgcgggtgttttcgaagaatccaaaacgagaaccttggacgagaagggtagattgattctggacagtaacatgtcggaagataccaagatggcgaacttcattgaagcccattatcaagctaagcaactagacggcaatcagagcctgaatgggtccatatacctttcataccaggatcgtaaattcaacactccctatgaaagacatctggagacctgccgaaaccggtatcaaaacgaggaacccgaagaggaagagcaggataagcgtttaaaaccggttgttaagcaggaaacagataaaccagttgagtccacagaagttaagtccgaacctgttatggactctaaactaccattgaaagcccagaaaagacaggaagaaagggaagccaaacgaaagcttgtgcagaccgaatcggcagacaaaatccggttcagcaactttgaacctccgaagaagaaggaaaagacagatcgtcgctctaagggagaattcccgctgcagattaaaccaacggttgagcagaacaatgaccacgaagatgcagcgagcgatgaagacgatgaagaagacgaacggaacgtgtcaggacagagtggtcagaacaatagctttgccaatggcggaagaaagggtaagaataaaaagaagaaattcaagaaacaaggcaaggccggccaaaaagaattcaagcaaagctcgaacaagcccgttccgttcgattatggccaagtagattacaatcggttccagggaggctctagaccgttgcctcagaaaggaaaaggaaataagttctttgcgcgaaaacagggccaaggtgaggacactactgcgggtgagggctctactatgaagaaaactctgcaccccaacagcaggatagcgaaaggtataaaacaaagtcagaaaatgtttaattttagcagcaataatttacagaaaaagaagtaacggaatctgtatgtttctgtaatattagtttttggtaattttaatgaataaatttaagtgaaatttattgaattatatcacatgttgttaattgaatgaaagctttgaaaaatctatcaaaatacatcaacagctcttgccttggattcatcgccatatttgagcttattttattatctacccgatgggaaggctatagaaaagtttggaggaaatgggattgaggt

SEQ ID NO: 1213 - DNA, 1525 bp, Aedes aegypti
cgagcgtgtataattcgttgctcactgacagtgaaaccagtctcgctaaccattccatgttcttgaaacgcgagcgccttaaaagtttgtttgttgtttgcacagaagtcgtcaggggaatttagaatctctttcatcgaatcggaatttgcaatcttcaacatcatgacctcggatttcaaacctatgacgcactgtttcatcccgggctgcacggccatcgccgactggaacaagctccacttcttcaagatgtccttcggcgatttgcctcactggtggaagagcacggcctgggtggccaagttcaacacggaactgccggcggacgccctgatatgcgagcggcacttcgaggaacggttcatcgatcggtcacgcaagaagccccgccttctggtgggaaccattccgacattgaatctggcctcgctcgaggtggacaacgagaacaatctggagtacttctgccggctgtgtgcaaagaagggcttcaaaccgatgcggtaccgattggagcatctggacgggatgaacgatgtgctgagctgctgtttgggccggttccaagcggaggtgggattgcccacaggggtgtgcgaaacctgtatcaatatgatgaagaaattcgcccatttcgttcggcaatgcgaggaatctcagctgcaaatactgcagctcaacgagaagcgtcgcagggaggaattgggcgatgaaccggaggagatgacccaggaacagtacgatgccaacaaagagaacaccgacacggaggatggctttgaaacgaaaatcaacctggccaatacctcggaaacggaacggaaccacagcacgggaaagcggaaaagtaagatgttcaccgatggtaaaccgtgtccggattgtggtaaactgttcaaaacccaggcaagatattaccaccacgtaaagagtcacagcgagttgctggaatatggatgccagatttgtgggaagaatttttcccggagaaacggtctccggaggcacctggagcaggtgcatggcggcaaaatgaagttcaaatgcgtccaatgcggggaaacgtttacgaacaagaacctgctcaggacacatcacaaagaggtgcacaaggctgatagtagtaaaatcataggcaaagttgagcctgagccaatggatgagaagaccgaacttggaattgaaccggacgcaaatgcttttggccaagcgggaacggcctagcgttgctggttcctctttaattttaggattacagtattacagtggcttctcttttgccactgttactgtaagttggcgctcaacgcacttcatttccatagaattaaacaaacaatgttcattaaaaaagtaccgtccaatgtaaaccaaatgtctttcacgtagattagaaaaaaaaaagtcaatctatttcatataggtatggagtggtagagacctagggggtgcggacccaaagatttaggttgttcaaattaaacacaatcttttccatgagtgctaaccgttgtgtgtttgc

SEQ ID NO: 1214 - DNA, 2193 bp, Aedes aegypti
tgggtccatgcatgttgctcaagatttatgccaaattcagtttatacctaacgggataaccccctttcttttctacaactgtcaaacaaaacgtcattttccacttgtttttgttgtgatctgattaactcgaagcgcgacatcgttcgaagcaaaatttatattatatttccgccggtaaaacatgggtggaatagatgtggagaatgtgtgccgcctgtgctgcgtgaataaaggtcgtttgcggtcaattttcgagcgggcaccaaacgaatcactcccactgcataagataatcacggacgtcacacgtttggaggttgaacttgaagatggattgccaaaccaaatctgcagagcctgtgtcatcacgctgggtaagatgcataaaaccatcctgaagtatagggcaaacgatgggaagttccgacagatgctgagttccaatccggtaccacaggttgaaatcaaggaagaagaggtggacatagaacaactggaggagacttttttgcaggaaataaccatcgagcctatccgaatcaaagaagaacaagcagaagacgaaacgtatctgaattatgaacggctagaagaaagcaaagagtctgacgtatcagatgcagaggccaaacccccagaccaggcagaagatggttcggagactgataccgccgatgaagctgttcagtgtatggccaacgagaagaaaataaaagagtctaagatacccgctagaaaagaaccggttaccgcaaaaccgtctacctatccacgaatggtaccttatcgtcgatactactatgatgatgatcctaagcgtcctcggagggacgattacaaatgctacatctgcaagaaccgttcccatggtacacccgaagccctatcattgcatttgaacacttgccacacagatctactgccgtacacctgtacggaatgtgtaatggaagaggtagttattaagagtacacttgctctcaataaccacaaaagacaacatttaaatccattgaaatgtgaacattgtgatagacgatacagctgtaagaataatctagccatgcacgtgcaattgtatcactcagacaacaattcttctctaacctgcgaacattgcggaaaagtgtgtgcttcaaaaccatcacttcaccatcacatgaagctacataccactgcagcggcctgcgaaatttgcggtaaagtcttcaaggaacggagcaaactgaaacgacacatccaaaaccggcacgaaaaacttcgaaaatacgagtgccacatctgcaagaagaagctctcaaccatacactctgttcacattcatatcaaatcgttccactctgagaagaagttcaaatgcagttactgctcgaagttgttcggcacggaggtagctcaacgtatgcacgagaaaaaacacctcaacaatcccaaattcgaaccgcaaaagaattggaccgaatattacactattctggaggaagataagcacaagcccagattgacccagcgcaaaaagtgcaacctttgtggacatgtgaccagaaacattgccacccatctggggagcaagcatttccccaccgaatatcggtgccacatctgtggcgcggttttcaaaaagaaagcttccttcgaaatccacgtgcaggaccacgagcatggcaaggcccatcggtgtccaatctgtgggcgagagttttccgagaggcgacatctgatcgagcatcttcggacgaagaaacaccgggagcacccgttggccgtggcactgctcagtacggtcaaaaaaactatcaaaacggcttcctccacgaaaaagaaggaagcgaagtccgacgacgaaggcgaaagtgtgcaggaagaggtgcaaacggatttcgatatcgcaacagatagttttatgtaagaggtttgatgttaagttttcctatacatgtacctataagtaacatcataggaaataaacaaaatagatgctatttatggttgtcataaattgtttttgcctttatgattacaatcgtcccactgtggatagtcttttatacggcgaacaggaacgaagagacttacagttataactactactactaccatcagtgcatcaaactccgctcatatagaacaaattttgaattttagagccagttcgcgagagccgcaaccccatcttcgatgttcttcgat

SEQ ID NO: 1215 - DNA, 6402 bp, Aedes aegypti
atgctcatcagcaacattcgatttcaacgcacaagcaatatcagtcggaagcatctcggccactgccgtcaataccgaaatagccagttacacgtgctcgaaactacgcagcaaaccacacggctcaatataaaaacggacgaaaaatttgcggactttctgctaactgaaaccatcccagagctccgggctcagctggatttcacgtgctcctcttcgaccacaagaaccattcgcatccaggtgacgatccgggaggaaaacttgtacgctccgactttcaagccagaggaatacgtcatccagcttccgttgccgttgccgaagaacttcgatctgacccagttcgtgaacgagggcaaaggcataatcgcttacgactacgatttgaccgggaacgaagtcgatttctcaatcgaaaataacgcttacttccaagttgaacagataccgggagcatccgggaaggagttcatagcaagactccggaccctacaaaccctaacacacatggaagctaccgaattgaaaataaccggtactgatcgaggaaatccgccaaagaccggaacagcgcaactgaaaatcgccggagatccgttaattccttatattgcaccaccacagtttgcggagtctctgtatcggagaatgtacaaacgtacggaagcctttgtgcccgttgaagtggttctaagtgctggaacttttgatgatacagtgagcttcttgcttagtggagacaatggagatttgtttacggtaacggcgaaatccgatcatagcggagcttccgtgacgctgaagtcaggtgtaacaatcgaggagacaacaaacttcttgaatgtattggttactgctacgagagtgggtgcggagatgaacggtcgaacggcgatcgtggtagaagtggaaccagaagtgaagatacttcccgcttttgagcaacctatttacagcgggacgatcggtcaagagaaggatataagtcttgggaatccgataaaattggtggctgcgaccattgtcgatggggttcaggtaactctggatggagaagatgcggaatttttcgtgttttcaaacagtgcaggaacgatatcgctacgaccttctgagaaattgacggaagaggtattgaatgggaaattctacttccatgtaacggtaaaagctagtaaacctggaattggtagtaatgtagccatcgttgttctggaagtgctgaagaaggatgttgtagttcctaaattcgaacaactgtattacgaaggaacagttactgaggaagggttggcaacgataccggaaataaagatcattgctagcacttttgtagaagggttggaattcaatagagcgggtgaagcagatcttttcagtatctctcaggatggaaataaactaacattagttccgaatagcatcactgaagaaaaactacgtgataagttttatcttatagaaaaaattagcgccgttctagaggatcaaatcgttgcggaaacgatagctataatcaaggttgtcagatcggagatcatcgtcccaaaatttgaagagaaccttgttcaaggacaactcgccgaaggaaatctacagttgactccgatgaaagtgattgttgaccccaatacttataatagcaacactgaggtggttctaaaagattcaagtaacttgctagtgctgactcaatcctcaaacagaaacgagtacaccatcggtttacgtagtggagcacaactgcccacgacatcacatattactgccattgttgaagccaccaatcccaagtctgctacggttcattgctttgtactgatcgaagtcatccgcgaaccactgattgcaccagaattcgagaaagctctatacgaaagcaccattaacagcaatggagtgcttcaagagctgatactcaggattaaaccggaaacttacgataacacgattgcctgtagcttacaggacgctgatgcggagttcttccagttgcagaagttggacaacaacatccaaattacactgaaggattcaatatccgaagatgctttggaaaatcgcaataatctacgctttagtgttcgagctgtgaaaccctcttccctcgatgccattgttccggtaatagtattcatcgaaaaggcgaaagttcaagcaccgcgatttgaaaaagccttatacaaatccaacattcttccagaccttacgttggttcctttcgagacgataaagctggaagatggcactggatccgaagggctagaaattctgattacccagaataattcagatcttttcgcagtcgaaatagatcaagacagtcacatcacgataagtttgcgaagaattttgacgccacaagacgtggaagggcttgaacgattcgaatttgtacttcaagttacgaacccaggagtcgggtctgcttttgctacgattgtcattgatattgaacgcagtcccgtgatagagccagagttcacggaagtttcgtatcatgggacattgcaggaaggtgctcaggagatcattttcacggacaaaatcactctcagagcagagaccattacgagtgatgtgcattatgccttgttaagcggtgatcacgccttggttgaactttccaagaacgaagacgccagcctgaagttcacgttgaagtctgatgttaccgtggatcagttgaagggtaaggcccaactcaactttgttgtccaagccacaaacccaggaagctcacctgcgtcagcaagtatagttgtccaaatcgtccggccagtacgagccgttttcaccaagtcttcattcagtggagtcctcaccgaaggtcaaaccctcgtagcattttcagataaaatagaacttgttgaagggacttttacggatgaaactgctctacagctaaacgaaggcgattcgaatttgttcaaggttacggtcagctccgaaaagatcatccagatatcgctaggatccgaaattctatggactcaagttcggtttcatccttacgtaaccttcaaactgacagctacgaatcctggatcggaaccaagctcaacgaccatccttgtcaacattatcaaccacccagtgcccactccagctttcacgaagaccttctatcgaggctccctgcagaaaggtgtccacgaggttactttttctgcaggtgaagtcatcaccatcgaatcagaaacaatcacctccacttttatctttcgcgttctcgacgacgacgatggcgcgctattcgacgtaactcgcgaagagaacaaattcaaggtctcactgaagtccactgtggacgaacagactattgaagggcgtgacctccttagctttacgatcgaagccaacaacgagtttggagaaacggatcgagctacggttattgtgagcattcagctagatgagatcgtgactccaacgttttccaacaatctatatcgaggatcaatcaaagagcggaccaccgatgtatcactcacaacgacgatcggttttctggcggggacgtcgagtagtaatacagaggttggcctagttgacggtgaagcagactggtttacggcacggtacgcaaactcacaagtgacgatcgctgtgaaaaatgaggacgtaatcgactgggatgacatcaacgatcgcagttatttgagtttcgcactacaagctacaaatccgggaagtacggctgcatcagctttcgtaaccttggatattcaacgggacgtaattcctatgcctaggttcaaggcatcatcgttccaaggagttttgctagaaggatcaagtgatgtacaattttcggaaggagcgtcgatcgagttgattgacgatagcttagtggctggattcgagatccagttgatcgagtatgaccatgagctgtttgacttcactcaggaaagacttcagattaagatctcgttgaagtctggggttcttggagaaaatctcaaagatcgaacttatctccgattcactgtcgcagtgaacaatcctgggagtgaaacagcgacggcaaacgttttggtggatttgaaatggaatcagactcccgcgaatacacctctctttgaaaagttctactacaaaggctctatcggcctggatcttcaaatcaagttggaagactcgatccttatcaaagaggaaacgtatacagcggatgtgctgtatggaatcgttgaatccgataacgatttacttgtggtggaaaaaagcaatcgggaagttgtggttaaactggcaaaagcaatcacggaagatgacttgaaaggactcgaaagtctacacgttacaatcagagcgttcaacgaaatggagaaagaaagtttttgtttccttgttgtatcattaccaagagaaggagaagaaccttgtcggacaccgacactcgactgtacagaatgctacgactgctcaacgggaacgcccttggaagatgttcccgtattcgagtacggaaactaccgtttcttcatcaagtccgatacgataggtctgatcggtactgttaaggctaccgtgaaggatcctttgatacacctggagcatcgagctgaaatcgacaatgattacgtcagttcgagaataacatttactgctgacggcatcttgcgagtagatcgagctctactacccggtcagtatagcttaaaagttacggctttgaatccacacgctcagaagcagtcttctgtgaacgtcctgctggacgtcacccaagaacaggaatgtccagtagatccggattcaccaaagatcaccaccgttgagaagcttctggtcattaaaacacttgaagaggaatcacctcaccttaacatcttcccatctcaactgagtacgtgcgagtacgaactagtggatgaaaagccttatcttggctataactattttgaaatcgaccccgaaacacattggcttacatcaaaaagtttcgatcgagagaacaccacactcttcgaaggaatgaccataccacagttccaagtccggcttcatctggtttgccaggatcaagccccggctcagtcccgtcgaactgagcgttccttaatcgagtccgaagatttgaactacgctcgggacgttacagtggtccaagtgatagtgacggacatcaacgatcacagcccagaatttgtatttccttctggtagcgaattcttccacattgggttcccggtttccacaatcgcctctggactgatgctttcccagctgatcaccgtacgagcagaagatgcggacgaagggttgaacgcgaagatccgatacagtttgagaggcactcaatcgtatttcgcaatcgaaccggagactggattggtataccccttaaaggaatccatgaagtcaagctcagtggttacgataacagtggtagccaccgatcgtgatggagctagtgacggaagaactgcggaagttcaactgatcgtacaccaactagaagagaatcatctggtggcgctgaccgttcccgggcagatggatgatgaggatgtgatccgtcaaatcaattctaaccaagaaggagttcaagtgaaggtactgacacaggctagagttccagaaatcaatgaaaatgctgacgacaagtcaacgagacagtcttcctccgaagatagcgtccttcgaatgatcgtttacgcactcgctaacggaaacattgtgcaaagctctgataccattatgcgagtaatcggatcttcttcagtttcatcgagcgtaagcatagattcgttcaggagcgtagcatgctctgaatgcagtggacagcaatctgatagcgaagacaatgtaggactcatagtcgccacgtcgattttgggagcgttgttcgtgatctccgcaggtatggcgatcttcctttacctacgttacgtgtggccactgaaggggacaacggaaaacccatcggacgtggtccagttggagaacgattttgatgtttcacccccaccatcgcctccaaggttgggagttgggaaacagatgacggtcgatgaacctgagatggaggaacgcaaagtttccattcaaattctgggcgtcacagatcaagaatcggaagacggcaggctacccaggtcccgcctagcccaatctctggacgatcacctcgaacgaggaggcgagttcggtaccatatcctcacggggcaccatcgaagattcgtcatcgctgtcctcagtgaacgaacctcgaaacgttaagttcaacgaaatggttgaacgaatagaagtcgttgagcaccacatagatgatcaacggcaccgggtggatctggctgatgacgactcggtctacagcgagcggatgtagagttgttaggtttattatatcacaagtacatttttattaataaaatctttgttcagt

SEQ ID NO: 1216 - DNA, 2625 bp, Aedes aegypti
atgatcgaaatcgaagacgtgatagacccgaccccgaccagcgaagattccaagaaaatcagtgcaatcgaccgggataccgtgcacaggatctgttccggtcaggttgtcctgaatttggccacggccgtgaaggagctggtggagaatgccatcgatgccggcgccacggttgtggaggtgaagctcaaggaacaaggtgccgatctggtggaggtgtcggataatggaagtggtgtcgaagagaagaatttcgagggactgaccgccaagtatcacacttcgaagctgaaggaatttgcggatttggcgtgtatcgaaacgttcgggtttcgtggagaagccctcagctcgttgtgtgcgttgtctgatatggttgtagttaccaggcatgaaacggcaccccacgggaccaagctggaattggaccatcggggagcgatagttaagcgaagtccttgtgcgagagccgttggaacgacggtttccttgtccaacttgtttgctactcttccggtacggaagaaggagttccagaagaacatcaaacgggagttcatcaagatgtgccagattctgcaggcttactgtctggtgtcggttggagtacggataatctgcagcaatcagaacaagaagggtgttaaaagtgtgatcatgagcacgcagggatcaaattcggttttggacaatataacgacggtatttgggtccaaacaatcaacggaactgattcaattgaagccggccataagcagcagcggcaagatcttagatctgaacgagagtgacttcgatgacaccctatctctgacgcaggaagaagtcgataagctgaatctgtccagatataccatcgaagggtacatttcaagttgcgcccatggctcgggtcgatcctccaaggaccggcagtttttcttcgtgaattccagaccttgtgaaccaaaggccatcatcaagatggtgaacgaaacctaccacaagtacaacgtgaaccaatgtccattcgtttacctgaatctgaaaatggcgcgctcggatgtggatgttaatctaacaccggacaagcgacagattctggtcaataacgaaaagattcttctgttggcacttaagaagtccctgatgaaaacgtacggcaccattccgtcgacgttcaaaatgcagaacttggatgttagcgccacgtctcgtttgttgaacatttctgtcatgtcgaaagacggtggggatgaagattcggtagatgatcaaagcatggaagctccaaatcccagacggatgttgtccgcatttagccacaggggtgcctcagcaggaaacagcaccagcgacagtacaccggtgaaggctgagaagcgaaagcgtgaaagtgtcgattctacgccgaagatatacaattttataaccgctacgcccaaggctgaatcgaatgacatcaccactgtggaggcagctgatgacgaagagctggaagaaacgttgtcgaagattgcacgcaattcgacgatgacagaggaagacgctatgggtggcgatgttctgccaccgatggcagataacaagcagtacgtggtgaaggttctggatccgttggaaattgccgggagttcaactccgaaaggtaagcttattatacacctagggttggaacctgaagaggcgaaacccaaactgatcttcgaaaccattcaaaattttgaacccactcccaagctaacagtcttgagccccaagaaagagccaatattcgatagtcccatcgtggatcgaaaaccagaagtaattgaaatcgaccaaccatcgttcaaggaagattccttccggccttccacgaagaagtgtttagatatcgacatatcctcgttgaagactctgatagatgaagaatataaactagcgcattcggatgaagcatttcgcaacacctctctaagccgactcaagttcaagagcaaaatcaatccgtccaataatcgcgccgccgaggatgagctccagaccgaaatctccaaggaccgatttgcccagatggaaatcatcggccagttcaatctggggttcatcatcgcacggctcgagcaggatctgttcatcatcgatcagcatgccacggacgagaagtacaactttgaagatctccagcggactacggttctgcagaaccagaaactggtcgttccccagcagctggagctgacggccgtcaacgagatgatcctgatggacaatctggagattttcgaaatgaacgggttcaagttcgagatcgatgggtcggcggaaccgaccaggaaggtcaaactggtggcgaagcctttcagcaagaattgggagttcggaaaggaggacatcgacgaattgatcttcatgttgcaggacgctccgaattcggtgtgcagaccgtcgagggtgcgggcgatgtttgcctccagggcgtgccgaaagtcggtcatgattggcaaggcgctatcgaaggcggagatgcgacggctggttagtcacatgggcgaaattgaacaaccctggaactgccctcacggtcgacccaccatgcggcatctagttaatctctcaatgttacaacaaggagaagtgaatgaccaagaagaaaacgagtaa

SEQ ID NO: 1217 - DNA, 1026 bp, Aedes aegypti
atggccggtgtccaagcgaattctgtcagcctcgagaagtggtgtcgacttcggggcaaccttctgttctacttcaaaaccagcgaccagttctcggaaccgcagggatgcatcgtgctagagaagtaccgctgcgttaagcagggtgacctcaaggagtacgacggttacgtgttctatctggaattcgaggacggcctgcggcagcggttcgccaccaacaccgagcaggagcgtctggaatggatgcaggccatcgggctggccgggtacgacgttaagcgagcccagctcaagtacctgcgggagcagatcgacaagaagcgtggcatgatccacgatgtggacgtcgatatgctgcggctgcagaccggcaaagagatagagctcaacgaagtcccgatctgcgagtcggccatctcctgtgacaatctgctgtgcgacggcaatgggaaaccgccgaacccttcggtagtggtccaagtcacgtccaacaatcgagcggccagcggttgggtcaaatacggacgcaccgaagtcatcgagcgcagttccaatccgcagttcatctgcacgataacgttccggacgggggacggcctgaatgccaaatctcagattcgtttcacggcgtacgacgtgcgggaaaaggtcactcagacggcggttcccattgggtgggccgaagttgccctcggagttataacggacacttcgcggctgaggataccgctgaggacgcagagtccttgcggtggcaatgccgggttcattacgattgccacttgtgcgcccgatttggagaagaagacttcccggtcgccggccaaggccggtctggatcagcaacagcagcaccagcatcaacaggctatcggtcatcggaggtcgcagtcgctgccgccgaaattgggcgtgaaattgtttataccgccgccctcgaagcttgcactggtgttcaccaatccgaacgtgagtatgaggttcctgttagttcttccgattttccaagagaaactttcctga

SEQ ID NO: 1218 - DNA, 1623 bp, Aedes aegypti
atgttacctatttcgcaacatgaaccaaggaccataaagaattatcacgttttattacgtccgcgatacattttctggagagataaaatgtcaaatttgccaacggatttcgaaccattgtattttgtcctctgcgactgtccacctcgttttgatttcaacatgcaggaactcgaactgttggcgaaagtgttccaaatacttaaatccgaaaatgtattcgattcgtcatccaaggataaaattttccctttcgagcatcctgaagatctgaagactatcctgaatctggagctaaggaatgatttgccacaactagattcagcgaatcaggaagatattctgcggaaaattattcggtattccattaagactgctcacccaaactatcatcacgagatgtatgctggcccggattggttgggtttggctgcttcgtggacaactgatgcattgaatgcttgccagtttacctacgaagctgcaccggtattttcgttggtggaatcgtttaccttgaagtactttttgaagctatgtggctttgaagctggagaaggtgtttttaccccgggtggatctatggctaatatgtatgctcctgctatggctagacatagattgtttccggaaaataaaaagcatggaatgtacagttgtcagaagctgaaaatgttcacatcagaagactctcactacagtgtaacgaagagcgctaactggttgggcctgggcgaggaaaacgtgctgagagttaggacagatgccacgtcccgaatagataccaccgagctggaggtggctatcgtgcgctctattgccgaaggtgataaaccactaatcgtatccgtgacggcgggcactacggtgtttggtgcgttcgatgatttgaaccgggtcgccgacatttgccagcagcatcaaatctggctgcacgttgatgcagcctggggttgtgcagctctattctctgaacgccatagacccctactggccggattggagcgagcagattccgtgtctttgtgtccccagaagatgctgggagctcctttgcagtgtgcgatgtttctgatgaagcataccggactgcttgcgggatgtaatgcggcatgtgcggagtacctttttcagatcgataaatactacgacactgcgtacgatactggggacatgagcgttcagtgcagcagaaagattgacgcgttcaaactctggttcatgcttaaggcacgtggctcagcctggttcagatcgtacgttgataacgcaatgaattgtgcaacatattttcatgctgcgatcatccaaaacgatcacttcaaacccgttcgatcggagtatcaattcacgaacatttgcttttggttcattccgaaacggctgcaattgagctctcctgacgaagaaaccgaagagtggtggtctgaggtctacaaggttacattggcactgaaggagaaaatggttaagaagggaactttaatggttagctactcgtcctatccgcaaaagaaattgggctatttcttccggctggtggtgaaatgcgttccggaaccaacgattgatagaatggacttcatcataaaagagatgatagctttgggtagcgatatgtga

SEQ ID NO: 1219 - DNA, 792 bp, Aedes aegypti
agttcgcgatcgcgaagtctttgtgcggattaatcgtcgcgataatcttgggaatcttaagttttcaaagtattatacaagtgcgcttgtgtccgacaacttaataaaagttttgtaaccgattttgtagtatggtgaaataaaaatttaacggcccatcagcaagcggagccaactcccaggacaattgcaatttcctcatggcaagtggctcacagcgaaagagtgttcagccaaacagcgattgccgtcgaccagcaatagtcgtgatcctgaccacaatcctcggaatccggaaagaggatcattggtctttcttttgttccagaacctgctccagtattaccaccggatttgcctgtagaatgaagtgccgttccttcggagcctcaagccttcttcggatggcactggaaagcggagattgtcatcaaatggacccaattcatcctgctgtccatgggtggaaaaaatccaaaactcctgcctccacgaatacacgacatgcaatcgatgaagcagatcagccgcaaaatacaatgcaaccgagtggtaggtacttctaatccgggagcactcgatctagcattggaacggcgactacagttaaacggatcggcacgaaaaacttgaacgagctttacgattcatttcactcttggctggaagaaactaatcactacctgaagtgcctgcaggcttgattttaatctctgtccactgcgggttctcggactatcacatgaagtgctccagtcgttatgctgcattatttcaaagtttttgaagcaa

SEQ ID NO: 1220 - DNA, 1505 bp, Aedes aegypti
cgcttgacgggaaaaaaaaagtgtgtcatcggtccgtgtcgcgtgtgtattttgcaataaaccataaagcaaccccctccggagtgaaactaaggtgaggaaaggatactcgctctgccgtcaaaaagtgacccatccccgggattgggacgcgaatcatcatcactcgtttggaagtttttctccgcaaaagccgcccccggaaagcagtcagaagaagagatacctctcaagattgggctgagaagatagtgcacaagaaagagatagcctgtggctgtgtgtgaccgtatacgaaaaaaaagtgctgagtgttctggtgtgttacatgtttggccgaattttgctggcctttccggtgtgttcccttggtgtccctgagattgttggacccacgcctcggttcacgggttccggatagttccggtagttcggctcggatagttgcgctacacatagaacaagaacgcaaacgacgaccgaattgatgaggagaagctgaacgagattccaaaatgattctgctcgagatcaataaccggattgtggaggaaaccctgactgtcaagtacaagaatgctatcgctggcaacaaagcggaatccatcgatgtcactgtagcggactttgacggtgtgttatttcacatttccaacatcaacggcgacagaaccaaagtgagaacgagcatatcgctgaagttctacaaacagctacaagagcacggagcggacgaactgctgaagcgagagtatggagacctgctcatcacaccagaggacggctacaacgtttcggttctggtcgacctggagcagatccccgacaactgggaggaaattgtgcgaaagatcggtctactgaaacgaaactgcttcgcgtcggtgtttgaaaagtacttcgacttccagtcgcagggtgaaggagaaggcgaaggccagaagcgggcggtgatcaactaccgaaatgacgagacgatgtacgtggaagcaaagtctgaccgggtgacggttgtgttcagtacgatattccgcgacgaggacgacgtagtgttaggcaaggtattcatgcaagaactgcgcgaaggaaggcgggcatcacacacggcaccgcaggtgctcttttcccacagggaacctccactggagctggccaacaccggagcacgggtaggggaaaacatcggatacgttacgtttgtattatttccaaggcatacatcaaaagaaacacgtgataacacaattaatctaattcatatgttccgcgattacttgcattatcatattaagtgttcgaaagcgtacatccattcgcgaatgcgggcaaaaacgtcggaattcctgaaggtgctaaaccgtgctcgtcccgagccgaaaaatacagaaaagaagaccattaccgggcgaacattcatcagaaaggaatgattttggaactcatcggacatctagttgttaaatgtgtaagtaaatatttactaaaataaagcttcgtcggaagtg

SEQ ID NO: 1221 - DNA, 2030 bp, Aedes aegypti
agtcacttcagggccatgaatcaattcacgtcgaatgcagtgtgaatcgattatttcggttccgggttccaatttcaatgatgagacaaaatccaaacaatctggtaatcatgttgattatcctgatgctgctggtgatctacgtagtgtatgtgatagtgcaagatagcaacccgaacgaactgctgattcaaagtctacaggcggaactacgagtgatcaatgaaacattttctcacaccaacgctccaaccgctatttccggttttacagacggaagcatctaccatcttgcagatatccaatccaatgaagatgatctcaaacatggcaaaaacattttcttcattctgacgacgcttacaaacgacggaacaatccagctaactccacggcaagcctgtgctatcgaatcagctgcccgtgccaatccggactggaaagtattcccgttgttcgtttttgccaaatggttcaacatctccagcgacccattcataccttcgctgctacagttctgcaacattcggatgcgacacgttaacctggacacattcgccgttggcagtcctgtggagaagcttttcgcagatggagctctaggcaaatctagcttcatcgttgagcatacggcggacgtattgcggctgctcacgttgtacaaatacggaggaacatatctggacacggatgtggtggttcgaaggactctcaacatgttgcagcccaactatcttggctcagaaggaagcggctacgtggccaatggagtgatcaatctggaagcctccggttacggacatgagtttgccgaatcttgtctcaacgatttagctctcaatttcgatggaacccagtgggctgcaaacgggccgttcatggtaactcgcaatttgcgaaagttctgcaacgtaacagacgtctcccaaatgaaccgacaacagtgcggaggtcaattgacggtctatccaccggacgtgttctaccggatacgttatccgcggcacgattggttcttctacccggaacgatcggaagttgtgatgaactccatcaaaaacgacgtactggtacacatgtggaacaaggccacgagtggcatccagctgaagattaccagtaccgctgcctacatacagttggcgcagcagttttgcccgaatgtggttatgaacgttaaggaaaatttctaatccgtgttggatgtttgttgcgatagcgcatctatttttgatactccgtacacagcgaaaaatgaattgtaatatcgcgtcgatttcgctgcatatgatttgcgtcgtggttgttgttcctaactgcactcgattcattgtacttaaattgattaaaaacttaaatcgttctatcacgtcgttgcaaacatgctattacagcaatttgaatgtaatcttacgcaataaccccgacgcgagtaatgtgcagcaaaacgacgttatattacagttttttttcctgtgtaatcaatacaaacaaaagcaatcaatcagtacagcagcaattcgtttttttttactgataggcagtaagttgcgataaagttatggataggggtcatgtaagcgagttagagcgccagagtagcttcaacacattgtgaacgtgcttatgtttagcacgcacaattatgggagatattcaaattccattcgctgtcgatgaaagcacaactattccatatttagatgttcaaagagatatatttttttaacgaaaaaccgttgtgttttactatattcaagtgacaaaaaattagaggcatctctgtagtgatttcggaagaaatttctgttcgaatctctgatgttattgtttaaatctttaggtccagatttaatagttgcgctagaacaggcattgcagaattcgttctcatttgatttagaagcacgatcaaagcaagcgaaggaaaacatcccatctgtagcggtccatgatcggcaatgtatcgcatgttgtggcaagtttgataaataaaagcagtgaacgagagtcccaaagagagagagctg

SEQ ID NO: 1222 - DNA, 2543 bp, Aedes aegypti
gcccttctctaatgtgtatccagaaatcgttatattctggccaatgcggcaaatgcagtggatacaccatcggaatgcaccacgaacatctcactcacactactccagagctccctttccacacgttccctaactttgtcaacacgacatccatctgtcaaacgattgctcctcgtcgttcccctaaaagtgtgtaaagttcagcaaagaaaggctaaaactgccaacactcaagtgaaaatcgaagctgtctgccggaaaaatggttgaatccaaatcggaaaaaccggaagccaacaaggaaaacgccgatccatccaaggagatggaaatcgacgaggaagaggaagccccgtcaaaggttttcacgatcgaaattctgagggtgatcaaggatttacagcagcagcatggtcttcgtcacggggacttccagcgttatcgtggctattgttcccggcgagtcaagcgtctgcggaagacgttgaatttgccgcaaggagataagcgacactacaagaaaagggacgtaacgttggctaacttggagaaggagaattcggatgagcggttcattcatattccgctgatgttggccgaaagggcctgggcttatgctatgcagttacgccaggagtctaatacggaaccgaggaaaaggtttcatctggtgggaaagctaaggaaggcgacggtttatgctttgcagctgcaggagttgtgtaattcggagtattgcgatgcccggactaagttggaagcggaggcgtattcggcttggattcacggatcgttgcattttgagctttcgctgtggaagagtgctgcggagaatctgaagaaggcgcaggtcatttatgagaatttggcgcaggctcttccggaggaagaacaggtcgtttacaaggcaaaggtggacgaattaactccgagtctgcgttactgcgcttacaatgttggggagaatgcatcgatgaatgatttgctggagatgcggggacagggaatgctggacaatttgagcacgctggtcgctcaaactagaactgagagcatggaggcgttccaaaccacggaatggcgtggcaggaaagtcactgttcgtccggaaaaggtacgtttgttcttgttgagcattcaggatttggagaagagcattgaaaaggcgaaggattatccggccaagattgaactgctggagaatgttttgttggactgtaaggatgcaatttcggctattaaggatgaaatcaaacaggatcccaagctgagatcgagcggcgaatcaggaacgatgactgctactcagtacttgttgacgtatttgtcgtacaccagattgaagttgaccctggagaggaacctgttcatggtggctcaaggaaagctaagcctggatgacccaaacgctccggaaaaggtccaaatcgaaggcaagaagacaaagccacaggatttgtcacgtttgtacgaaatcattttgcagaatgtgacggaaatgcagcagctaactggcatggaaacggatgccgcctttcaatccgaggttgaaacgatggccctcaccttcaaatcattccgctgttactatattgccatcactttggtagctttgaaacgatggcgcgaagctgtggccatgtacgaacggtccaccaagtacgcaacggaagcaatcgcctctaaagccattagcaaggatttcgatttacgcaacgacctaaaacaactgattcagaccatcgaagggtgcaaattctccgcacatgcaaacagcgttctagaagaagataccaccgaggaatcggttctttacggcaaggctaccaaaacgtctaaacccctcttcgagcgactctccacgtacaaagaggacgcttcgctcaactcccgcaatccgaatgtgttcaagctgacgccggagatgcaaccgattcccgccaagccgctgttcttcgatctggcgttgaactttgtcgagttcccgtcgctggaggacaaggtggaacagaagggcggcgccaaacaggctgcgggcatgtccggtttcgtcaagggactgttcggttggggcggaagcgctggaaagtaagatgctgtttttttattgtgtcggtggaatgaccagttattatttttgtttgcttttccgaaattgattgattattaatatatgtcaacgtctgtaatgaatatgaccaataaagtatagcgcatttgttgtaccggagcgtgggatttttagtcaaagaaagtaattcccaaagagtgtgatgcgcaagctaattctgcgaatcgagagggacgatccgatatcgaatatcctataaagtttatctaccaaaaatcatcataaaagctaagtttcaattaggatacatcgagatgaatccaccctccaacaattaatatctctgaatatttttagctattcaatatgtattgaactgaatgtccacgtaaaactttaggaaaagtttatattttttatattgcgttagaaatgatgtaccgtcaatgtaccagtactcgctcatgttcca

SEQ ID NO: 1223 - DNA, 1218 bp, Aedes aegypti
aaaactcaacagaaattggaaacaacagtctgcggaatggtttcgtgcttatattttgattactcactatcacaagcgtgttttactatatgttatttttttctaacagtttggctaactgttgcacgtattggtatttgtatgcaacgaattacgcaacatttgtggtacacgcttcaaaaaattatcacgaaggccacgtgagtatcgtattgttagcagaattattttaatttttcgcaaattaacgtttattacagaaacgtaaagcaataacatcttgactgaaaaaaaatattgctcttatttccaagtaaaaatgtgtgaaaatgtgggaccagttttttccgctaagttacacacagctgcttgcaatttttttaagagtgtgtctctttgcgtgcctgtcaaaccgataggagaaaaaaaaaatacaaaaacggttccgaaaatttgcagcaaaacttcaaggattcatcaacgcgatttaatagtgaaattagtgtcgattgtatctgctcataatacgctatcaatgttgtcatcaattaggacgcgatgcggcaaaaagccaatcaagaatgctgctgcaaaacatggcaagccgttgtcgttactgtcggggcaagggtcgatttactacgactctaggtcaaagtggccatcggaagaacagctccaaacattgcttccttctatcctcagcaaaccggacaacaatccagtgatccccgacagccgcttcggattcgtttcctgtggcagccgtatagcatcccggagaacaatccaaaattcaaaaggtgtccaaagaccatccctaaaatgaatgtaattctgtcgaacagctgcttctagtgtaaaactgataatcaaattggccactggaaagagagtggtttaaaataaatgttttatgaaacaatatttgattcaaacctcataaataataaataaatatatttatgctgttaatgcgcttctgaattgcatggatggaagtatcttttgaataaattatcaaaataaataaggcaaataaatcaaaagggacccagggaggttttttttgcatattctccaatcattacttaaccgttcgccagacagtaggggtttgaaaaaatggattatatatcaacaatttcggatactattcattgaaaattttgttcgggaaaatgacgatttttttatagttacataacttaaccgcct

SEQ ID NO: 1224 - DNA, 3040 bp, Aedes aegypti
atgactccgtcggctatcgtcacagcaacaattttgtcgcaatcatcagattggcgacaaaggaaatgtatatttggagctctaactctggagattggaaactacgtattggtttctaactttgacaaagctgatcccggaacgatcaatggatgtgatattgcgcgaattgagcatatgtatgaaatattggacgataagaaatccggtgatatattcaaagccaccgttcagtggtattccaaaccggcgggtttgcctcgtagtattgaaaaggatgaaaactatgcgttcgataaggattacgaagtaattgaagattctcgctttgaacctaacataagtatagactcaattttcaatcattgtcgcgtagaaattgtcgagacggacgttgatatttcacaattggtggccaaaaaggcaaccaaattaccaatgtttgtagcacgatatagactagctaaaatctctggctctagaaaattccacctggaacctttgaaaaatgctgcaacagaattaacgcctcgaaaaaggaaatccatagctggtctgactggtcgttctgttggcaaaagcgcttcgaaagaagtacagaaaactccaaagttgaagattgaattcgtcaatgtagacgccatagaggacgattatcaagttctgcaaaacatttcgaacgaaggcacatgggtggtcaaagcgattgataacgtagatcgttcggtttataagcaaaacttggtgcaggtcacagaaagattgggcgatgtcgaaataagcgacgaggagagcttatcgcctaagaaaatggcgcgaatgaaccaagctagacgaaaatctggcaacttccgcagaaatttgaacgacagtctccggggtggatctcctacgtctgaagaagatgtgttgaactattcaattgttaaggatgattctaaaggcactgaaatgaaaataagattgaaattatcagaacgccacaaatcggaatgtgaaacacctaccagaaagtcgatcaggaagaggacgacgccagaaaaagtcgattttctggacaatgaaacgtctccaagaaagtctcggaagcctgacgatgtggaatcttcccaaacacctacaacgagaccacgacgaaagagtatactgaaaactccgagcaccaaaaccggagaagtcattggtaccccgaaacgacttcagctttcgaatattgtcgaagagttcacagagggccgacgaatgtcgaggaaaattacacaaactccgacaaaggcggaacgtatcgttgatgaacctaaaactccccggtccaggacaaataacaaaacaacatctcagactagtagcgcagcgaagagcaaacttattcgctctggtgccataaagcccactattcacaacagggcagcccccttggaagtggcgttagatagtcaactggcgatggctcgtgaacggttgcatgtttcggcggtgcccacaagtcttccctgtcgcgaaaaagagtacaacgaaatttacaacttcgtagaagggaaaatcatcgatgggtgtggaggctgcatgtacgtttccggtgtaccgggaacgggtaaaacggccacaacgacagccgtaattcgttcgctacaggcttcggccgaggaggaagacattccaaagttcgagtttgttgaaataaacggaatgcgacttacagaaccacgccaagcttacgttcacatctatcgacagctcacagggaaaacgctagcttgggaacaggcgtacaaccttttggagaaacgtttcactactaaagctccccgtcgtgtaacgactgtccttttagttgacgagctcgacatcttatgcaaccgtcgccaggatgttgtctataatctgctaaactggcccactttaccttccgcccagttggtggtcatcaccatcgcaaacaccatggaccttcccgaacgtttgctgatgggaaaaatttcctcccgcctagggctgacgcggctcactttccagccctacaacttccgacagttgcaggaaattgtgatggcacgattgatcggaacgtccgccttcgatgcggaagccgttcaacttgtggcgcgtaaagtggcagccgtatctggtgatgctcgccgggcgttggacatttgtcgacgggcaaccgaaatagcggacgataaatccaagcagactggccagttcgtaagcgtgtccatgatccacgtccagcaagccctcggggaaatgatagccagcgcaaaggtgcagacgatcaaaagctgctcaaagctggaacagttgtttctgcaggcagttacatctgaggttactcgcaccggcatagaagaatgttgcttcctgggagtgtattcgcagtttgaaacactagcagcaatcaacgacataagagtacctaatccaggacgagccattgccatctgtagccggctgggagcttcgcggctacttatttgtgagaattcacgcaacgatatttatcagaagattctcctcaacatcagcgctgacgatgtgcactttgcattgcaggcaagtaagctaatttgaattggattatgttaaacaaaaagtctgacacaatattaagtatgtaacaaaatgtttattcttattaaaccgacaaattatttaaaggaatactggttgatttctcgttttgttgtatctatccgaacacctttatcatccgacttatttaaacatacaattgattactaaaaattgaactataaccatcacagtgtagaaacagtcgtaaatgatttttggtgagaacacagtccaaacgaaaatgtggttccgcatcaccgcaactacaatgatgtagaacgttaacggcgccatatataacaaccccaaaagctttagtagatgttgctttacaattggacctcttcgttcgattggcgttgacatgattataggctttcgtttgacaccactagctaaatgataaacaagcattaggaagctgataatttgcccgttgaatgtgttcaaagtaagaaacaat

SEQ ID NO: 1225 - DNA, 2002 bp, Aedes aegypti
ctttcgcaccgcgagagcacaaagtttcaatcgcgggcagagttcagttggccgttaaatggagtgaaatttttccccagcggttcgcttgtcgtttccagagttttgtacaggaaattttgctgtttttgtgatttattttagttgtgatttgcttcaggtgaacgtttaattatggccacacacttccgcattgccaaaaccgacgagaatgacgcagcccgtgttcaggcgaagaaggtcttgaaggaaccgactctgggcaaaagagccgtgctcggagaactcgggaacaaagtgctgaagaatgttgtggagcatggcaagggaaaggacacaggaggagcaatattcaaatccaacgatgccaccttcaaaaacattaaagcccgagtggacacccactggaagaaatccgacggccaaataacggttttcccggtgtccaaaccggtaactcgatccgattctctaaaaggcttgaaccatgttgggctcggaaagcaaatcaaaagcacaaccgtttccaccgtcgctgttcctgcccagaaaaaagtggttcacgttacgaagggtgccgaagttaagaaagtcaaggtggtcaacctgaaacgggaggaaagtcgactgactcggcggtcgcttaccaaactgaagcagctgaaaaagcagaccacaagctcctcttccagcagctcgtcgctagcaacgaattccgacgaggaggaagactataaaatagagaaaccggactctcccgacacccattcccacaaattaattgaggaagttgagaacattgacatcaacgatgcttggaatcctatgttggtttcggaatacgtaaacgatatctacaactatttgaacagcttggaagaaacgtttgcaattcgggagaacttcctcgatagccataaacagattaatcataaaatgcgcactattctcattgattggatcaatgaagtgcaataccagtataagctcgagatcgatacttatcacatgaccgtttcgatcatcgatagatatctccagcttgtggtcgatactcctaaaaaagaactgcagttggtcggcgtgacggcaatgttcatcgcatccaagtacgaggaactgttcccaccagacatcgatgatttcgtgtacatcaccgacgatacctacaaaaagaaacagatcctcgatatggagaagcagatcgtgaaggtgttggactttcacctgggcaaaccgctgcccacgcactttttgcggcgctattccaaggctgccaaagccgctgacaagaaccatctgtgcgcaaagttcctaatcgagatggccagcatcgactacagcacggcgcactacaagccgtccgagattgctgctgctgcactgtacatatccctgactttgttcccactggctaataacaccgaacccaaggtgtggaccaaaactcttgaacactacacacattacactgtgcaacatctgatgccgatcgtgcagcggttggccaaggtggtcaaaaacgcccccaatatgaaagttcacgccgtttaccacaaatatcagtccagtaaattcgaaaggatctccgttcaaccggagttccaaggacctgtgatggacaagctgatagacggtgaactgaacctgtagtgtagttcaattttatgaatcgatgtatttagctatcatattactgaaaataggtgactcgatttgccactagacaaaaaatcttacaagcctaggctattccagtttatatcctctacaacatttgttttttttttacgcgtagtgtattgattaatcgtttaagaagattttaacaatcctaaaatattttctaattgtagtttttttcggcaatattgctaatgcgagaggataaaatggtcttaagctagatcaggaaaacaaattcccattagttgtgttttttgctactaaaccgagcataataaacttttgactgatcaattgtaacaatttgatgtacttt

SEQ ID NO: 1226 - DNA, 2759 bp, Aedes aegypti
tatgttctcttttaaggaagcgccaaaaatttttttgaaaaattccgataagaacctctcaaacagagggtgctcatcatgcacagagtggccatcttcgatgatagatagtgctgggtagcagtcattgaaaagggtacatcggatcttctggaactgagtgactcgcgatatcattttgataacaatgcccggtgtcagtcaccatagtttattcaaacaaaacaaaggtattcactaaagttagcgctgcatagatagattggtttttgaaatcatttataaaaatgaagtgaaactaccaaaatgattgctcgtatcaagcacatattggtgtatcttttcctagtttttatattcgctctcggtctgttttgctatggcttttttcctctatccttctcacctgccaccaaatcgagcattcatgaactcccgggatcgttggacagtgtgaggctcaacgcatcttcatataagccacgtatctctcgggctgtgctgatggtaatagatgcccttcgaacggatttcgtatcacaaaagagcaacgtgccatttttgaatcagttaatcgatgatggccgagcttgtcagtatcagctacaggttcacccaccaactgttacgatgccccggataaaggcgatgacatcgggagccattccaagcttcctggatgtaatactgaatctgggaagcccacaggtcacgctggacacttttctgtatcaaatggatcaattgcaacgacgtatcgtgttttacggcgataatacgtggactaacatgttccccgatgtattctcccgcaaaggtgaaaatgtggattcattgtatgttaacgacttttacgagggcgacaataatatcaccacgaagatgcgaactgaattcggaaagttcgattggaagctgatgattcttcactacctgggcctggaccacatcggccacgttgaagggccgtttagtgagaaggtaccgggaaagctactggaaatggacagtgtcatcgaagagatttatgaggctatgaaagtatgggtaagcatgattagtaaggacgaaaaatataattccaagtctgtactggtaataaccggcgatcacggcatgcgtgattcagggggccatggaggatcaacgtacccagaaacacatgtaccgctcatagtggttggtaacgattgttctaaaagtgaagaagattttctgcaaatcgatgtggcccccacgtttgccgtactgatgggagttcccataccatactcatccattggatcgcttatcattcccattctaaatcacgtaccgccagcagacaggctctatgcaagctattacaatactaaaaggttaattgagaaatcgaaagccttctatggagatctgctcaacgaccaagaattttttcttcaattcagagaagcaaaattattgcattcaatgtatctggagtaccaggatgatttaacaatactacaaaaagcaataggaaaatacgactctgccagccggaacttgtcgagacttttgattcagcactatattcgttacgatattccaagtatagtgattggcaccatgttgagcgtgctgactaccctcttggctacattgctatgtatgattccatatggaagagaactaatagaatttcaccctagattgaacaggtggatgcttttgatggctatcgcaattttgggaaaaaactatctgaacacattcgttgggctagaatctaatattttgcgaaacacattcactagtcacgttctatttgtggtcatattcacaattatagtgatccattggagtcttttagatgtttttttccaactagtgtgtaaagataaagttgcagagctctggagttcacccggacttctactcctattcggctgcattttccacacgttatcactgtccagcagttccttcatcgaagaagaacaccaaacatggtattactttaataattcgtggttccttttaatcacactgatcgaaatcaggctaatgaattgcacaatcatacattttgaaaatgaaggaagcaacgaggtgcttttattgcactatacacgaaaacgaggtgaactttgcgttaaggccggtctgttcttcataggacacatcatacttcggcggtggaaccaaacgggcgataagtggcagcacatacccgacattggagattggttcggaaaggtggagaacaagccatggttgagtttgatattgtttttgggtaagtttgattttgttctttggatattttttgtttactataggttcctatacggtgttgtgagaaagttatagagaaagtgtagcatttatggccatagtggtttcctattcggccatatgtgaaatgtcgataactttcacatatttgatctttttgaacatcgaaatatatatcttactgctaaaatgattatatcgattatatagcatttccccagagtgtaccattccctagaaaaccaatccccagaatgaaccgttccacaaaaagctatatacctacttcaaagttgaaaaaaaaattgttcaaaatatttatttcaaaatagatttttcaaaaattgtttgcaagtaccataagtgcaccagcatccgctcatgcgcctatttccgctcactaatataaaaattgattgttcgtgtcaaaaatcaacatttttcgcacggatgtattctaacaatattaacaacattcaaatgaagtcgtctgacattatttt

SEQ ID NO: 1227 - DNA, 894 bp, Aedes aegypti
cccggatacctaacccctttttctgacgacggctaactgcggcggctcttttccattgtgttttgacgtttctccaaagaagaagattagatcaaaacaaaagattgcgataactttcgtctcgcaacgcagttcaagttcaggaagcgcctcttcgtaacactttctgttcctgcgtttataaatcccagtgataatcaaaccacagttgcacaatgttgtccttcttccgtaggaaaacctccgaagatctcagtgcatcgacgcccagtagttccagtgcttcaacgcccaaaaaagaagtctccccatcgccaaccttatcacagctcggctaccgaagtgcagatgatctgagagaaacgatctacgatttcctgcgcaccatccgggacccggagaagccaaatacgctggaagacttgaaggtggtctacgaggagggcatcttcgtccaggaaccaaccgagggcaacgtctatgtagtgcggatcgagttcaacccgacggttccgcactgctcactggccacgctgattggtctctgcatccggatcaaggtccaacggaacatcaaccacaacttaaaactggacatctacatcaagaagggcgcccactcgacggaggatgaaattaacaagcagatcaacgataaagaacggatagcggccgccatggagaatccaaacctgcgacagctggtggaaagctgcatcaaagaagaagactgaatcggaacggagtgtaggggaaggtggttccaaacgcaaatcgaatttggatggcagtttatttcttttctttattcctcggaaatggtgcatggtcaagttaaaagttttttttttatgagatacagatactttattgaataaaatttagatgaaaact

SEQ ID NO: 1228 - DNA, 2931 bp, Aedes aegypti
cacttcaagttcatcaagccaaggacgagcatcgccgcgttggaagaaaaataaggaaagtttcagaaaagtgttctgtggaatatcctcaaaagtgaaaatctaaaacacaaacgggtcgctaaaagcgtgcgtgaaaacagtgattaaaacctgtgtgaaaattgcgaatttcttcgaaagagtattgagtgaaaatggtgaccggaggaatcgacgagagcaaaacggagggcgaattcgaccagcagcagctggacgaaagttgctcggatgaaagcgacaccggaccggccggggccctctcgtccaagttcgaccggacggatgtgtccatcaatacaaatccgctgccctacgggaagtacaccttgattggcatcgacattgatacgacgggtcgtagactgatcgatgaaattgtccagatctccgcctacacgccggaacatcagtactcgcagtacatcatgccgttgatgaacctgaatccggccgcccgtcaacggcaccaggttcgcgtcattaccgttggattcttccggatgctgaaaagcatgcagacttaccgggtggtgaaaaccaagaccgaaatctccgccctgaacgaatttatcaactggctggaagagcggtaccgggaggacgaaggttccgaaggcattgtcctgatctaccatgagcagcgcaagtttgtcccatacatgctgattgaggccgtgaaaaagtacaacctcctggatcgctttaaatccattgtaaagtcctttgctaacggtttcaagctggccgaggagaagtgcagcaaaaccatcaagtacttctcgatccgacagctggccaagctggtgctggacgaaagcgaggcgaaggatggatttgagggaaatgccgcgtaccgggcgcgtttggcgtaccagctggcgcgtcgattgtccaaagaagacgacgaaaaaccaccaacaaacgactctactcaggtggcggccgagtgcgaagagacgcaatcggacgacgaagccgaaaccgaggagggcgctgttggtggatcgaacactgccgaagatgaggccaaatcgcaagagagcggcgcagcaacagttaacgcggagaacaatggtggtccccagggtcagaacgactccgatgacgatcggcatcaaaccgatgtggacgctgtcaccggccaagtgacgacaattccggaaccgcaaccacgatcccgtccaacgaccgaggccgagcgcgagaagatgtgctcggtgctgtgcgacctggcctcaccgatcaccagcgaaatttccgagcttgacgagcaggagaagattctgattcgccagaattctctccggccggtgtttttgcagtacttcaagacgactatttatcatagagttaaggctgtaacgtacagacgagtgctggccgaatacggacacgatttcgcctcgctccagcaggtttggaacgacagcaagcgagagggtctggaggcggtggttaacaagatcaccgaattgaaggaggaagagcgcaccgagctggtcgagttgctcgattgccactacgatccggagaagcaacagctgaagccggtggtgaagcgggtgcgcggtcgctcttcgagagggcgcctcttctttggcaacaagagcaacaatgtttccggtaatggcaacggcaatggcggaaactacaacgccgccaacaatggcaatgttggcaacggaaatgccaaagatcagcgcaaagcagtgcatggtggtcgcaacaattaccacaataacagtaatgccgatatgaacaacaaccagggaggtggaaagaacaattacaataacaacagtggcaacaatcaacctccatcgccaaatggcggtgccaacggtaagaagttccgtccccgtcaaatgaggcgccgtcggaaccaggcaggtggaagacagaacgcgatgaatcaacaacagcaaccgcagatgatccacgccaacgcttgagcggcagaattcacacggcgcgctctctctttatgttcctctccgctggtcgaagtggatttgaatggtatttgaagaacagatttgaattggattccttacgtttagttatgtaagtgctgcagataattattgcgtcttaagtcgatactaggagggcgttccgtattcagatggccagccagaggcccgatttgcgggaagcttcgtttaagaaggtttcccatccttatagagtttaggtagtttgaacgagagtaagctgcgtgttacggaggggtgttattagttaataactgatcggtgtttttaaaaaaagtatcttatgcttcttcatagatttttaaacattacattattgtaatccaaccattatttttatatttacaatttgtttgagctgttttagagtcaaaatgcactcaaaattgcttttggattttttttggaaaacggaaaagcgatcgccatgattttcggcgactcgcggggaagaaagcgcgcgcttccatgtggtgttgtccggaaacacgtcgcggatcgtcttttttgcatcacccataatggctaaaagtttaacgcaagcaaaactgaatataccggaagattgtaacctcgattgaaatgtaacggaaaacaggcgcgacgcgagatgatgtgcggaagcaatgaaattcgatagttttcgagtggtaggagatttgagataaagattacgctaaaatgatttcttgttagaatttcgcactcactggtcaggatcgcgctattttcgagcaaaacaccaatatttactatgttaggaatggataaaagatcttgaataatgtttgaaatgatttgaatttgtcggtttaagaaatgcaagtctctcgaccgtctgcgatgtgtcggggctcttgtttaatgcaaaataaaaaaagcgaaagcaagc

SEQ ID NO: 1229 - DNA, 1147 bp, Aedes aegypti
tgtacccgaagatagtgcttatcgatcgtcgcgacaaaccagtttctgtgagaattttctggtgacaataatcgaaattgaaatggaacgatcgctgttgagtctatcgctggcgattgttttggtgcttccggtggcttggaattacccactggggaagaatgtgtttgcctcgcagaacggtgaagaatcagagttcagggacaaggctttcgacgaggagattcgcaaagtgacatgggttggagacaaacctgtccatgcacttgaatcgtatgacaaccctcccgatattgacaacgccgctcgtgagaaagacaacttcccatcgaacattttcagcaaatttgacaatacgcagaagaaagtgaaggattggttcgataccccaccgctaatcgacaccatcaaagaatcggacaagtacggcaacgaaggcgatcagttttacttcattacccgaccgctggtcaaactcaccgaaacggtatcaaatacaatcaacaaggccatcgcggcccctacgcaaatctatcgatcggcgaaaaagatcgtgtccgataaactgaacgatgtcggcgctggattagtcggtttgagaagatagttctctaagttgtgatatgtgtgtaaataaatcttagccattcatgttagtttgtaagaatctctagactgatataccagtaaaactctacgcccagcgacgacgtttatcgacagttaagagaaaaaaagctttattcgagtcaagttgagtcggtgacccagtttgtcgacgcaaaggccaacaaccgcagactgcgccgtcatctcctttcgccatcgtatttcaaggttacaacagctacggccaaacagcatgttgaagatttcgcgctcggacaaaagcgaagacgacgaaccccaccatcatcagagcacgtgttcaccgaagctctttggttccgatgaactttaggccgccaacactttggttgaaagtgaaaatgaattcaccgcgctcagctgatcagcgtcgcggtgcctaacgtgttgaatagcttctaagataaagataatcgtcaatgtgaacaaaaaagacgcgattcactcgcgagcagcaaaggcttaaatagctgaccaaaataaatacgcaccgaaaacg

SEQ ID NO: 1230 - DNA, 1959 bp, Aedes aegypti
tcacaatccgaccgcaatcccatcccatcatcagtcttgaacgagacattcttcgatagagacgtgccttctcctcacttcctgaattgaattgcgcactcacgtgtgattagaagagtgttacaactggtctgtaggtcgttgcaaacgacgctggtggacacttgttgtttactaacgtattgtagctagtgatacaaattcacgggagaagttcgcggggctgttgaacgtgcattgtttgctagatactggcagaaagctggtcgcgtgtgtccctgtattctattgtttgccaatccgtcgccatcggatacaattttgccggttagctcttcggttgctcgtcaaagtgtgcggtgacagttttgaaacgttcgcattggttgttagaaggctctattagtgctccatcaaggacttctagctggcatgctttgatgatagtgcaacgatgcgatttgttactggttcggtgcaggagctggtggttagatgtccactacatcacgcagctagacaaatggatacacgcaagccggaaatgcggtttatcttgcagtgctgatggtgctcctcagtccatcagtatactggacctggattgcgtggtacaagtgggtcagtcgacgacggatcgaaatgtgaactgatgtagcaagcagtgttgtaattttgatgaagaaacaagtgtccttaattatttctttcgatgtaatcgaacgcgagttgaacgacgtaagtactgttgtccaagtacgtagtacataaagttatcaaacattttgacaagccatttagcggaggccaagttggaaaagtgacgtcatttattcatcattatcacccagtcaacagcagcagattggacgacgatagacgagagctattttggtgttactattgctaggtatatacatcgcatcgcttatcgttgctgggaatgcattatacatgagagcagtgaacgaaattgagccacacaatgatcatattcctatacctgatactagtcctcgcgtgggccctgctaatcatcatactgaaatgcaaaaaggctcgcgcgaaacgcctggccgaactacaggaagccgcccaaccggtgcacgtggttcagatcgggtccaacctgtacgacatcatgtcgattcagcaccatcatcatcaccgggccccgtacggaaccgtctatgactgtctgggaacgggcgagggttgcggtcaaacgcatcgatccggcgcgaacaccatcacccattccaatgccgcattcatcggcgacgacgggagtgtctacccgggcagtaatatccctccactggaaccaccgccatcgtacgacgaggtgatacggctaccggcgcactatccaaaggtggaaacgtttgtcccggagatggtagtgccaccacccccgccaccacaggccactgcaccaacgactcactccgagggtagcagcggagaaagtggaagcctcacaggggcgccgacatccgttcccggtatggttggccaaaatgggaccggccgggtcaaaactatctcaacagtgatgaatacctaactagtcctatctatgactgcaagcgaagctttttgtggtagatgatattttgttttattgttggagaagaagcattttcactagtaatttgtttttatgataaaagtcttagaattaaaaagttgactaatgtgcaataaattcattgattgattatattatttgaacgtgcatcaagttcgttgtgaatttcttaagtttaatcatatgatgagcagaaacgtacaattcatggtgagtagcagtatgaaaaatggcattcaaggttgtacataggaagttgcatgctagttagtgagcgacgtgtgatatagaggtgtgcgccgaagcgtattttgccggtgacggcatgtgctgtgagtttattcgcaaatttcataacgccaaaaatg

SEQ ID NO: 1231 - DNA, 2072 bp, Aedes aegypti
gttggcctcttatcacattctgcccccacagaaatggatgtttcagtagtattgctgataattttgagcataagtgactattaatcaattttgccacttttcaaatcagtagggcaaagaaatcacacgtattcgtggttgaacgatttttgctgcagtttaggacaaaaatgtcccgacagatgattattatttattgtgtaatagtgatcagcgattacgcatttttgcaaaccaccaacttcattgaagaatcctcgacagtgaaatgtagtgcacttgatcgaagaatagagcatcttgaggctacattcatagaacaaaaactggaaatcaaatcgcttatggaacgagtgatgcataatcaagatcatcttgtgaatcaattgaatcaaatcttggtgcatctcaaagagacaacaacaactaacttaccgagtcaaaatcaccctgaatatcgaccccaaggtgctttatcgaacagtgaacaatcaaacacaatttcgtcatgtgcggaagaacccacaaaggtatctggaaaatactcgttaagtctctttgccaacgaacaacctttcgaaggatattgcgagcaagaggcgttcaaaggtggatggctagttatccaacggcgattcgatggttcgattgacttcaatcgcaattggaccgagtatagggatggctttggttcgattgaaggggaattttggatcggattggaaattgtacatcggctaacgaaacatcgaaattgtatgttattgattgaacttcaagatctcaatggcaagtacgtttatgctcagtatgatggacttgagattggcagtgaggaggaaaaatattcgttgaataagctcgggaagtacagtggaacggccggcgattcactgtcaaggcatcacaaaggtatgatgttttcaacgaaagataatgataacgacaaagatcctcggaagaattgtgcggtgtatgtcacaggtgcctggtggtttcgcagctgtctcgacagcaacctgaatggactatacttggatgaaaacaaaagaaaaactattacctggtacaactacaagaaaaagctaggaggtttcaagtctacaaggatgatgatccgagaaaaataaatattattatatgattaaaataaatggttgacaatcgtatgaatagtgtcaattgatgttgatgtggtgtgatgtggtgaaaaatctacggatgatccatttcaaatatcagcaattccaattgtagcgtttagttagaaagacttataagcagtttctttaccaaaatgtggtttggggccaaaaaaagtgaaaataaagtgtgacatttagtttgattaccgtgaaagtggcatttcgtcactaaatcacatagtgattctttatgattgtaattgaaacaagttgctctgttgttttggggaaagttcatgaatgtaatttaatccatctaaacacaaataagataatggtatagctagtttagtgattgaatgattttcaagcttacgttagctacggttcaacttagcagctgttttagaacaaaacttgttctaatgatctataatacacgagtcgaacgattatgctttgacaattaccatcaacttatccaattcacaaaccgcctaaactactgttaccatttgattgtaaatctctgctttgccgtggtttatatcagaacaaaacgaacgtgagattgattttccgtcatgtgggcaggagcagtttctagtcacataaaccaatcactcgactcggaacccacgcatagtcatgaccagggtacactcccaccgatccgatcgttcgacagctccctgcctgccaagctatgactgcgatatgtggaagcgcaaggtgcggagcgaacctgtcggcaagttcactttgttgtgtttatttgcgaaaagttaaacggcgaataattgaaatcaatttagcaggaacgcacaatttcagtgtaaacaacgcgaacgaaacctgctgaacgagaagcgatgcccgagtggaaacgcatacccaactatcgtctttgttcaaattaaaagtttt

SEQ ID NO: 1232 - DNA, 1568 bp, Aedes aegypti
atgggtaaaaaagataaaaataagaaaaaagggaagggagccgaaaaaaccgcaaagaaaacggataaaaagcttgccgccagacagaaaaaactcatcacaaaattgggagaggacgacattgagtcgattgtggccaagtacgagacgaaggaaaccaaatcttcggatttaacggaatctttatgtgccccaccaactgcaagagtaaattttgccatctgctcacatccggataaggaggagatcttcatcaatgggggagaattcttcaatggtcagaaaacattcgtgtatggagattactactgctacaatgtcgccaaaaacgaatggaaagttcttaaatcatcaatttgtccagctcctcggagtggtcatcaaatggtgtcggtgagcactgatggtgggcaaatttggctcttcggcggagaatttgcatcaccatcgcagcttcagttttaccattacaaggatctatgggtttaccgtattgccacgaagcagtgggaaaaaatcaatgccgcaaatggtcccagtgctcgaagcggtcaccgaatggtggtaaccaaaaagaagttatttgtctttggaggattccatgataacaacacctcgtaccgatacttcaatgatatacacttcttctctttggaaaactatacatggacaaaagtggaaccatctggaacgccaccagctcctcgttccggttgctgcatggttgccaatcccgaggggaagatccttgtttggggtggctactctaaatccaacgttaaaaaagaaatagatcgcggagtaacgcacgcagatatgtattcactgacatcggacaaaaatgaaatgaaatcgttcaagtggactagcgtgaagcctgggggcaaacgtccacctccaaggagtggaatgagtgctgtaatcgctgccaatggaaaggcgtacacgtttggcggggtaatggacactgaggaagacgaagaagatgtccatggtatgttcagcaatgaactgcattcacttgatccagcgtctcacagctggagaaaattggagcttgctactaagaagaagaatacgaaactgcaagacgcagaaatggtcgaaagcaaaccagtcgaagagaaaaaggttgtgtatgatgatggcattttcactatgtccgtgggcggttcgactcagagcagctccacttccaaaatggaaacggatactgttgatcttggtgggccatcaccacgcatgaattccggaatcgtgatctgcaaaggaatactgtacatctacggtggactctacgaaagtggcagtcgacaatatacattgagtgacttttattctatagatttacataaaatggatcaatggaagaccataattgccaacagtcttaccggcaatgaatggttaggatcggatagcgaggaaggatcgtccgatgaagatgatgatggtgattctgatgatgacgacgacgacaacgatgacgaatcagatgaagatgatagctccgatatggataccgaataaaactaatctgattcacaaataaaattattacacaaaat

SEQ ID NO: 1233 - DNA, 2047 bp, Aedes aegypti
gaaatagatattattattttacctcgagtgggaatgataaactaatttaaagtattacaattcatcaaaatgttgaagtttccatcgtttcacacacgttgcttccaaatactgtcggagtcccggttaatccgagccggatcatgcggcttgcgtcatcatcggatggtgagattcgtccatacccaatctgctggcctttgcaaccgcgaagatgatctcccgataggagtcgaaactattacggacccgataaaggtacaaagggcaactactctgtggaagaaggaggagcttttagatcgcatgaatgacctacttcattgcaacccggaggacttggagcgggtttacaaggtgaacaagaaaacgctgaaaactgttcctcccaaactaattacggataacatccggcttctgttggaacgaggggtcagcgagaaatctatacttaatcatccgaagatactttcgatcaactatgatgaattgggaaataagctggattgcttgatgaatttcaaggatttgcaagacataaatcacgtggtcccgttcttgagcattcccatggatgtactcgaaagggttattgaaatttctcaaaatgaaaccatcgagcatgggaatagaatttactatttaaatgcaaaaacgggagtggattttgaaacgataagccgctactttgccaccagtattcgggtctataggattgcgttggacaagttcaaatcaaacctcgactactgcctgcagcatcttgaaccttcggatatagtgaaacatttatcagttctagcatatgccagctcttcaattgtcgaaagactgcaaatgttgaagaattcaccgcttcaaaaaattaaaccctggatggtgagggtacccaatttggcactggaaaaatcattcgaaaaggtgatcgagaaaggtgctaacccgtccttcaaagatccgataactgaaatgtggtttgagaaccatgttcttaaaagggtggaatgtttgctcgagtgtagcgaagaagaggcaaaaatctgctacgatgcttgcaagggggcggtttcattgttggataatgttgaacagctgctggaaaaacagataacaaaagaaactattttgcgaaaccccacagtgctgatggcgaagaaggaagaactggcaacgaaaatattgaaacttacagaactaacaggattgagagatatgaacgatatgattccactctgcacgctcaaaccttaccaagtgataaaaatcgtgaactcgatgaacagcgaaagccttccaaataacagcaatcgaatttatcatttcgcagataagaccaaaatccccccggccgatgtagccaaacagtttgcccgtagaacgtttatgttccgcattccgaaggaaagcttcatggagaatctggatcattttgttgaaaacatggacagcgaagatgtcctagccgatctgtgggcatttaagtattctccgacagttgtcgcggaaaggatagcccgagcgaaaaaggttcgtggcaagaagctaatgccttggatggtgcgatgtcccgacactgtcttagagaagtctctgcagctaaccaaggagaacggagagttgctgggtgaaaacgaaaccattgtcgaatatttcggcaaacgattgggtttcaatcgggacgttaccaatgccatttttctgaaaactccgtcagtgcggaatgttcgtgtaaccaaggtaaaaaaagttatcgattacctcttggaagaattggactacaccccgcacgatattgcactcaatccgagaatcttgatgcacagtcttcaaacgaccaaaaagcgtatggaacaattgaagcagattgggtgccgacctcgatcgttgatcattgtatgtcgaagtaaacggcagtacgatctgttcctcaaggaatgggaagaagctaaagaacgcaggaagaaagcactcgcctcaagtgggagctattgaaatcaagtatgtatgtatagttttagtatgctagtgaatgtaaaatgcgtttccg

SEQ ID NO: 1234 - DNA, 444 bp, Aedes aegypti
atgtattcaatttgtgctaaatccttttgcggattcatcccccagcaaacggccatctgtgtgcaattgatccggaaaagattgcctctacgacgacattcgtccaaagaagtgttcaagtgcagcaaggatgaaatatttttaattaaatgcaacatttccccccggctgccaccaattggaccaccaccgaacccggcagaaaacatttcctcaccagaccagaatatttccgtccacaaaatggtgcaccatcgtcaccgccaccattcatcgtcaccatctgcattatatttattcattttcaacgaacgactcggcccattcaccacctcccgggtgatgcattttcataccccattcaacgaacactgcaaaacttccctccccatttttttctcactcaaattgcatgcatctcatcaaactcgcacacgctcatag

SEQ ID NO: 1235 - DNA, 2132 bp, Aedes aegypti
caaaacaactaaaaacaaatgcatgcaacaacaaattttgttatgtgcgatgtttttggggttctattgctgcatgggcacatgcgttttgcagaaatgcatttttgacagcaaccgccgctgagccaaagtgcatccatcagcgtcagtgtcatcatcagatcccaaagtgaaaacaaattgacgctcgctcaccagcagaaaattcaattcccaagccgatttgtacgggaattccgccgcccctcgatggacatcgttcccgaatcgtgccggctgtgcctgtcggccagcgaaccgaccagccccatctacgagcgcctaacgctggcggaaatcaccgaacttctgctcgatacgttgggcattcagatttccaacgccgaggactacgccaacatttgcaacggatgcgaaatgaaggtcaagctgatgtacaccatctacaacgagttccggcaagcggataagcttttctgttcatttttggataccaaacgatccgaaatggcactgatggaagaggataaaacgtcgatcagtatcgtaactgttctgcctctggaaaccataagggaagataaagtagagaccgaatgcgaaatggtcacggacgttagggacggtaacgaagatgaaaataacgttcagagaaccacaagtctgaccatctccaaacaggagtacgaagacagtgacgatcaagactatgtagatgtgtctttcccggatccggattattccagcgacgaggacaagccttccacttcgaagcttctatcctgctacatatgcaaggacttcaacggaacgaagcgagctcttgtctcgcatcttcagaacgatcacagccccctgttgccatactattgcgatcgatgcctcgtgggatttgacgaggatttgatagcggttaatttacatttccaatcgcacgatttgccctacggatgcctcttctgcgaagatctattctctacggaagaggaactggaagctcacagcaaatcctgcatagggtatcaatgttcgcactgtctagactacttccaggtcgttcagtatctcaaagagcacgactgcaaatccagcaagaaccaacgggttcgtgtccttaccaaaatggtcggaccgcttcgtaatatgaaccggtacattccgcacgtctgtggcatgtgcaacgaggacatgggcaagaacgaccgcttggcgtaccatttcgagcgggaacacaacaactgccagctgcaattgttcagctgtgatatctgcccgaaaaagttcactatgctgcttgcggccagacttcaccggatctcgcacaagagttaccaggtcaagcagcggaagccagtcgtccaggagcgcaacgagtgctcgatctgtttgcgcgagtttcgtttcaacaaggaactactggcccacatcgaggccgaacacgccgagtccggagtggagttccaccagtgtagcaagtgcgagcggaagttcacctcggaggcgaaactgcagaagcacgactacaacacccaccagggcaaacagccgcagttcttctgctcctactgcggcagggtgttcaacaagaagctgggcttgagggatcacgagaatttgcaccgcggcatcacggagtaccattgcaaggattgcaacaagaacttcacctacaaaagcacttacgatcgccatatgcaagtggttcatagtgatgccaaggagttcacttgcgaatactgccacaaaagcttcaagcgaaaacccaccctcaaggtgcacctccggctgcacaccggtgagaaaccgtaccagtgcgagtactgtagccggcgattcgtcgatcccagctcgttccacaagcacaaaaccaaggagcacggttggaagagcagcttccacgcttaagacttgagataacatagtataagaacacagcgctggaggtaagtctcgcggaactcgcgctataccacgaaagggaatgaacgtcgaaaatctattcaaatagcttaggttcaatactcagttttagcgagttttggacttgtgtcgtcgatatgcatgccctattgttgttccatcaaaatttatacatttgctagaatggcttgggggccttccttagccgagtg

SEQ ID NO: 1236 - DNA, 1119 bp, Aedes aegypti
ccgaataaatctgataacagctgtaactttctttgtgaaggttaattagggtctaagtttgagttcaaaattcgcaaaggcccctaaagtgcacggttttacagaccaggagttacagcttgtcacctctactcagataggtggttgccctatgctacacgtgcgtctagctgcgacttggggttccaaggagctactcaaaacggacacgtagcgaacgccggtatgggcgtagttgaatcgatcacaaattcgacgaaaccaggcgtcacaaaaaaatcttcgcctgaagccgaggatgactccaatggggaagcttcgacgtgcggccgtattctcatctttctctcctgggtcctggtggtgctgacgatgcccttcagtctgctggtatgcttcaaggtcgtacaagagtatgagcgtgccgtaattttccgtctgggtcgtttggttcaaggtggtgcgaaaggcccaggaattttcttcatcttgccatgcatcgatgcctacgcacgtgttgacttgcgtacccgcacttatgacgtcccaccgcaagaggtactgacgaaggacagcgtgacggtgtcggtggatgccgtcgtgtactatcgtgtctcgaatgccaccgtttcgattgccaacgtggagaatgcccaccactcgactcggcttctggcccaaacaacgctgcgcaacacgatgggtacccgacatctgcacgaaatcctcagcgaacggatgacaatctccggaagtatgcaactctcgctggacgaagccaccgaagcctggggcatcaaggtggaacgagttgaaatcaaggacgtccgtctacccgtccaactgcaacgtgccatggccgccgaagctgaagccgcgcgtgaagcccgcgccaaggtgattgccgccgagggtgaacagaaggcatcccgggccctgcgcgaagcctccgaagtgattggcgactcaccggccgccctgcagctgcgctacctccagacgctgaacaccatttcggcggagaagaactccaccattgtgttcccgttgccaatcgacattctgacctatttcatgaagtccaaggagagctacgaagccagtcattcgcactcgtaa

SEQ ID NO: 1237 - DNA, 393 bp, Aedes aegypti
atggtagtgcatggagtattcgtccctggagtcctggttcaagctaaaagtttagctctacacaatatgatggacagaggcgacacaagctgcgttacagcagttctcacatcgattgaccacgatccaatgatcatcggcgtatggatggcgaaaatgttcgctgcgatattccatgagatacgctatagcctgaacgaacatcctgttgaagcagatccgaacaatccgccaggaagatcgaaaattcgacatgaatcggaatcgagttttaatgctttgcttgagaaagtcaaatggcttgttttagaagattattgttttgaaagtgtactatattctataccaaaagtgcgaatttttgtgtatattagatttgacagtgtctattga

SEQ ID NO: 1238 - DNA, 1378 bp, Aedes aegypti
aaaccgcgtgttgtcgttcgaatctgctgctaggaactcgtgcgctgatatattttcctcagtttcgtggatttttgaggtttaaacaattattttgagtagcaaaacccaatcacactaacaatgaagcctaaagttgagaataaaaaagccaaaaacaagtccgccaagctgaaaaacaaagcaactaagaagcgcaagctagaggatctcgatgcatcgtcggacgacgaaggaatccagctgaaagatacgagacagtcggacgaaccggtacccaaaaagacaaaatgggtaaacaagcagcgcgtgctcgttctatgtgccagaggaatcaaccaccgtgatcggcatctgatgaaggatttgaagaccctcatgccccaccatcggtcggaaccgaaaatggaacgctggaagacgctctcggtggttaacgagatgagcgaaatgaagcactgcaacaaggtggtgctattcgagggtcgtcgcaaacgcgatctgtatatgtggttggccaacgtggagaagggcccatcggtaaagttcctgatcgagaacattaacaccatgggcgagatgaaactgaccgggaactgcctgcgcggatcgcgccctatcctgtcctttgatcaggaattttccaaacaaccgcatttagccgttatcaaggaattgctgacgcaagttttcggtgtcccgaaccaccacccgaagagtcaaccattcgtcgatcgcgtgataagcttcacctatttggataatcgcatttggtacagacatttccagattctgtcagaagacggtggtctggcagaggtgggacctcggttcgttatgaatccgatcaagatcttcgagggttccttcagcggtgacgcaatatgggaaaatgccgactatcaaagtccggccaaacaccgacagctgctaagaaaggccgccaaggataagtatctgaacaagcagaagcagaagattgaccacgaggttaacgctccgaaggtaacgcacgatttcgacaaatatgccgacgtgttccaaggagacgaggaagaaaaggctaaggaactgctggagaaagaagagcaagaagaagccgaagaggcagagcgaaaggccatcgaagaacagcacaagcgaatgaagaagaaggacgaaatgaagaaactgaagcaattggcccaggcgaaaaaaactggcaaagctcttgccaagggaaagaaaaagcagaagacgactctcaaggccaagaagaagggaaagaacaaggtcgaggcggacgatagtgactgaaggtgaacatgatgtggatttttttcttttttgatgtacaataatgatatgagaaatacagattgcttattctcgttataat

SEQ ID NO: 1239 - DNA, 5827 bp, Aedes aegypti
agcaaaccagccttaaataatcaatcgcgagcacctaagaaaatctggcaacgctgcccatttcgccgcatgcatcccggcccggcggtctgcagaccgaaaaagaacgccaccgaaatttgtgtgcacacaacacaaaacccaaaacagagacatccattttttcatcgattgatctgcacgcattttctttttgcagaaatttaaaactaacgtagattggtgatagtactttcggttttcgtttcaaattagtttgaagacccaattccagccatggaagacgacaccatccgcattacgcatttcatcaatccgcacatgttttggtacaaaccggtgtcggcctatgtccacaacctggaggaaaagcggttccagttggccattgacgagtattgcgaggaaaacttccggcgaatcgatgaggaccgtgtgtgcgaatcgtttccgggagagaccgtagccgttctggactttgaccggaacaagtggtgccggtgtgtagtggaccgggtcctagaggacagcaacggcgaaaagcggtacaatctgtgggccatcgatgatggagtgccgattcaatcgtcttcccgctatgtcaatccgttgccggataaatttgccagaatctccatcagtaaagttcgtcgaggcgccatcaagaacattcttccttcggaacaggtgtacgacttccaagcggacagacttatgccaaaaatcagctcacgttgggatccaagtgcagcggaagtattgcaatccatcattcgcaattcggcgcagatccacttccgcaacgtgaccaagcatacggtgcacaacatgatgatcaattttggcgagttgaggctggaaaccaacaagaacaacgtttacaatgcggcccaagtgttgaaggaaatgcgaaaggcattcgaagtagaaccgagtgactttatcgcaagacttgccgagatccaaactatgaatgtcagtcgatgtcctaccaataacgcaaacggaaatatcgttaaagacaatcaagacaagccgattggcgtgagcccgatgaagccgttgagccgattggagcataatgggtacacgaaggtaccaaatggagtacctgacaatacacgtgatcttgatttcaatgctattgaagacgactacgatttcaatgaaagcgctagtatgataaaaccaaacaatgttcaaatgacttctcgtaagccgctggtggatcctatttcagaaggctcaaactctggcgaagagcaatatccgcttacgtcgcaattgaacaaatccggaatgagacttgattacgagaaggaactttggaaacaaaaagttcgtccagttagccagcaatccatcgcttcaattgaaaatcgtgaattgggcaacaaaactaaaactaccatcatctccaacggtggctattcgggtggaaattcgaatagctattcgaacggtgcatactcgaaacaagaagacgtattggaaaagccaaaatcaacagtctcgttcttgcataagcttgaaatgcgcaaaaagcaacgagcagcagcagccgcccagaaacaaccaatttctgaagaagtggaagatagatcgcgctatgcagaaatcaacatcatcccagccggatatcagattggcaccttgaaattcgaaaacgggaaagtcatcgccggagagaaggcggatccaccggaaagtaagccaaattcgtggggttacaacaaaccgcggaacatgggacaagagcgtagcaaacatcaacaacagcaacagcagcaaagtgacgagtatgatactgaccatggaaaagtctacgtgaccaaaaacggaagtcgatttgatcgagtgattgaagacgaagcatgcatccggtcaaagctgagccaccaacggttgctagtgcacggtaagcgagttccgaaaccggtggaaaacctggagagtgctaacttctgcccagaggtgcaccgcgaactgagtatgctgaatttccgatcgatccaccgcatccaaacgtactcgtggccgcatatacttcgagggaactcgttcttctgcgtcaatgcggcgactactggcaaaacgtttgcatatttgccagctatttgttcgtccgttatgaaaatgtacgacgaagaactcgcagctaaaggtgctggtccgttggcgattatcgtttgcaaatcctccagggaagtgcaacgtgtaacaaggcattgcaggaagatgttgaatagcgcagtgaatccttccatgacagtggtagaagcattcggggccagagatattcctaaagcctgtaacctcttgttaaacggatgcgccatcctcgtagccactgccccaggtataagacgagtctacgaaaatatgcccaatgcacttgtcaaggaacgcgttcagtccgttgtaatcgacaacatcgatatcataatcgagcgcttcggcaacgaactgcagttgctttgcaaaatatgcgataagcctgaactgcagatggtcatcacaacgacatactggagtccattgttctttggctttttgaaaagatacaagaacatgattatgtgcattggagcatacctagaggcggccatatatgggaaatcaaacttgttgttgcaactgaattccaagctcacgaaaattgatgaagtgttgcacttcgtacagcagaccaattatcaaaacgaacgaactatgatcgtatgcagcgaagctgaggaagtttacgaattggttgaaatgttaaagtcacagtcgatctctcacatgttctgcaacgatgcaaccacattggcgcaaatggatggcttcaaagaatgggacaatcagctgcctggcgagatgcacgtgttggtttgctatgacggagttatacccgatttggagatcagcaaagcgcaacatataatacacttctcgttgcccaactcttggaccatgttcaccagacgattcgcctgctcgtttgggtattaccgagatcccttccgtgacgatgacagtaagtcgcaaaaacctgcatcttcggttatactgttagacgagaataacaacgaacaacttcctaagctaattgagtttctgaaaattcacaatcatgaagtggcagagccaatcatcaaattggcaaataatattcgcatccagcaagaggaacagaagctcgcggaaggcaactacgtggacttttgtccacaggtgcttgagtttggaaaatgtcgaacgcccgggtgtatgaagcgccatctattcacgatcagagatctaccgtacggcgatgtgccttctagtggcattgtcaaactgaaggtcttcaacatgttctcaccgacgcactacacggcccgggttctggagcatcgggactacggcgccaagagctggactccggtgaataattcccaagactattttgccctggacttggccatacagcagcattatgccaatgaagatcgccattgtgatcacggccccgtacactacaatgattggtgtaccatattcgacgagttccgctactggcgttgccggattgtcagcatcgaacagaaaaaagaaatttcggtaacacggaaggtcaaagtaaaattgcttgacgttggccgaactattgattgcgtgtcatccgagttgctgcatctgccggaagaattccgccgattgccaccgcaagcaatcgatatccgcatcgtgggagtggttccacatgacttcgaactggagtgggacaaacaggctactctgaacattcgtgaatggatctaccggtataccaacaatgacaaattccacgtggaaggcaaagtgatgctaacgatcaaggataccatttgggtggacacaatccggctggtgcagcacctagagggcatcaataccgaaataatggaaattcacgtgaaatcagagattgttggtaagaactttggcgtagttgataaagagccactggaattgttatctcagatggtggaaaattgccaagcgttccgagagaaagcgattgcggaaggacttgaagaagaaatggaatctgtaaggcaggagatcgacgagaatgacgagggtcaagtttccaaactagaccggtttgtccaaaaaatggataagttggatataatcaacaggccagtgcaacccaaaatactgaaacccatggagttgagtgaaacagactcggatgattccatctcagagcaaaacgtacctgaatatcacgacagtgatgtagataacgaatcgaaagtggaaaaagaactgcagctggtaaaaccaacaatgcgcagcttcaatgaagtgtacgacgaaatcgaagaagacgctacccatgaagtatacatttcccagtattatgccccagacgatttttatgtttgtaaagttgacaagttttcttttatttcgtctatgattcacaatttcactgaagatgaaacaaacctgattcccctcgaaacggttgcagtaggagactactgtttggcgttgtacgatagtaattaccagcgcgccaaagtgacgcacattgaaggacgagacatccggctattcttcctggatcttggtggctacgaaacctatggacagatcgacttgttcaaactcccagatgatcttcttaaggcgtcagccttttgtgccatcaaaggagaggtggcatgcttgaaaccacgtgagaatgaagaacaaggctggaacccagagattggcgatagaatctacgacgaagtgctttgccaatacagaagctttaatgcgaaagtgatcgaaaaaatctccactgctcatgtggaatcgctcatcaagtgtaaatgttatcgattgctgctattcagcccagagcatgaacttgagtcgtggatttatgacgatattgttgagctgcaacttgcccgatatattgaagaagagaggcccttttcaatcgacatccactttgaagatgatgttgttcggcatttgttggacccgaattacaagcagcaaacatcttcaaccgatgatgagcaggaacctcgcattgttgaaatcgtcgagcctaaagataaagcttcttctgcagaggaccaagttaagacaacgaaaccatcgaataagcttgccttgctcaaaaaacgattgcgaaggaagaagtccattacgagcattgcttatcctcgcctgaaatgtgacttccgtagtcccaaaactatctggcgtcaagacgaacaactaattgtgatacgtgcagtggctccggagaatgttcggtatgatctactagttgactctgattcgctgaaattatgttacatcgacgctgacgaaaaatatcttctgtcgattgtgttcttcgctcaaattatgcctgagttgacggttcatgaggtgcgtggactgtcaattgtgatacgtttggcaaagttagttccggtggtgcaatggccatcactgatgcgaaatggagacaaggtaccctggctgcagcagtgtatcgagttgtccaactcggatgaaacggacggaacggatggaatgcgcaatacttcgccaacagtgccaaacctggaatctacggacagtttaagtgaagagaccgattacgaaaatgacttcgaccgatttgatccattggcagatgattatttcctgcgggatggttaaaaatggtcaacagtttgttttaaacgttgtaaaatagttttttttattacaaataaatataaaccgttaatgacaaccatgaagttctcttttttatgtactagattagaagtaggtttcgtggcagtgcggttagcggcgtcagtcgtttaggcgtattgtg

SEQ ID NO: 1240 - DNA, 4618 bp, Aedes aegypti
tcgatatggtttcgatatgctcaaacgatgcacttttatgtcaaatcgatcgaagtgcataaaattggccctctccactctcgcaaccggaacgtttctctctcaaataggttcgaaaaacaaaaacaaaatccacacacgaatgaaaacgaagttcttttagcagaaaagtgacaaccatcgccgcggaagcatctacgtaagctgcatttcgatcaatgtcgtgtgaatctatcaatataataaattgattctcaggggggattctttcttatctaatgtttgaagctggttgagtcgtctgcaaataagagtgataataactcccggtcggaaagtggtttgcaattggcgtcggtcggcttgggaaaagtctggcggaacagaagctccgttggctggatgcgaaaaaaaggctcggaatgatgaggatgataagatacacaaacaaccagcccgagatagaataaagattacgtcgcgagtgtacaaatattgtaaaagtataaaactagtgctatagaaaggagaagggtacaataataattactggttggttggtttatttgggatttacctgccactgagcggatacatgaaagtgatggcgaagtctatgaccgtgagaagttcttggaagtgcgtgtgaaattcaaaacattgcgacgacaaaagtggtcaaggggaattgaaaacacttttgttcgatcatttttgcgttgatgatgatgcttcgggtattgaatgcagtcatagaaacataagattccaacacccggctttcctcttctgcatctgaccgctcaacgcaagaataaagaacccgatgcgacagaccgagagtgcagaaatttgcggaagcgccttaagccaccttttcgctgaatgagtgtataggtgtatcggagccaaggtctctcgcaaagaagtgcatcaaataggccaccgtgtttgaatgtattgcatagtgaagaaaatgctgaaacaggaaagagtatctatgcatgcgaagccgcagataatatgttttatgtaacaaaatcgaaaatgttcgaatcagtgtcggtatctcaggccaatctcggtttcgatgctcattagccgtggatgcactacattcattattcgcaacaatcaagcagggtacgaagagcaacgcgcgtgtgtgataaatttgtgaatgaattcattcgcgaatgctgaaaacaattaggttcttaggtgcagagtgcgagtgcgacctggtttacttactatccgccttctttcatgcggccgttcgcagtcaatatcgcatatgtgatctaggttgttgggcagtgtgtcatcacgggtcaattggggcggcgatcacaatcgtccctatcagtagaagcagcttgtgcgatgaaggtaatgctgcggcagctgaccgtaactcgattcaatgcatgggaataagttccatcgtgagagtgttgtgtttgatgccgcgattaaaaataacttctccgcgtgcgtttgagtcagcttcggctagcgtcgttgatccacatattacgaaagtgtaaaattaggaattttgtttggtttagcccatcaacgtgtaaactgaagaaaggaagagcgattgtcgattgccagaacgaagtaattagttttcacggtcgaaaagtgaatatcatcccgcgaattagggcggaatccttgaagctgcgaggcaacataagagagaacccgaccagattacgcagcaaaaatgtcgatatcgaatgggaaaacatcgtcggacattgagaatgcggaatggaattcaaccgggatgctgacccataccagatatggttccagcagcagccaagcctcgcaaagcagtggcgacatctgtcggatatgtcactgcgaatcggatacgcacaatccacttctgacgccctgctactgctccggaagcctcaaattcgtgcaccagacctgcctgcagcaatggctaaccgcgtcggaaacgaatgcctgcgagctgtgcaagttccccttcatcatgcacaccaagatcaagcctttcaacgagtggcgaagtctggagatgtcgggggttgaacggaggcggcttttctgtgcggtcctgttccactgtgccgctgccctgtgtgtgatatggtccctctgtgtgctcatcgaacgggctgccgaggaagtgcgccgtggactgataggatggcccttctggaccaagctggtcgtggtgacggtgggcctgaccggcggagtcgtgttcatgtacatccagtgcaaacagtatttgaatttgtgcaaccggtggcgcgctcggaatcggatccttctgattcaaaatgccccggagaaaattcacccaccgcaatcacctggtgttcagcggttccctcgtgttcgtacggcagttgcttgcggaggcatcggtcccaatggaaacggaagcggtggaccgggcagcagtgccagctacaattccggtaataacggtggtcctcagtatcgtggttaccatcagcagttgatcgggtcgatcggcgggggtcatgcctgtgagttgcaaatcaatcagcaaggacaaatcatagcggctaatattgagaacagttcgatcaactatgatcgcgattggacgctggacgatatcagccagatgtcgttcaaaccgtgtccacagggaagcggtagtctaaccccaatgccgttccacgattccgcgcataacgtttgcgagggaagcggaagcggaagtggcgtcgttgtggctactcatagatactcggcgatatcaggatcgtccaatacggtccacgaagaagatcagctacaacaacattctagtattaatgaggcaactagtggtagttgtggtggaggtagtattaagacagccgatctgaatttgttcaaagtaccgacctcagaactgagtagtgttagtagcagtgccggtattccatctgggacaaacgccggaaggtatcccaactcagcgatattcttagaaaatcgtgatattttaaatgatcctccatgtcaagaacaagttatcaacaatcaagcgaaactatttaaccgtcgatcgacagttctctgtagcggtagtagcagcttcactcctgaggatccacgaaatgatatccgtagatactccgacaccaaactcctccaacagcaaaaactcacatatgtcaacgagcaccctgttgaaagcagccctaccaaagatcaattgttacttaatcctaagagcatcatctacgacatgaccagttttcttggtccggtcgtagcacaggatcaggaagatagttctaataacccacatcatcaattgcaccgagcacatcatcatcaccatcatcacgtacttacaactgcagacagtccgagccatcggatgcaaacaaccgacattcaattggacaacaactgtgatgaagactcggctccacctcgagcagtctcgtacgatcccttagagctcaacatccaagaattgcttgaactggacattgccaatattcagcggttgcacgagaaaaagagctctctcggaaatatctcccagcactcgtcctcctcgtactgtcaagacgacccgtcctcaccatgccttggccctccaactgccaaggtgcgtccaacgatttgtccctccgcctccaattcccaactgcgacaactccagcagcagcccaccatccatgatcaactacaaatgcctcagccaatgcagtctcagtcagcggaacaccaccgttcaatagaaagccccagcagtaaccagcagttcaacagcaaccgactaaagctgttcaagtcgctcccgaatttgagtgccagtagcgagaatctgctaccctcgccaaagcgtttcaattaggtcttactagttttcgtgtgccgatgatacaagtaacatattataagacacgagttaattaacgccatttttgtgatattttattcccctaatatttttggacaaacaaagcaacgttcggtcctgtgaatactaatgaatcaatatacttaacttcaacaaagaaacaactgtttgcttaagacgttaatacttacctatccaatagagaaaaaacagtagtgtattcgaattattactctagatgagaccagacatagaggcattttagacaggtaaacactacagagaaatattagtgatgaagcaaattattactatatatacttacttgaactattatttttcttgggatgatcacgcgacagattacaagccgatcactggcgacagtgatcttcaattaaaggataaacaaacagagcatagatgaatgtgcaagagccgatgtgtgcgaacaaaagtatgcgctagactgagagattttgcagctttaaatgatggtttttgtgtggaaatactgactgaatccagcggttgagtgtgaagaaattgtaataactcataaaacgaagcatgacgatcgtcgggtacttgtattaacaataagaaggacgtaacgtgtgacttatatcttagagatgaatacaatatgcaaaatgatttaagcaacggtgttacaacaatgcagttttattttttttccatttggaatatagaaaatatcgaaattacgta

SEQ ID NO: 1241 - DNA, 1293 bp, Aedes aegypti
atgctggacaacaacgacttcacaagactcaatctaacaacgaaaatgataaaaaccatccagaagttccaaaaacttgtcgaaaacgatttagtagttgaagagttggacgagcaagtcgaggaagagatgaccatcgaacacaagattgagccacccaccgaaaacaagcttcctatttctttggaaaaggagatcgacgttgccctcatattctcacagacacaaaatgggcgagagatacacgaaatgttggctgcaggcaacaggcccagtgataaaattatcacaagcattacgcatattgcatgcgactatctcaagtctacctacggagtgaggccatccacctactacaaagaaacacttgcccggtccttgatcaaaacttatcccgtattggcgtcaactgcatcggatattcctcacgcactgtggtttcacaagaacggacgtggcgatgggcgtcatgctggtaaaattcattacaggatggaaagcctagcaaaacaatcagacagccgcgtatttcttcggcagcgtgatgccgaacaagtaccacagacatctggaacaacagtagtcgacaaagaagaacccaacattgatgagctggttgacgaactacgatgtattgtcccaacgcaccaagaaaaaggaaaaattgaagaattgtggaagaaaacgattattcaacgaaacaaagcacgagacgaaggattttttttgcagtacttgaaggatttccccgttgcgttggcattcgacggtcaattgatttctcttgacttccaattgctgaagccgaatgctcaatgttttgatgatgcatggaattctattctaccaaaaatactggaccaataccgagatgtacacatgtacatgaaaaatgatgtcatcaaagcattgaccgttattcgtgacaaaaacccgagcagaggagcgaaacgtccgcgagaggaaacccaagcacgtaaacttaatccacttcgtggtgtcatcgagtggattgatccggagttcgaaatgccctcaacagaaattcctatgattttcatcgccgaaaagttattcgagatcggggactgttgtgtggcctggaaagatattacgattcccgtaggaaatgacgtcttggcggccttcaagctcctttgtcaagctttcgtggttttcaatgtgaaatgcagcccatccgataaaatattttattccttttttcatgcattttgcttcaaagtagaaccgctgagtaccacgagcaacaagtttgtggataaactgaactga

SEQ ID NO: 1242 - DNA, 619 bp, Aedes aegypti
gtagcaaactatgcatacagttccgaatcaaacctaacgcagttgtaaagatgaaatctatttttgctttcgctgcgattgcgatgcttctcgtgatctgcactatcgtagtgtcatttccagtcccgcaaaacgcaaccggaggaggaaatggtggaatgcctgatatttcgaagatgaatgtgaaccttggagatttggcagatcccagcaagatgaaggcagccgtcgatgacgtcgtcaagaaaattcaatctggaatttcgcaaggaatgcagtcgatgcccaagtttccgcaatagaagcacttttgaagtagctatgaactgcaagaaggtgcaaacatcaatttacagttggtataatacaatacaattttttggaataaaaataagaagttaatctggctcaaactaatcggtttaacagaaatgatgagatttacatgttcgtcctataagttgttttttggtctatttttgtaagaactcttctggctcaattgtttctttcaagatattcgaagagctgatcattcgatttattacagtgctgacccgattttgtaagcttttggacccgattttgtcaggatatttagaatataatatttttcgtc

SEQ ID NO: 1243 - DNA, 2322 bp, Aedes aegypti
atgcgatcatacacgccggaggaatatactcacgaaagcccggtgtccgggggacagaggtacacatcacccaaggcgggtggcggactgtaccaaccagatgcgtactatgacgcgccgggtggttcctggtatccctcatcgtccagcggtgcttacgcgcctcattcggcaggttccgcatatcacaacgtaggccacggagcgcacctcggtggaccccagcatagccatgaacagtacgcaatgtcgccggtcggcgttccccacatggatggacatctaagccaaaatcaaacacaagcacttccaccgatgagcacgttccggggaaacaccgcccagataccgccaattggaccccagggacagaactcacccgcaatctacaacgcaatcgcaggacatcacaatcagcatgcacagcatagtccaattgtacaaaatgacaccctcgtcggcaatgcactgaaaacgatgtaccccactgatcagagtattagcagttacggttcaaacccaacgacaccagtgaactcacctcctccactaacatcacagcagcaagcggcagcagccgccgccgcagccgcagccctcgcccaacagcagtcttctgcggccgcgagtatacacggctccggagcgacggccggttcgtccagcggcggtgcaggttcctcagccacgacgtcctccgcggcagctgcggcagcggcagcagcagcaggcacccgcatggaggaacgcttggacgacgccatcaacatcctgcggaatcactgcgaaccgcaggtcggtgtgtcgctctcttcgatcgatgccggttcgccgtacggtccggccggggcctcgatcattccacctggcacttccggcggtggttcctcctcatcacagctgcacggccaagactcgaccagtgatctaccagtgacggcggcggcggccgtggcagccggcctagtaccagtgaaaaccgaaagattacccagcacaccggtcgcgatgaacagtattgagttgaagtttactgacgtgtctcactcttgtattgcagagaaacgcaaagaaccgccagattcagataccaaacccagcagttccgtaccaggttccaccaagggtgccaagcggcagcgtaaatataaaaattcacgtagttgttccagtgctgacgatgacgacgacgacgatgatatcgatcccctgacgaaggatcgaaaggagaaggaacgaagacaggccaacaatgcccgcgaaagaatacgtatccgggatatcaacgaagcactgaaagaactgggccgcatgtgcatgtcgcatctaaagtccgacaaaccacaaaccaaactcggcatactgaacatggccgtggaggtgatcatgacgctcgaacagcaagttcgggaacgcaatctgaacccaaaagccgcctgcttaaagcggcgagaggaggaaaaagccgaagacggccccaaactgccccctcacatactacaccaaacgccgtacccctcactacccgtaagtaacctcaagcaagaacgagagtgagagcactgagaacgcgcgtgtcgtgccgtggcatctataactagcaaaaaataatgaacaaaatcgcaatcggtacttcaaaattcaaacccatacccgcttaattcggctgatgtatgtgagcgaaacaatcgaaagttatcgtacgccaaatgatcgagcgtggcccgccgccaaatcttccccacaaccccgggccaccacaatagcataataactttaataaccttattcgaagataacactgcaagcagcatacatgtacatatactagagcagcgggaaccgttgcaacagccgcagccaccgcagcttcttcagcagtagaagaagcaacagcagcagcagtgacaaaatcaacagtagtgggtgaatcgtgtgagtgctggacgggtgccgattggtggatgtggttgtaagcgggaagagtgattgaatgggtgatcagaatgtgaggaaggtttgtgacactgatctggaaatgggaacgaaatattgcgctatccttttaagtagctgtctgtattgtcaatcggaacgagtaacggattttagaggagaggtagatcgaacgattcgggaggttaaggaattgatcggggagatcgggaacagactagaattggagaaacatacgccgcgaacccttcctcgtcatgagttcagtaaaacaactagagagtgctaggtattgaaagttagagaagcttatttttattgttaatgaaggaattataacatcacatcgatcagactgtgtttcac

SEQ ID NO: 1244 - DNA, 1213 bp, Aedes aegypti
aaacagtctattacgatgaggaaaatacagtctactatgtttgtcgcttccaacagttttccataaggtttcttttacgttagtcgataagtccatgagtcttcctatcgtgtaggtccttttgaattcgactcatagaaattttctagcatacagtagatcagctgtatcacagaaaattgcgtgaaatacttcacttccataacagggtacaataggtataccatagcgcgcccgtttcaccaccagaagatccaagcattaacaaaccacgtcataaaatttccaatatgggtctcagtaatgcttttcaactgtgcagtttgatttatgctagtttgaaggtgatttacctgacgatagcactgtatcaggtggcattttgttcaagtgtggagtgccccaatgaaaactctataccagccgccttcgtaatcctattggtgatgatattccccgctttgatgattgccggaatattgaagaaaaatctccaaatgcttcgcatctgcaaagtgtacaacatcgtggagaaatcagtgatcatattcggccagctggtgatgatcatcatgatggaacgagtctaccagctctaccgtcgacgccattacgtatccgacgaggaagcaatgtccgttgagctggcctacggactaatggcaatcggagtcctgcttacagcactctacttgattttccgcaactggatgatcgatggaaccatagcatctatcaaggaggatctctacatcttgaaccgggacaagtatgtcatgcaatacaactgcgaggcatgaacgcatcaacctactttgttatgtgtggtcccacaccgcagaatttgattgttgtttaatgcgatacatttttgtacatcgaaggttactaaaaagtaaccagactaagaaagttgaatagaaagtaagaaagttgttgtgaaatgatcgaaaaacagtttcatgcattattattttcattattaatcaaacgaagtataaaaaagactaactatgcttcagaaaattgatttcttcaaaagaaattcaagcttctcactgttagtaaagtagtttaaccttctgtctgtgcgagaaaaaaaaatacgttgcctgtgctttgactccaaatttaaatcgcgatagcttccagacatttgaacgaatttcaatttttctacagttctagaaataaaattgaattgagtttttct

SEQ ID NO: 1245 - DNA, 1003 bp, Aedes aegypti
aaagtgaagaagaatgacatcgcggtgtcttcatttcgattgtttgaaaacaacctgatggtgatatcgttttacaaattttcaaattgaaaatcaatttatcgtcatgtctatcgcggaaaataaaacattattcactcaaatgatacataaacttggactatctgagcatgagcagttactaccgaaatcaacagaattgctgcgattgctccagtcgaaatctaccggaagtaacgtcgatttgcaggcttacgcaaaggttatcatctgcattgatttggccgctaacctcctgggtctaccgttcgataatgagaccgcgtcaaagctatgtggcttgaaaaagacagcctacgcaaatggcaaaagaacgctggagaaaatcctcgacatcagcaaagtaatcggaataaacgaaatgtgcatccaacttggactcaaccaggttcagaaggaggccctcacaatgttggaaaactacaaacgctacgtgggaggagccaaggctgaggttgatttcgcccatccccaatacgcgaccatggccgtttttcaggcctgcaaaaagatgaaggtgaaacctccgaagacgaaacttgttgcttttagccatttgaaaccgacccagtggacgatgttggagaagaattgggacaatttcctagctcaaagcaatcagcgttctgccgcggcggcggcaaaaccggttaaggaagcggctgctcaattgagtcctgaggaagaggtcgcggtgatggacacacggataatcggagctaagcactgctctcctgagaagattgaaccctatgtgaattggaagaaacgaatgctggagaaagcttaccgggatttgaaggcactgcaggctcggtaattccttttgatgtgttgagattaaataaagataatttagttcgtaataaaaagtagcataagaagttgtacataccatattatgaaataaatactaaaataaatatttttttgaaaatgagaa

SEQ ID NO: 1246 - DNA, 1847 bp, Aedes aegypti
gtgagcagggtttcttcattgtgaaagattgcatattcatattcgtttctcgtctcgcagttgtcgtcgtcgtcgtcgaaattccagtgaaaaatcaaccaacataaaacggtgcaaaattaccgaaaaagcgtccgcttctacgttccgaacagttgtctcgttacaggttttcttttattttttggtttcctttggtttcctttcctggtctccattcagaagtcagttaatagtggaagccggcgctgattgttcctgcaatcacttccttttctgaaccgaaacccacatcgttggttgatcagcttctaatcaatccggacgacgcaaccgggaaccatggccgatcagcagcagtacttcctcaaatggaatgactttcaaactaatatggtgacttcgttccggcatcttcgaaacgagaaaagttttacagatgtaacactggcctgcgaagggcagacgtgcaaagcgcacaagatggtgctatcagcttgtagtccctatttcaagtcgttgctggaggaaaacccctccaaacatccgatcatcatcctgaaggacgtgtcttacagccacctgcaggcgatcctagagtttatgtacgctggcgaggtcaacgtttcccaagaacaactgccgacgtttttgaaaaccgccgatagactgaaagtgaagggtctcgcagagaccccgacgaatatcaagcgagaaggttagggcaagatgactgatgatgtgttgttgcgttaggccgtaatctttcgtctccgtaatgtgctacgttcgccttgaaatctcccgatcaccaattgaagtctacagaatattggctctgaacaataatcccaaatactgccttcagcagtaatttcacagttcgataggatatttgaggggacagcgagtcgtgcaacaaatattagaaggtaacccgtttacttttcgcttaaccacatacccagacacatacgcataagttagacgaaagatagtgagcgagcgaccgtgcgtatagtaagaatattaaagttaaactataattatacaaacaaaaaaaacacactatcgcggaaaaaagggacagatacccgattattccgcatccattttagtttttactaccgatgataacggttaattccaaaacatcaatgattattgaagacaagagcaattatcttcctaaaatttgttcgattgtttgatatagttgaggtgagaagcactttttccatgtctttgcatagccaaaaaaatggttcaacactatatatatcgccttcaagtatggattgacttacgtagatcaaacttagatatggcgatagatatcaaagctccagaatgtgcagctttttagaaaaagaatcctaaatcatacaattggtatatcagttttagtttgaccggaaatgcgcgttttcagtgagtaaaaaaaagtgtaaatatgagagaatcggtagcagagggaaaatgtatcagtgctaattattatggaaggcgcacttaaaactacgacagtggaggcaattcagataaatttatgaggaagtcctgcgcagaatatatactaaagaatggatcaattttaaaaagtagaaaatatatattacgtgcaagtgcatgattaacttcttgattttattttatataggttatctttctcttcttgtgaagtcatctaatttgctactactaaaaagaacaaacaatccgaatcaaaatatgcgtttctgcctcaacctttatcatctctatatcacgcaatttggtttaaaagtgtttaatgctattacattatattttttgttagcacaattgtatttcacgagacagtaaaa

SEQ ID NO: 1247 - DNA, 2274 bp, Aedes aegypti
aattgctggaaccgaagttcaagttctcaagagttacaagttttaggaaaatttagtgaattttcagttttctagttgcatttttacaatgaccactacaaaaatagaccagaaggagtatctgaagcgttacctctccaacgataaggacaaaaagaagaagaaaaagaaaaaggacaaatcggctggcaaaggagcaaacgtacgaataatagacgccgatgacttcagttcgcacgtgcagcacgaaatcgaagatgaatcggatttgttggcgctgggcgaagaggcgcctcaaattgttggtatcattgacgagcgccctccggaactgaaggccaaggaggatttcagcagcagcaagtggaagaaattgtccgccgatgatggcgatagatgggggactgttgatttggtgggtagctccgttaaccagtctagcagatcacgccggaggaactcggatgaaagtcctccgaggaaaggaaaacgagttccggaaccggatgcaagtcctccaagaaagtctcaagggaaaggacgacgtggaagcatagacgaaagcccaccaaggaggaagaaatccagtaaaagaagggactctgatgaaagtcctccccgaagaaaagaatctagtcctggaaggaggactactagagtggaggacgattatccttcaagaaaagcgaaaggatacgattcggatcacagcccaccaagaaaaagagggaacaacgacgaaagtccgccgcggcgatctcacaaagaacggaagcgccgaaactccgatgaaagccccccgaggcgatccagaagacagtctgattcggatcaaagtcctcctaggaagcgccaagatgattcccgaaaagctaggagacgaaaggattccgattccgacgtgagtccacccagacgttccagcaagccggatcacaatcgtgtgaaacaggagcgtagtccttcgcgagcatcggaattcagtctgcggcgggtcaaacaagaacctccggactccgacgaaagccctcccagacgaacaagacgtcgatctccgagttccgatcagagtccacctcgacgggtgacgaaacgtgaacccgccagtccccccgtaagggtcaagcgagaacgcagaagcgaatcgccccgagccggaccatccacgtcccgaaagatgaccaccacattggatgggaaacgggccggcttgcaggatgctcgtgccctcaaggaggaaacggaaaagttccgtcgaagggagaccgagctgttcgataggatgtccgccgatgcttctggacggtatgccaaaacggtggtccgggagaagtctgggaagcgacgggacgtcgaagaggagttgcggaaggagtttgagaagcggaagcgggacgataagaagaaggagatttacacacgttggggaaaaggtgtgaaacaagtagaggaatacaaaactcaactggaggaggcagcacacgagatgaacaaaccactggcccggtacaaggacgacgaagatctggacgattacctgaagcagcaggaacggatcggcgatcccatgttggaatacatgcgcagcaagaaaaaggaaaaagatcgccaagaagggcgcccgcagaagccggtttacaagggagctttcccggacaaccggttcggcattcgtcccggctatcgctgggatggcgtcgatcgctccaacggcttcgagaagaagtggttcgaaatgatgagcaagaagaaggccgttgaggaggaagcttataaatacagtgtggaagacatgtgaatatttgtaagtattctttattgagacgttttttcaatactgtaggtataaacttaactatacagtttggttcagttttccttatatatcaccactgtccctgcgatgcttcctcttcgatatacatattactatgtttttaatgactacttacgacgcctcttcaatcacgtaggatttccttcagagattatgttactaattcttccactggtttctccagttgttattctagcaaagtttttaaagattcctacaggaatacctccaacaaaagaaaataaccaaaggcttatcccagaattttttaaaaaaatgacaatagatttttccagaaaaccctactataattaatcaaacacgcagcgaaaacatttttaatgtcaacaaaaatctgtatcatttcaaccatttttctgtattatttgccggcttataatatcctttcattgttttaataacaacaagcagttcag

SEQ ID NO: 1248 - DNA, 1298 bp, Aedes aegypti
gactctggtgcagacttccagtggtttaattcgttcccatctgaaattgtgaaacaagtaactgtttttgtatttattgtgagaatggctattaatctaaacctaaagtcagctgacgtgaaagcaagtctcgaagatcctgccaaattgcactacattccagctacaatccgtggcgatggcccagccaaagtggaacagtattttgagtcgtacacagacgaattggaggacaaaactctcgtgaatgctcttcgtggattcccgctacgagggaaacgattcaccttacctgcggcctatagtggcgttatatttcaggaaactaaaaaaccactgtcagcggacgaggaacggaatttaagcttcgctggtgccttcaaggagtttacctattggaattacgataagataccctcgaagaacgatgcgtttgaaaaggcccttgattggatggaactgtctgacgctttgcatgaaccattggatgaccaagaagataccaaatcggatgtaaaacaagagaaataaactttgttggttgtttgtaataaagtttttattacttccattgtatgtcacgtaagggttgaaaatctacaataactttgtggaagtttcagaaaatctttcctaatcaagaaaggctcatctactgtaacgtaattattaaaagtatatatcttaaagctattttgtttctttttacgccgcactctttggaggttgccggtagactcccacaacgactgcgtggtcacgttcgtatggttccagtgtgatttgctcctgaggtttcaacttttctgattgtagttttttgacttctgccgcgaacaccgcttccggaacggctgtcgaatcgatacaggaagccttgatcgaaatgacgaaatggcctccgtttttcaggaactggtgagcattcaacgcgacgatacgggcctgatcgggctgggcaacgtcggcgaaaatggtgtcaaccaggccgaccaacattcggtacttatggggatgacgagcgtcttcaatgatggggataatgttggtccgcttcttggcgacatttatcaaatcacgtcccgatcggtgtgagaattctacggcatagaccagtccctccggcccgacaacgtccgatacatgcgaaaccgtagttcccgaggcggcgcccaggtagagaaccttcgagcctggtggcatgtgaattttgtcgactcctccgaggacggcagcagccagcttcgaccggaagggattccaaactcggtattcattcttttcgccgttagtctgca

SEQ ID NO: 1249 - DNA, 4245 bp, Aedes aegypti
cggttccccgtcaaagttgaatatttgttagaatctatgcgagataattaattttataagcgatgcattcgattcgcatccggatatgctctaatgtactctactttcaaacagagtatcttgaatggatatctaaaagaaacttttttcggctaattaaattttctaatgattgatcaaacttacaacatgtaaaattttgtcccgaattggagcaaaatacatctgggtacttttgcttaaaagcatgcgccaccaacactgttatcaacagtttttgctgaacaaaaaaagccaaaaaattttacattagttgaatatacaacggaaaataaaaattaaaaggccagatagggtaaaatataaaaaaaaattacaatatacaaattagtacaacggatcatcaaaacatttaaacatggatacatttaaatcataaaaatggtatgacaattgtagagctctaaaaacaacagaaattggataaagtcgtacataatatatccttttttggatctgatgttgcacaaaacgaacatagctacatttaccagtattttagaagaaagtacgcccagtgtggacaaaaaaaaattagatattttgcatgactttgtgcataaaatagctgaaaatgcacaaatacaggagaaatgtgaaaaattgtccacttcctgaattctacacagaattaaatgatcattttttcatcgaaaatgattctaaatcatctgcttctaaatatgttcaattacgagtgtgattttactcattttgcaatggtttagacgcttttcgaaaagcacacgaaactgacaatacaaaacactgtgctgtgatggtatagcaaccatccacacagagtccgctcgccagcatcgttcgtgcagccaggcagcgacgagtacctagtgctggcttctttccattctcaatctttgcgcggtacggttcatcaagctcattcgaatcctgaaggcggtcgcgatcgcacgtggtcctctctctctttgtgttctattgggaggtgtttagaaggcctttccatggctcggttagcatagtttggacaggaactgggttatctaattatttttctcctcaattgaatcaggaagctgacggaaacagaagcagctggaaaagtctattgggactgatgtgaacccaagtgtaaaaaagtgaacaaatgcataagaaataaaagaagcgaccaacgacggtgacggattgaaacagtccctaaggtaacaagttgtgcatgcgaaagcatcgaagaaagaagaaagagcgcataaaagtgaaatgtggaaacgaatgttacattaacatacttacggtataactacggtataactacatatactaagagtgccccctcgtagatgcgactagaaagattgcagtcgtcggtattgccgttgtcgattgcgcgctcagtttttgccctcagtcagtgtgtctcaagaagaaaacttccaacccaagtcggtgcctgcaggaggtgctttggcggagtcgtaaccaactgacgtgagttttttttattagcaacgcggtggcagttcaagtgcttccatatagtgagttcgctcttgttgggaacctcaacgatccgcgccaagtggcagtcatagcatcggttttggcctgtggagtggaaaactagtttttcctaactgcttgccacactcttgtacgcgtgcactcacacaaagctgaagaagaagaaaaaaagtgcaattgaaaaaaattccatccaccagatctatacgtaacatctaatgctgtaggcctaagtttgcaacaagtcgattggcgagtgcaatttgtgcttggtgcaattggtggttacgggccatcgtcttctggtgatagtgagtgggtgacctgaaagaagaaaacccgaaggaaaaaatgttggccagcaatgggaagctgttttcgttcgataggatcgatccggcccggaaaaaggtctccatcaagcacaccatactggatgtggtgatgtttctgctcacgtcattgtgctacattatacaggccatctattacacactgtttggcaaaccaaagaaagacctcaatggagagctagctctagtcactggcgggggaaatggtcttggacggctgctggcgttacgattaaccaaactcggcgccaaggtgatcgtgtgggacatcaatcaggacggcatcgacgaaacagtcaaaatagtccaatccatgggtggattctgcaagggatacaaagtggatatttccaacaaggaacaggtgtacgcatcagcggatctgatccgcgaagaagtcggcgatgtatcgctgctgttcaacaacgcgggcgttgtctcgggcagagcacttctcgacactcccgatcacttgatcgagcgttccttcaacgtaaatataattgcacacttttggactaccaaagccttcctgccggcaatgttggaacgtgaccatggccacattgtgacgatcgcttccctcgcaggtcacgtcggaatttccaaactggtggactactgttcgagcaaattcgctgcggttggtttcgacgaagctttgaggatagagctggaatgcatgggagcacggggaatcttcactactgtgatctgcccttactttatccaggcgacgggaatgtttgacgacgtgaactctaggtgggtgccaacgctggattccaacgatgtggccgatcaaattatcgaagcagttcaaaagaacgaaaagtatgccattattccaggatacctgaggtgtatgttagcggttaagtggatatttccatggggttgcaactctggttttctgcgacggctggttcccgatgccacacctcaacatgctgcccccatccaaactccaaacggcctcaaaatgaatggacactcacacccgctggcggaaacggcaccggataacaacaacacgaagacgtccccactgttggtccatcgactatccaccggggaaagggtactgtaataagcaaaaacttaactcccaccgaaacacggattgatcaagaaatacaaacacaaacacacacacacatacacccactgtactaattagaatattgcgcatccacagaactgaaaggtttcaacacctaagaaccatcaaaagaaagaaagctgacaagtggaaaactggtttttcttttcaaggaggttgctctcggcagcctaaccatgtcctaaatttgaaaaaaaaaagttttaaaaatctctagctttaagaatagtgtcgacggagaaaaactgatacaagtatatgtgatttgccttgttttaggaagcgacgaaagaaatgtgattaagacaggctaggcattaaggctggataattcctatttctggggaaagtagatgttaaggtgtccaactagttcgtagtcaataagaagaaagacaaacaaaatctttacacaataaaatctgttcacaattccttgcctcccgctagctgtcaagctttggacgacacaacgcactttattcgagaatcctttggagccgatactttctgttgtcttccctataggaatgaagcccaattcgagagacgttttccatgagcgaaccgatattccacattccgaatgttccttacagaaatcccgctttggcgcgaaatttatcaataaataggcatttcagactcgtacaataatacattggtttctcttatccgataacttccattcatctacaactcctttggaaaccgcacaccaacacctcaaaaagcctacaataacccctgtccagattgtctaaggtagactgggtagacttgaagccctggagatacttgattccaccctatttcttcgaaattaaaaacaattttattccaagtgatttcgttgaatacttcatctctacgaaatactatgtcagaactggaaattcgacaaggatgaaaaggaatgatatttcaagagcagtttgtttattgcaattaaaacattaattaacaaacatcttttgaacagctttggtaaacccaaacaactttgattatattttacaaaatgtttaagattttcaccatttggaagtttaaaaggccaaaaaaaacgtgtatactataggaaatttcctccacaactgttctttctctggacacaagggcgtatttctccgtgattttttcaagcaagcagttattctaggaattgctctagggattccctcagagatttcttcaagaatt

SEQ ID NO: 1250 - DNA, 2394 bp, Aedes aegypti
atgctatggaaaattattcctctgttactagtgctcaatgtgacactcttccgaagtgtatatggccaaagtttatccaagtgtatatttcggaaaacttgcgtcgaatgtttggatgctgattatgactgcgcgtggtgcacggatgagaactacggcatgtacaagcatcgctgtatgactttcgacgatctggtggcatccaactgtagcaagagccaaatcgagacaaacgactattttagtaagctcgaagttgaagaaaatcgacccctgctggactatgaccgtgagaagcttggagccactcaaattaggccacagcgccttaaaattcatctgggaaagttggaatcacattcgttcaagttcacctacaaaccagccaagaactacccattggatctgtactacctgatggaccttacctggtcgatgaaggacgatcgtgacactttgatcaatatgggcgatcagctggcgaaggcacttgccaacctgaccgaaaactaccgacttggcttcggaagtttcatcgataagcccataatgccgtttatccaaaccgaagaggatcgagttcggaacccttgcagcacagagcgggatgtatgcgagccgacgtatggattccgtcatcgattggagatcaccaagaatatcgatcggtttattgaaaagttgaaaactagcaacgtttcggcgaatttggataatcttgagggtggtttggacgcgttgatgcaggtattggtatgtgacgatcgaattggatggggcaagaatacacggaaaatagtgatcttggctacgaatgggcttatgcacatggcaggtgatggaaagttggccggtataaccgaaaggaacgataaagagtgccatctatcggcagagggagaatacacgggaaccctgacgtatgattatccatcgctggagcaaatttacagagtactggccaaatcgaaaaccgctgtgattttcgctgtgactgatgagttgaaagattactattggtcgatgcgggagttgatgtcggagtttgccagtgttgggcttttacaggatgattcgtcgaacatcttacagctggtcgatacggggtatagagactttgtaaaacgggtagagtttacggatgatgccccggcttatattcagatttcctacaagactgactgcggtgggatttataagacgcctcaaccaacgagtaagtgtgataacatcgaaatcggaaaggagtacgatttcttcgtagaggtccgtttgctggagtatcccaatagggccgaatcgaatctaacggttaagattgaagaaacattgcttagcaatgagagcgtagagctggagatctacatcagggaagcttgccaatgtgaactacaggaaggactaatcgaaagtagtgacatttgtgagggccatggagaatactcgtgcgggatgtgccgctgccaccctggatgggtgggaaaaacgtgtgagtgcgatttacgaaatttcgagagcagtgatgatttgctgaagcaatgccagatggagagcgaattcgatgaacccggaccagtttgctccgatagaggggaatgtctttgcggtcagtgcatttgcaatcctggtttcgacggaccgcactgtgagtgcacggaatgcatcccattttttgatatgatctgtagcaatcatggcgagtgcgactgtggtgcttgtaagtgctatgagggatggtccggcgaggagtgtgaatgttctacggatcaagccgcctgtaaggcaccgcataaggatcagatctgctcgggccgaggtgagtgtgtctgtggcaaatgcagctgcagagagacgtattttggagcttactgcgaagcaacggctggatcggaatcggaattatgctcatactatgaggaatgtgttcgctgtgccattcacaagaagttgggaaaacattgtgattcgatagaggacgaatgcaagtcgaagttgggactgtacaaagcagagttcatcgaacatctggacgataccctaaactgcacggcccgcattacgaatgacgatcaaacgtgcgacttcaagtacacctacgagctggacgatcgtcttacagtgctgaagatcatagacctagactgcacccgagtcaacgtaactgccgccttcatgtacatagccggactaacgattttgcttggattggtggtgttagcagtaatcagattcaaaatgcatctagacgaccagaaaatgtaccggttatttaaggaggaacaaatgaatcaaacgtcttatgaaatgacgagccctctgtataagtcacccgtcaatagtccacacatcgtagcaccgttacccttcgaagaaacaccaccgcaccatgcctga

SEQ ID NO: 1251 - DNA, 2024 bp, Aedes aegypti
gaagaatgctaccactgtatggcgagtctggtggcacctaaggataaagtgtttatcacgcagacaaaattactttacgaagtcacctggaagactgtgatgcaaattgccaaaaaacatgcgaaatccgcagtactgtatttatcgagattatgccccggccagaaatcggagcgcatcttcatggactggtgttggtggatcctcggcgggcttccgtttccgcacctggtgcgggtgatggactgcttcttccacgaaggcatcaaggtgttctaccgggttgccctcgccatcctcattctctttcacaaacactcgaccgccaccaactccgagtgggacgccgacacgatcaagaatgacatcgacaatgcgctaccaaagttctgcaaaaacatcccggtctcgccggccaagctcctgcggacggcttttagtataagagcacttagttcaacctacatatctaggatttttctaaagactgaaatggtactaaagagtaagtcagttcttagtggttcgaagcagatggtaagatcacgttctagcgataatttaccaacgagtcaatcccaagtcaacgtacaaatgatgtcacatacactaaccattagagagctttttacgctttggtcctggctgccagttagaataacaatgtaccagcccgtactgctctacacaacggaggagcacggatgctcactgacgacattctacgtacgagtggagcagcatgaacccacgctattgatgatcaaaacctgcaataatgaggtgttcggtgcctattgttcatcgcggtggttcgagcgtaacctcaaggacgaccgtggccagcggcaggcgtactttggcaccggcgaaacgttcctgttctctctctatccggagcgcgcaaaatatccctgggtcggaatcgagggcgataagggtctgggccacgcatcggaactgttcatggccgccgactccaagatgatcacgatcgggggaggtgagggacaagcaatctggatggacgagaacattcgcttcggcaaaacggaccgctgccaaacgttcaacaacccgccgctatgcgcctccggtgatttcgaaatacgagtgctcgaagtgtacggtttcgtaggtgcgtgaacaacatctttaccaatatctcctcaagacacctcctcaattgtcgcccattattttacaacctgttgtacaacaaccctaaccgccagcatcaccaccaacaccatcatcaaacaaccaaaatattcaactctataccggaagctgagcgattaccttactctctcttgctacgcgagtttatgttgtgttgtgtatgtgctgtacatgatccttttcctctctatatggatgtgcgcaccttaccctagacacataagtggaatcgagtcaggacgaagcgatacttcccattacttttatttcttgtatttcaacaccgtgtctttccgttgactagtttcgatcctatcgattctctgttgaaacgcgccatcgtttggagaagctcaggtccaaatccccacctagaaccaacttgaccattgactaccaaatcttcccatgtatattcgtttaagcacttactaaccctgatctaagacaacgcaaaaaaaagctatcattgacgagattataatcaaaaagtaactatttcgaacaaaccattagcatacaaaaccgcaaaccgcatgcaaccgtctgttcgttcgtagccattaggataagaaaaaaccagcgcatggagcgcccaaatttaaacgtttttttgaataaactattttcttttttctttctctctctttttcaagaatgtgaataacgtttgttgagagtaaatagttaaacgggagaagagacgcatataaactaaacaaaacctagacgtgtacggtagataaactactctctaggggataattattttgtttcgttttttgaaatgagatgagagcaagtcgtgcagcatcgtttgtgagttataaggtaaccaaaac

SEQ ID NO: 1252 - DNA, 3169 bp, Aedes aegypti
agtgacaaaacaaacagaagatcgtgcatgctaaacaaaaatcttaaccagtgcagaatcaagtgatagtttgttcagagagaaagaaattgtgaaagtggcagtcgaaaagtaatagtcgtctttccgacgggaaggagaagaacccacagtaattttgaatcttagcagtaagacagcatttccgtagttaacagtagataatgaccgctgcagttatggcggctaccgacggcagttatgatccagtgatttcaaagctcatcacatccctgaaggaagcggacagtttatcggacgaacaggatcttggcttcctgcagaacttgctccaatccaaggagctcaacgcactcgtcaacgttcacagcaaagttgccaaaatcaacaaggatgatcggatagcaccgctcctgtccacgtccatgcaggtgctgctagaggtattagaactacttgcaccccgatgccacatctcgccgctgtgtaaggaaatattccatctgctgcagacgccacacttgcagagtctcctgttcgcacacgatgccatagcgcaaaaagacttctaccctcacctgccggagattccagtcgaagtggacgaagatgaggaaacaatcaaaatcgtacagctagtgaaaagtaatgaaccattgggtgccacaatcaaaaccgacgaggaaacgggtaaaatcatcatcgcccgaattatgcacggtggagctgccgaccggtccggattgatccacgtgggcgacgaggtgatcgaagttaacaatatcaacgtcgagggtaaaacgccaagcgatgtcctgtcgatactgcaaaactcggaaggaacgatcaccttcaagctggttccttcagacggaaagttggaccagcgggagagcaaagtacgcgtgaaggcgtacttcgactatgaaccggagaacgatccgtacatcccgtgcaaggaggccgggttgggattctgccggggcgatatcctgcatattgtttcacaggacgactcatattggtggcaagctcggagagagggtgaaaagacaacgagagcgggtcttattcctagccgtgcactgcaggaaaggcgaattctgcacgatcgcactcaaaaggaaacaaacggcgaagctaagacggagaacgacgacttcgatcgggagatgatcgcaacgtacgaggaggtggccaaactgtaccctaggccgggtgtctaccgaccgatcgtgctgatcggagcgcccggtgtcggccggaacgagctgaaacgtcggcttgttgcgcgggatccggagagatataagagctgtgtgccatataccactcgcccgatgcgtccgggtgaagtagccgggcgagagtacctctttgtgtcgcgcgaaaagatggaaagcgacatagccaacgggaagttcatcgagtacggcgaatacaagggtcacctgtacggaacttcggcagaaagcgtgaagagtatcgtgaacgcaagctgcgtatgtgttcttagtccgcactaccaggcgctgaaatcgctgaggaccgctcagcttaagccgtacattgtgcatattcgaccaccgccgtttgaccagttgaagcaaactcgaaccaaggctcgtgctcggtcgacgttcgacgaaaccaactcgagaggattcacggacgaagagttcaatgagatgatcaaatcggacgagcggatcaacttcctgtacggtcacttctgcgatgacgaaatcgtcaacggcgacctgacggaggcgttcgagaagctcgtcaacctagccaacaagtccgaaacggaaccgctgtgggctccggccagttgggtgcaatgaaggcacatctgctctgccgccgctggtgctatcgctgctgctactgttgtcactaccgatgccgctgctgccgggccggaatttgttgagcttacttggggacgttcataaggtgttcgtaacttaaaaccaattgaatagagtatgttattttcgttgttgccacaaatgagctggaagcgtggaggatgctcccactcccacaaataccgtcttatgtataagcgatagacgttatgtgccgaactgtgctagggatagcccccaccgtaaagctggcgtatgagagttaacgaaaaggcgtttaatcgataggctaaattttagttgaaatattgtatcattttgttatctgaaaagttgattactagaaaatttagtgtttttgaccatagcagtcagagcgagtaaagtttttcagtcaacaatcgctaagataaatgctttagttaattatttactaaagcttgtgtacgaaactgctactatcgtcttaaacatccattttccagtaatcaatcaacgtttaaggttagttaatagttaaattttattttgcggtgagaattcaacgtctcaacaaccctcagagaaccaaacgtccattcttagattatataggtttgacatcggtttgttcgcgctgacattacgcagttataatttaaaaagtagtttgaatttcaacctgatcattaaataaaaaaaaacaatgtgcagttggcaataaagaaatgatttgaagtgcttctaagtgattgaataatttttccattcatatgaatcgtgcctgatttcagtaaaaaaaaaagtatgttctactggtaatcaaaaatacaagcttgagaaaatactgaattgatacgcactggtaaaacatgtttgagttgtttataggttaaatgaagcatacaagtaatgtaaaaggatacgtttcactgcccttcgattcagagtaaatttggtataggtgacacggaaacgacgatgaaacacgtcgtaggttgatttctaaaaataaatcctctgttttatttgtgaactaccgcttttgttttgtttcaaagatgcgaaagatttcttgaaacggtactcatggaacctttagattttgatttgttaaaatgttttcgaaagtcatggttttcgccggcgtcatcaccatcgtcatcatcattctggctatcgtttccataaagacataccatatcattttttatttttctttatgtgcagttaagtcatgaataatagaaaaaaaaatagaaaacgtgattttgttgaaatatttatctaaagtaccgtaatctggggtaacattg

SEQ ID NO: 1253 - DNA, 1251 bp, Aedes aegypti
atgtcctccgcaaatagccatcatcagcagcagcaacatcagtcatccggcaaagctctgtcccggcaactcaaagccaaaggcagcgaatttcttgcggccacggaaagctcttccaacaatctgctggaaattgttgcgttcctaaaggagagtaatgcccgaaaaagtgccgtaattccctgtctgctggtggtggagtccattttctccgagctgctcaaacgaaacgagatgcaaattgttgttcagccattgaaaccagctgatgcatcatccggatcatcccacaagcagtggctgcaagcccagtacaaagaatcgttcagtgccatattggagtgcttagcgcatgagaaatccgcagagagtgtacaagcgttgaccacagccatgaagctgattgtggccgaaacggaacacccgttggaagccaacaccggaacggttcatttcccgatatccaagttgaggcaggttctccaggcgatgctgtcctcggatcgactcaatacgcacttggtcaatcgctttttggagtattctgcccatctggatgtgatctacttctgctggaagattctgccgtcgctggccccgaaagaattctgtcccagtacggtgttcatacagaactatctcagccttcttggggccatctgcttcggcaaggaagccgtagaagaatctccgagctttctttgcatccagatgcagctggactatccgtacatccggaagcacatcaacaagacgtggtcctgcgtgatgaactggaagcacgacgaaacgagccaccgccagatgctgattctcctgttggagaaggtcctatcacatctggacaaaccggtcctccttacagatttcctaatggattcgctggacgtcggtggtgccatcagtctgctggccctgcagggcattttcgtgctgatccagcagcataatctcacctatccgaacatctacgagaagctgtactcgatgttcgagccggaaatcttccacaccaagttcaaggcgcgccttttctacctggcggatatctttctcagttcgagccatctgccggagggtctggtggctgccttcgtgaagcggcttgcccgactagcgctgattgctcccccgcaggacatcgtcatcattctgcggttcatcggcaatctgttcatgcggcatccggcgctgaagagactgattttccatcccaccggaggcgagggtaagtcacatgcgctgatttaa

SEQ ID NO: 1254 - DNA, 321 bp, Aedes aegypti
atgacacaaggaatatactgtggacccaacttggcgttgaaatccttccctgcgactgattgggtgaagctacgtttgaatacccgttgtccgacagtaaacgtggctgacctcatcgatcaaatcaacggactgagaaaatgttggacggatcccaaaagcttgccaaaagtcgtatcccaaaatacaacgacgattcaaattcggagcaaccataaccggaatcgagtcaacgtttgccgccagcattgctatgcgacagtcttcccgagtgttacgaaagaggacatcaaatttccgtttttcatcccacggggttga

SEQ ID NO: 1255 - DNA, 723 bp, Aedes aegypti
atgcagaaaaaatccggaagacgagaaatatccccagtacttttccatgatgcattcaaggtccaactgtattactttgaaaagggcctcagcgaggatcaactaacaagattcacaatggactggaaaaacgattattggtatggctcactagatgagttgggactcttcaactactggaagtctctgaaggataagtctgaaggtttgatgttcacagaacctcttcagcaatttcaaagtattactctggagttaacgattggagaggatggctcttgcacacctattgtgcaacaaaatgctgtagaagatgaaataaacgatccacaacctgttcaacccaatgacgacatgagccaagatgaagaagctgcatcaaatgatccgtttgaaggaattttcatttggccaaaggtcaacgagcgaaatggaaatgacaaacagaggagaaaggaacatgtaccatcagtcgcaaccagcaatagatggcgaaaatggtatgataaaaaggacgaagaacgaaaacaagaagaggaagcaaaagtagcaaggattgaaaagcggaaactggctcgaattcagaaggaggaagaacaaagcatcagaaagaagaaaagagatgagaaaaagttacagaaggaaaaacaacagcaagaaaaggaaaacaaccctcctcggcagaagaagaaaaagaggacattgatgcctaaatcgggctaa

SEQ ID NO: 1256 - DNA, 1238 bp, Aedes aegypti
cgtagtgcgtgtcggattttggtaatctagagagtgggtttcatcagacttttcgatttcccacaattaaattcacgtgtgtccagtcaaattcaaaaatgttgctcagaaacatagaactggagaaagctgcgtgcatgttcgtgaactggtacgaacagttgaagaaaaacacgataaaatcctacgttattccgatcccggacgatgtcctcgcgtaccttcggcaggacctagtgattctgcccaaagagtgttcccagctgcattcgtccgaagataccaagaccaagcatttcaattcgtacgatgaccagttcagtgatgatgaaaccgaagatgaagatctaccagagtttccggaattcagtaagaagctagccgatgccatcgaaaagctgggaggatcggcattcgtaaaaagtgactggcactgtcccaaggatgcccagtggatcacgctgggacagtcgctttgcgtgaaagacatcacagacgtgtaccagctgctgaaggcgtccagcttttgcaaggaagattttggtgaaaggtcgcccgccaataccagtggatatcacatcattctgaagaaatggcgcgatattcatccgggatcggagttccggtgcttcgtgaagaacaaatcgctagtcgccatttcaccgaggcattggccatcgtaccatgagcacattgcgacggaacgaagcgacatcgtcagtgatatcgtttctctgtacaaggagaaggtcaaggagagctttccgttgaaagattatgtcttcgacgtgtaccgtccggcaaaggatcaagtcgttgtgttggacttttccctctacggaaagggccattcggatagtctggcctttgactacgatcagctcgattcggaagcggcaacggctaccatcgaagaggaggacgatcccgagttccgataccttccggaagactgtggcattcaacccaacaggagaaacaactatggcttcccgcaggacgttatcgacatgtttcaggtcacaacggacaggccgtccacctcgtcctcatctggggctaacggcgaaagcgacagcagtaatctcatcaaccgattgatggaagagtggcaagtgcagtccaaggaggaagacagcgacgaaaataaccagcagcagtaaatttggaaagtttaataaataagaacatgcaaaacatgattgaaaagctatatttccgagaatttaatatatcac

SEQ ID NO: 1257 - DNA, 754 bp, Aedes aegypti
gtcagtaacacgtgtcagacgttacgcctcccaaatgtaacggtttctacttgactgacagctgtcggcgagcgatcttctttatcggcatgcagctcccttttgtgttccgcggtagtttgtttacgctgcggaagcaaaatacactaaactgcgataattttataagttttaaagttaaattactgtcccgttcacttgtgagtcgatgtaaattataaagattacttggcgtgattcgttcgttgtcgtttattactgagaaatccaacgcaatgggtacgaatgctccggaggaaaacttcgatcagggagagtttgacgaggacgacttgggagaggtccagatcgaggccactgccgggcggaaacgtttgttcagcaaagagttgcgatgcatgatgtatggtttcggggatgatcagaatccctacacggagagtgtggatctgctggaggatttggtcattgaattcattaccgaaatgacccaccgggcgatggagattggacggaccgggcgcgttcaggtcgaagacattatcttcctggtgcggaaggacgcacggaagtattccagggtgaaggatctgctgacgatgaacgaggaactgaaacgggctaggaaggccttcgacgaaatcaaatatgttggcgcggaagcgaagatcaaggagaagtgaatgtgaattttgggcgagtttcttcaaataaatgacaagccgacaaatggcgaggttctgcataatatatt

SEQ ID NO: 1258 - DNA, 2255 bp, Aedes aegypti
atggaggtgtacgagttcgagaaatcgttgctgacccggctgcaggaaacgtcggatgtgttgtgtgctcggggaatcgccctgccggcatcggaggtgcgaaccgagtgggccaactatgtcgagatggccatcgaaccgacggggtggcaagcgcagtggcgcattccgcgcgttatgtgcgaagagctgtcgctcaagtttcccaccctggtggtcggaacggtggaacaggttctgttcgatgaactgaaggcgattctggttgtggaagcggtccaggacgatgatgtgcatatgccggaacggcaggtggtagccctggaagaactgtggcctctgaaggagcaggagaacgatgcgttgaatgtggaccggacggcggattgtttggaccggttgagatttttttatcagcatgtttggatgccttgggacaacgacgaggacgatgatggaagcgactgggccgagaaaaatctgtacgatagggtgaagttctactacgatgtgaagaagcgggtcatgtccaaacgcttggtttcccacgtgatggctttgctggccgaagccaattacgtgcaaaagaagcgagaactcctcgagatggaagtggacgaagaggacgaaaacgattccgagggggaagtggaacacgagaacaaaagggccaataagctggtcgagctgcatctgcggctgaatgttatcaaaaacgagatgaagatcctggaggacccaaccctgagggatgccttcgaaaaggtgcgtttcggatccccagacgagaagcaatccagcgaagaggcctcgattgtggtccacacgggtaccctagaccagcacattaattatctcaccacggccaaatccatcgtcggatctagcaaaaccgttagaatctgcgattcgctacaaggggctctggataaatgcgcagcctcgaatgagctctatcttccccctggcaagcatccgattaagttcctcgagtatctgaatgggggtggactgctaaaagcagtgacctccgttcgatttgtaaatgcctgccaggcaggacagcttcagcagctggtcaaagatgcggcgatgatctgctccaaggacgatgacagcgtgcttctgaatgtggatggcgactactgcttcgagaacgtcatgctggactgcgtcaatgtgcggaccggtgtcctcgtcaagcaaggaaacgttacttttaggaattgctacctgatgggtgacgcggaatccagcaccaagcaaggaattgtggttttcggcaactctcgaataactcttcagaactgtgtgctgaaggacttttcgactggtatatatgctaatgaaaactgccaaatctgtctcaaagacagtgtcattctggagtgcactcggggtgtcgaaatcctgtctggaggaaatgtccgattccagtcatcggaagttcgtaattgtaaatcgtacggagttcttctggaagtggatgaccttaatacctcgcaggacagcgaacagacccgacaagtgtgcaatgattacaacgaaatcggtcgaagtgagctaagcttcgaaggcagctgcagtttccgagataatggcaaggctaatttcatcatttccaagaccggaagcgctaaattcaacaactcgtgttttgtggaacaagcaacgccgtcgaatgtaagtaatcgcatatgcaataatgaatcggatagagcatttgagactgtaccggatgggcacctaatcgactacaaaggacaattggacaacgtggggaaactactgtggggagggaaccagactaatgggaatgggttcgaccataatgacatcagcaccgctagcagtaccgacaacgacgggaccgatctctactcgactgtgaacgatagatcagagtgtacaacaaccagcggtacttcaagctgttcggcagcgttcgaaaccagtgccgtcatagaaattgaggagtccgttattgaaattgattgaggggttgtgcttgttttgaggagaataataaataccggtaattaattgtgcatttgaatgatttgggttcttacgaataacaacttgtatgtgacagacaacgagaacgactttaaaagaaaaagtgtttactgcatgtacagtaataaatgtttgaccagactttgaccagaacttatcgacaaataactgacatacttaaatcaaacattaggaaaatagataattcagcaattatgtaggaacagaattaccat

SEQ ID NO: 1259 - DNA, 4573 bp, Aedes aegypti
atggcaaacattcccaagaaagaacattcagaagaagctgaaaatgctatttcagtgttgcgggccctagttttgtccaaaaagggtccatctactgtgcacggcattttggcagactatcgagaattggaaggcgggcctctgatgtacaaaaagttcggatatcccaatgcagatgagttcctaaaatccaccggagaatttgtcgttcagagcaggatgggtgagactgtgatttttgtcaaacccagtaaagaatcagcacatattctgaaaatggtcgcggctcagaaaaccacaaagaccagaaagtcagggttttctacgatgcgacaacctcagaaacgaacaggaggcaataattggaatcccagtgcgtacaacaaaatgtactctcagatgccgaacaaagcaactcaattcggtcagaggaaatatcccccgttatcacagaataactatcagcgatacacgaacaatcctctcaagccatttttccagaatactccccccactggtggtggatggacgaacaacaatcgttacaatattcaaaacaccaatggaaaccaacctaaacctccaatgacaatcaaagttgcaacaacgtcagcaccaaactccaaacctttcggaaacaatgtcccacaaactacgaacaaccaacgacagattcgcatcgaaactaacaataacaactcgactttcaagaatttcaataaatcgagtccagattctgccaagacatctcaaattacgctaacgtcgaatgatctacgacacataatcaacgatcgatcgccgcaaacaccacaaagacaatcttcacaattcgagttgaagagtcaagagtcacagtttgctcctcgatcatccgattatcgtaatgatcaaagcttatcttctcctacaaaggccacagccaaagacattcaacagatgacgctacccgacccgagcaataagcagccacacgttctacctccgccttttgttgcgcaaccacaagaccaccggagtgtaaattccagactacaagtatcaaaagacgtgatgcctacatcgcctcctgtccaaaaaatggtacagaaagtgtatcccttgcgtgatatgacgacgaatttcgacgattcggtaagggtgccaataccggtgacgctccccacgattccagggcagaaaacgctacaagatcgcctgaagattaaacagcaaattgacagctcagatttggaaaaagctgccagagtgatcactgtgcatactccggctaacaatgcgagtgatattgaacccaagtccccgacatccaacccagtaacaccagttgcaacaacacaaacagcccgctcgaaagaaccattttcttggaatcaaccgacggctacaccgatagagctgttgtacagatatgccaagtgtaacgatcttgatcgtccaatttacacgtactacaaactgaggaacaagcgcatacagtgtcgcgtgatggtaaacgaatcaacatactctacatatcccgatgattttgccaatgaatttgaaggacaattcgccgcagcccaaatcgctatcgagaacataaaacgtgacgaagaaagaaacaactactccgtttgtctcgattcagattacgagatcgctgtcaaaattcacgaactcttgactcagtgtccacacggcatgttcagcaagaatattccggaagcattcagacaagcgcaccagctattgcttccggatcactgggaacttatcattatgtcccagtattcgcatatgttttccaaagaagacgctcaagaaaatacaatcctgtttgcaaatcctcatgtggaaaatgattcctcaaattcttcgccttcgattacgtctgaggcaaagtgcatgacggcaaatgttctcaaactaccttggaatgaccagtactggaacttgtacataacgaatccagtttcaacagtggaaatatgggcacggctagtcggctctgaatacagcgacaaaatggatggactcataacggatattgagctaagtatgatgggaaacgataaaccgaaacccagtattgtcagaaatggagagtattacttggtacagacccccgatagttggcatcgagtgcgtgtagatgaaattgactacagcaacaatcagggagtctgctttttcatcgaccttggcgaatgggaacgtgtatcactggatgaaatctatgtgtgcgatgccaaatatttggaacttgctggacaatctgtatgctttagtcttgatggtcttgaagatttcggagagaatccgaaagccaagccacatctggacaacctgattagcggcaaagtgtgcattggcgaaattctcacgccccgaaatgagtatgaaaaagataatgagctcaacagtgtcggagatgtccgaattaaaatgattttgtacgatacatcatccgatgaagacgtcaatttgaatccggttattctaaagcacatttgtgatgatactcctacaccggaattgaacaaaaaaggtgttaccaccgtggtcgtcacacacgttgatgattctggggatgtgtattgccagctgaaagacgatgcaatggtctacatacagaaactgatcaacaatctggttaaatcaaatgccttggaaggaaaccatcgtggtttgtacaaaggtaaatcgtctgcacatcagctgtacttggtgaacgatgaaaaggacaacaaatggtacagagcgtctttggaagccgaagagtccggacctttctgtcgaatgctgtatgtcgatagaggattgaaaacgtcggtaaatgtttcgaacatttatcgactagaaatgctaagtgtagctttgagccgttatccagcacaagccattaggctgcgaatgttcgacatccctgaaatcaccgactacctgttgtctcggatgcgcgttcttctgaaaccaggtctgactgctatggtaaaggtggccgctctgtcggtaattcctttggtgaaactttacgtgcatcttgagcaaacgaatatactggtttgtattaacgatagcattcgatcagaaatggaacttgaaataagttccgaaataatcagcaatccacggattacatccaatgagctcagcagtaacacatccaatgccagttcgatcaagttgaacacaagtttcgcttccgattattcaatcggtagcaacgaagcggctgaactttctagaagctttagtggactgaacattgaacagaggaagctaagtagtcctgttccatcgcaagtgacgcctaagctagcaaagtttcctttgcccggaatcaaggagctgttttatgtgtctgtgacgatagcatccagtccgaaatatttcattgtgcagccatactcacatgctgtgcaattgaatcgaatgatgttagagctacaagaatattgtaaaacaaaagcaagtcgcgttccgaaagacagcgttgaacagggagaagtttatgctggtatcaagagcgatgacggacactggtacagagttattgctgtgaacatcctaagtggaactggattgatccacgtatatttctgtgatttcggacagattagtgtcgtagatagcgaatcactgcgaatcctacctgctcatttgcgtacactcccgcaacaagctgtaaaagcccgactgcacggtgttcaaccagtacatggtgactggacgacggaggacgccgtacgatttcagcaactgaccgttgataagaaatttgccagctacatccataacattacaactgacgaattcagcccgaatgaagaaattgtcgatttgatgttgattgacgtttcgactgaagaggatatttttatacaccaaattttggtagatgagaaccgagctgttttgatcagcaagtagcagacgcaagtaatctggcggtgttcaaaatacagagtcaacatcgtaatgtcctaacgttttgcctcaacgagctagggaaactttgcaatatgggtgctcagaatacaaggagatcatcatcatacagacaaggcagcgctgctatgaaaacgacagatcaacaaacttgatcaaagaggagtttgccaaaagtaactcaaatacaagggatgccggatgcgcctggatttaggagtattgcatctgaagatgtacgtgatcttctatcaccagttaaacaactgtgccttaagtattttcctgcgataaggaaaactcgcatgaaaggtttatacagtgttttttatattaaattatatgccttagcaattgttatttctatctattggtctataatacgtatttatacagttcacctgatccggcaaaataatcattccattaaataataatagaagaaaaatatattaaatttatcaaatcataaacaatcaatcacaagggactgtttccaaaacgaatgacttatctcagaattgccaagttgttttataaacgaaatgactatatttaaaatgtaccttagagcaaaatcaaaattgataactgaatgtgatgaaataaatattaaaggcctcgtttaatacatattgtt

SEQ ID NO: 1260 - DNA, 4066 bp, Aedes aegypti
tggcagtttgctactgctcagtccagtcatcagaagagagttgtcgctgacgttgtgaggttgtgcttctctttagaagatcgcacaaccattcacatttttgtgcaaaaaaaataattagaaaaatcacaaaaaaaaattaaaaaacaagaaaaccccaaaaaaatcgaaaaaagtgaaaaagctaagcaaattgcaagaaaaactagctacgtgtgcgaaggactggaaatattttaattttcaatcggtgaagtggcaaggcgagaagtgaaagtgtgttggatcaaaagcgtataaacccaggtggtcccaactatcaaatggcgtcattatatgtaggtgatctccacgcagacatcacagaggcaattctgttcgagaaattctcatcggctggcccggttctttccatccgtgtctgtcgtgacgtggtcactcgtcgttccctcggatatgcgtacgttaacttccagcagccagcggacgctgagcgtgcgttggataccatgaatttcgatttgatcaaaggacgcccaattcgcatcatgtggtcgcagcgtgatccttcccttcgtaaatccggtgttggcaacgtgttcatcaaaaacctggataagaacatcgataacaaggcaatgtacgacacgttctccgcgtttggcaacattctcagctgtaaggtcgctcaggacgagaaaggtaattcaaagggatacggatttgttcattttgaaaccgaagaatcagctaacacttcgatcgaaaaagtcaacggtatgttgctcaacggcaaaaaggtttacgttggccgcttcatcccacgcaaggagcgtgagaaggagttgggagagaaggctaagcttttcactaacgtgtatgtcaagaactttggggatgagttgaatgatgaaaccctgaaagagatgtttgaaaaatacggaacgatcaccagccatcgggttatgattaaggatggtaagagtcgtggtttcggtttcgtcgctttcgaaaatcctgaatcggcagaacatgctgtccaagaattgaacggaaaggaactcggagagggtaaaattttgtatgttggacgcgctcagaagaagaatgaacgtcaaatggaactgaagcgtcgttttgaacaactgaagatggaacgtctaactcgttaccaaggagtcaatctgtatgtcaaaaacttggatgattctattgacgatgagcgtctacgtaaggagttctctcctttcggtactataacatctgccaaagtgatgttagaagaagggcgttcaaagggcttcggtttcgtttgtttctcagcagcagaggaagctacaaaagctgttactgagatgaatggacgaatcgttggaagcaaaccgctatatgttgcccttgcacagcgcaaggaagatcgcaaagcacatttagcttcgcagtacatgcaacgtatggccaatatgcgtatgcaacatatgggacaaatcttccaaccgggtggtaatggtggatattatgtaccaacacttccacagccacaaagattcttttcgaagcaggtcagccaaatccgtactactccaggatggttccgcgccaatacgaatcaaaatgcagttgcagcaaatgcagcgggaggtgcttatccagctatggctgctgccactgctggtaatcaataccgccaagcagcaaacgtccgtgcaaatcaaccagctccgaatgctcaagcagctcaagctgctaatgctgcagctatgcgtaactctgctcgtccaatcactggtcagcaggctggcggcaatatgcaagcgcgtcctgttgctcctcagatggctgcaaatcaagctcgagctgcaaactacaagtacacacagaacatgcgcaatccgcctgcccaagctgttcctatggcagctcaacctgttgcccaacaagctgtccacgtaaaaggacaagaaccactcacggcctctatgctggcagctgcacaacccgctgaacaaaagcagatgttgggagaacgtctgttcccgttaatcgagccattgtatccaacgattgctggtaaaattaccggcatgttgttggagatcgacaactcggagttggtccatatgttggagcatagcgaatcgctgaaggctaaggtcgatgaagccgttgccgtactgcacgctcatcagcagaaaactcaacagcagtaagtgcattagatcctgctaggtgcacaattactgaacctaataagagcaagcacgtcaaatattactttgaatattctctcgtatagaactttccggaaaaaatcaattttactcttcgacaatgaaacttagaaaatgaaaaatggtcaacttgaaatagaggcgatggcctgttaattgtttacaaacagattgacattgaaaatgtatttcggtgaaatgatacttcctattcaattcaatatattaaatttcgccttttgagccaattttgtatctgcgttcctacagttggccatctgcctgaaccgtaattgaatcatttcaatggataataaaataaacattcgtttttttcgcactgagaacaattttgccttcaattaacaacagtagcttgtatgcttaagcatactaattgagctttccagcttagttataatgtcttctgaatcatatttttttcggttttggtaacaaaataatcaagtgaactatataataaaaataataattaaaaaaaaacaaaaaaatagaaaatattcataaaataataaaaagaaacataattataaaaatacatgtatgcagaaaatatacaaaaaaacagtaaaatttttgttagcttttggtagtacattgcgatgcatatgttttcgcgtgtacttcttgcgataaatagatgtgcattcgtactactgaagcaatacttacatgaaacaaaaaattagaaatacaattatgtttgaatataaaaaatgaaaaaaaaaaatcaatagagagggctgcagacacaaacaaaaaagaaacatacgacacacattttatgatcacaacagatgcgacagtcttcagaaaaaataacagtgaacaagaaaaaaaaacatctgaaaatcacaaaaaaactgcaaaaatacaaaagaaaaaaatgaaaaatgtacgatcaataaataaacttagatcggagttaaaaacaattagatactgtcataattcaatacgcatttcgttaatgtgctaatcacgatcttaaaaaatgcggtgaatacgttaatttttttctttcagatggctgttcagctagcctaatcaaacatggatgattaaatactaacatatttcatgtaatgccgtgtgagtcaatatctttcgatcacgacgtatctttgttttcactaagattctgaatagatacataaatagcgaatgaaacacaatatatggcatgtaactcaacatctgtcttcgctatatgtgtaatgtaaaattatttacatttaaaacgtggattacaatcgggaacatttggctaaagcgacaagtcatcatctaaatatttaaacttagctcaatggtttgaaagtaatatgcagtttaatattttttttattgttggtcatttgactatgcaccacaaaacaacactatcaaaaactgaatgccgcacctaatcagacagtcgtttattttttccctctctttgaaaattgtgtgcatgtcaacgttgaatagttatgtctacttagtatacaattaaaaccgttctttcttatgacaatgcctgtttgagcaacacgttgaataaaagtttcaaaacactgacatggaaatggaaacaaaacacaaggcatacaattaactatcgattaatgcggtgcagaatcctatataacatctttgattcccatcttgatagttttgcgctatttgacacgttgaagaatatctacatataatattggaagaaaatattgtagcatatgcgtataaatagtataaattataatacaagcattcttaattttcagttttacgtttggcaaaattcaataaacttcactttcgtaactattgta

SEQ ID NO: 1261 - DNA, 177 bp, Aedes aegypti
atgttgtggctgctgaataaagtatcaggccacgtgtcaccaagcccgactgggtcatcaaatcaattaatggcatacaagaccagtttgggaaacaataatgcttgcgattatattgatttgaacgaattgttgaatttggatggcagtaatgaggggcagtcgacattgaactaa

SEQ ID NO: 1262 - DNA, 2675 bp, Aedes aegypti
tagtgctgtcagatgaagagacgaaaacgcattcgagttttgtttttctccgtcatcgaatgtgaatcgaagaaaaaaaagtgtccgacgagatagtagtgaaatttttcctaattttccatctgtaaaaccgaaaaattgtgatgcatactttcaccgaaacgggggcgggcgttccggccttcctggcgaagctctggagactggtggaagatcccgaaacgaacgatttgatctcctggagtacggatgggagaagcttcatcatacagaaccaggcacagtttgccaaggaattactaccacttaattacaaacacaacaatatggcaagcttcatacgacaattaaatatgtatgggttccacaaaataacgtccatagacaatggtggcctacggtttgacaaggatgaaatggaattcactcatccctgctttcaaaaagatcatccttatcttttggaacatatcaagcgaaaaatagcaaactcgaagcaacaacagcaggacgataaaagtggtctcaaggtggaggctatgaaccgtgtattgacggagatgaagcaaatgcgaggccggcaggagtctttggatacgcgcttctcctctatgaagcaggaaaatgaagccttgtggagagaaattgcaattctccggcagaaacacttgaagcaacaacagattgtgaataagttaatccaattcttggttactattgtacaaccatctcgaagtgggcttggctcgatgggcaacggaaacaacaaacgccgattccagcttatgatcaatgatgcacctgaatcaaaacacaagaaaaccgagggtagcgaaggtgcctccatacaggaattaggtgaagctctcgaggcgtatggaaatgaacaggagttgctgtcgcaggataagagtaagaaagtaaaactcacaactagtggtagcattaaaaaggaaaaatcgcaaaaaacgaagagttctgacagggcatccgaaatacctgaagtaacgtcaccaatatctatgacgcaacagtcgccgtatcacagcgccaatgaaattatagaagaggcgcagtacagtccacagtttgccacaggtaatatcaaacaggaagcttttgatctatcatcaggcgttacagatcactcagagcagatagtcagtgatgttgttgaagatgatcagatcgatggcgagtatgacgatgaaggatatcttgttgatcatgttgacgagatcaatccaaacactatgcagtttttcgatgactcagatatgctaaacactccaatggtcatcaaagaaatgcaaaagcaggaacaactcaaacaagagcaacagcccatgatacaacaaaaagcgaccaataaaggagaaagtttgctcaagaacagaaaaagtagcgttacaaacaaggatcaaaaaagtctgctgaatagcaacaaaatagcgtattccgcacttccgggtagtagtgctactgttgtcaaatccggtaaaaatatgatttcccctggaaagcaagtgtctatgaataaacctgtgaccataaacgccggtccttcgggaacaaataattttgttcccagtgcaaaaccatccacctcaatggcctatggagtcgaagatttcaatgttggagaagttccaacagatatattcgatgatgacagcaacgtccaaaaggaatctccaatgatagggggcttcaacttcgaaagcggattttataaccctaacgttaacattaacgaaatgaaaggaaaacagttgctacaacctgcacaaccacaacttcagcaacagcaacaaaatcttcaagcgaatgtctcgaaccaagcagctggaacggatgagcatgatgagtcatcaaatactggtgcaatggctaaatttatcagtaacaatgcagatttgaacaggctcagttcattgacggattacggtcaacacattgataccgtccaaacagatttggattctctgaaagatcttctcaaaggagataactatcaatttgatgctaataccttacttggggcggctggtggaagtggaccacagtatggcagagtatattttgcaccagcctcattcgaaaccgacgctttaaataagctttttagttctaatgacgatattatgggaatggactttcccatgaacttgcctgatatggcagattcgcagcgaaaggctgtcgatggtacgattgcagcacctgtcactaacagtaatgaaaccaataacccatcgggtaagttttttgattcgagtttttatctataatgaatacgatgacgaatataggtgtacggtgtatcaaataaagttgaaaacgaacacaatagttatattggaagatatttttgctttaaacataacgatgaatgttgaccaatgatctgtattgaaagatatctgatagtatgctgcgtgtattgtattgaaatgagatcagaaataataactatggccaggtgatcatttcagaaactacatgtcaaatggtcctatctgcaaaagcgaaactcttggttatgtactctttagattattacgatgttacaatagtctttctggcatggcaatctgaaaaaaatatgtctgaatttgttgaaaaaacatgtgctcgccgaaagaaatcgtacttaaggtgaagatgaatcgaag

SEQ ID NO: 1263 - DNA, 5512 bp, Aedes aegypti
cttccagggaccggaaataccaataccgatggatcctacaagccttcgtttcttacggaccaggagctcaagcacctgattctggaagctgcagacggatttctgtttgtggctggctgtgatacgggtcgtataatctacgtgtccgactcggtgacaccggtgctgaactacacccaaaacgagtggtacagtggaagtttcttcgaccacatccacccggatgacatcgagaaggttcgggagcagctctcgacgcaggaaccatccaacagcggccgaatattggatctcaagacgggcacggtcaagaaggaaggacatcaatcatcaatgagattatgcatgggttcgaggcgaggtttcatctgtcggatgcgaatcggtccactgacgccggaatcgatggccctgggtcatctgaaccggttacgacggaaaaactcgctaggtccctctccggacggtcacaactacgcggtcatgcactgtaccggctacatcaagaactggcctccaactgatatgtttccaggtgtgacgatcgatcggggccaagacgacgacctgcacaacacccactgctgcctggtggcgatagcgcggcttcagattacctcctctacgacggccaacgacctgaacgccaacaacccgaacgaattcatctcgcggcacgccatgtgcgggaagttcacgtttgtggaccaacgggtgatcggggtgctcggctaccaaccggtggacctgctgaacaagagctgctacgactttttccacccggacgacatcgcgcacatgaaggagaacttcgaacaggtgctgaagcaaaagggacagatgttttcggtgatgtaccggttccgggcgaaaaacaaggaatgggtgtggatgagaacgcaagcgtacgcctttctgaatccctacacggacgacattgagtacgtggtgtgtaccaacagttcggcaaaatccctccactcgacgcacgacgccgtgggggcggccgatccggccgacacgcccgtatcctaccaggctccaggactggactactcgatgccaagccggcgcgaaacgacaccctctagtagtatatacaatcctcacaacttgatttcacacttgccatcacaacaaccgccatcagcagcgacagccgcggccgccgtggtagccaatgcctcgatccaacggcccgacagtgcgcacaacccggtgcaatatagctataatccaacgccttctcctatccaatacggttctcctggaacgcccggggcatccggttcgctgggacacatctccaaaacaaacaacacctcgccaacgcctgcagcgaccgcatggtcactccgacagccccaacccgttaccgaaggttaccagtacagtgagctgagcccgaatcgatcaccgacaggacccacgtacacgcagcttagcgcaaccggttcccggcaaacgtcgacatacacgccatcttcggcgcaacctggctcgggtatctggaccggatggcaggcgcatcacccggcagccccggaaccaatgcagaccagcagtagtagcgcaagtggggccggcggtggaggtggcagcagtagcaatagttctgccagcaccgcccctccgcacttatcgcaacaggacatcccgcctgagcatgctcaacacatgcaacagcatcatccggctctgcagcatggccacggtccgcatcagcagcaccacgggcaccatccaggacatccgcagcaccatccccatcatccgcaccatgcggtagcggcagcgcatcaggttcatcacccgggtcatcatccggggcagcaccacccagggcagggccacgaactgtccgatatgctgcagatgctggaccagagcggggccacctcgtttgaagatctgaacatccacatgttcaacacgccattcgaatgaaatttgttgtactatggttataacaactataaccagacggcagcggcggcggcatcctatcacagtgggagcggaagcggaagtggactaggcaatggaacggggatcagcggcggcggagcaggagggtttgttgggggactcaccaatgggaaccatggggtcactgcaacggctgctgccggcggtttggccggctttgggggctacatcaatgaacaaatgtaaatagttctgtggactctttttgttcggttttctccacgaaattatacatagtagctaaaatggcggcgattggaagagctttaatttattgtttaaaattaaaccagataattactaacacacgctcaatagatgtcccctttttcagaaatagaacttttatctcacacttttattcaactcattgccgtgattttcgtaacgtctctctctacaacaaagatctgccaatcgaccacggaacaaccggagcaaataaaaaaaaagacgctgactattttggagagggcaaatctaatttaaattttttaaacattcatccaggactttttgaggttcatagaagatagaagcaaaatcaaaatcaacgaagaaaaaacagatgtttaaggctattattagaagtataagagatggagcaaggggcgaaacaagcgatggaaaacgagttaaggaaacgtatatagctgtaattgtatttgttttatcgttaggctttccttttcacgtttttcgagcgcaaacaaaaaacaggtaaagtcgatttttagtactttttaaataagtataaacagaattttgattataagctttcctagacccggaagattaaaatttaaaatgatgcattcaaaagcggcaaacattgtgttcaattacaagcaaagcttacaaacaatagtcacagacatttctttttcgttttcaaacgaatttcgatcaggagcccctaacattgttctcatccaaagttcacatcaagcagaaggaaattagaaacattttcactagtttattgtcttgataattttgtgggaacaaaggtgtggccgtagccccaaaagtttcacgctaaaacgatcacacagccactgcactagagtgcggctttcctttcgaaaattctcaaaactaaaagttcgtgttctcttctgaatgcacatcccatcagaagaaatacatcaaagctttggccatgaatattaatcaatttgtaagttataaaatatgacttttagtagattattttccatcaatttatatctacaacatcatttattttttcaaatttaagtttatgacaagtttgtagaatatcatatttgtcaacctgattgtttttgaaaataattcgattgcttttgtacagctctgagatttctaatctttgtcttagttatttaacaacaactactaaaaacacgattttttttttctatgacacgttttccagatgtttaagcgttaataccaaagctgattttgtttattctcattgtcaatcttttgaggtgttagcaaaagtttttatttaattgtaaaacatttttgcatttaaaaaaggcattattcaacttgtagccttgggtttggttgagtattcataaagttataaaaacactaaaaataagttggaaaataacaatgctatgaaaatttcacttgaggtcatattttataacttgaatattcaccttcaagacacttgcaccatatctaaattatctttagttcaaactttaacatttatctttagatgtgatttgaatacagaagaccacaatgttttacgattttttgaaaaataaaccgcaccttagtgtaagtttacttaaacgactgaagtcttggtttagtctacagcattttcagaagacagaaaactagtgaaaaggttgtatcaccattttacttttcagcaacacttgtgcccatgtttaattagataaaaaatcacaagaacaaagcaatgttcatagcttgcataagaattattattacatgtattagtataaaatttgttaacacatactttcgtctcaattccactcagcatcatcattaggtatcaaaaaaaaaatcagtcatgaatcttgctagtttgaatggggattggagcgaacaactggaacttgcttgattcaaacaaattgtataaagatagtaagagagaagtagcagaaaatgatcaaactccattttgcattacacaaaaaaaaccctatatcattaaagtaaagtcaagacaaaattcctattgagtatggcatccggcaggcgaaacaagttttttgaataaaaaaaaatcgaaaggaagcagttcagcattcgttatctaaactgtaagaaattattactctttaagctcagcaaacaaggcatacccgtgaattgctaggtctaaacgctaaagtataagtcttgaaattttattaaaaaagaaacgaaaaaaaaaacagcgattcatcgggagctagggataaattgagaaactaaaacaatttaattttggatgaccgcttagattatgtaaccgtaggcttaatgaacaaccattaacttaatttaattatgaaaagagaaagagagagatagagagtgttgtataaatctagagacgctgaatgattcctaacaattgattatattttcatcccacgatcgaaatagttacagcaatagaacataggttggaccattatcttcctctacattttaggaacgcaacaatactgcaacaacgccatctgttttatcgtttgattgtttttttttttttttttggtaggattattttaaacgtacatttcctattatacatataaagaaaagcttgcatatgcaacctgaattgactgttttcattacaagtcggaagcagctgacggaagcgcctttgttgaaatcaacacggcgctctcacgaattattcctagttattcaacccaacacacaattactgtaaagcatttaatttagttaaacaaaacaggcaaatccgacggaaagcagcccacaaccgaataatttatttgtaaagtagataaattgattctaatgtcttttgttttcttcagacaatgagaatcgtccacacggtccgctttccttcaatcgagaagagttatgggactatgtggaatgataccagagaaagtggtttcttcctgaatatgaaagcaaagaaaagcatgaatatatttttttcgacaagcaattcaagtcttcagtaaaaaaaaacaaccacacgcatacactcacaaacaagacccgaaatggattatttttttgtgatttttacaactgcttgactgtgtgaagaagggaaataagcatcatgttcgcagttttatcaactgaaggcagattgtgcgaatgattgggaaatgaagaatagaaatgaaagtaaacgaaaaacttagctatccatttgtataaaaagaagaaaaaaatcaccagattgtataagcgacagaaatgtactctttttgaaatatgggaaaagaagaaaagatatcaaaaataaaaacgatataacgtttaataaaaatcataa

SEQ ID NO: 1264 - DNA, 4043 bp, Aedes aegypti
aagaagtgtggcaaaaacgcgtgtgttcagcttcggaaatcgctgatttttgtgcagattttctctatcgcggccactcggtgaaagtgcccccaaaacggtaccctggtcgattccggtgcgctcgtggagacagtgattgtggttgtgcaggtggaactcggttctgattgcctgtagagtgccggaggatttttctttttttcgttttcctcggtcggtgtccgtcttcttttttttttctttgattcttttgttcccgttttcctcctccttccccgttgattcgcacggatttttcggttccggaatcgttttttctgtgtgcgaggaggaaaggtttgcgttttgtttccttcctttcggttccggattgagaagaacaagaagaaaagttaacaccgcccaagtggaggtttgaatttctggtgtgcaaaagaagaaacccagcaggaaagatgtctcagcaaaacgattccaacgagatcagcaccaagttctccaagctgaatgtgaacgcgatggaatttgtgccgagttttgccagctcgacaacttcggcaccagtggtggcgccggcagcggtaactgtagttccaacggccggatctccgaccacggccggttccccaacgggggcacccaccaccacaacaggcaccgcttcctcgtccggcggaggaaacacaccgacttccgccggggcaacgccgacgccaccctcgagcagtgccgccccgacgccgatggacgtcaaagggggagacgaggaagccaaaaccccggagaataatgaaagtgaaccactggacagttgggacgctgaagaggattccatcctgacgcccgaagatgaggagatggaattggacgacggtgaagtggacggcgacagtgtggcaaaggtgtccaaaaagaagcccccaaaggtggaggaaagcaagagcaagaaggagcatgtgaatgtggttttcattggacacgttgatgccggtaaatccacaatcggtggccagatcatgtccctgaccggaatggtcgacaagcgaacactggagaagtacgaacgagaggcacgtgaaaaatcccgagaaagctggtacttgtcgtgggcgctcgatacaaatcaggaagaacgagacaaaggtaaaacggtggaggtgggtcgtgcctattttgagactgagaaaaagcatttcaccatcctggacgcgccgggccacaagagtttcgtgccgaacatgatcggtggagcggcgcaggccgatctcgctgtgctggtcatttccgcgcgaaagggcgaattcgaaaccgggttcgatcggggagggcagacgcgagagcatgcaatgttggcgaagacggctggcgtcaagcacctggtagtgctggtcaacaaaatggacgatccgacggtgaactgggacgttgagcggtacaacgaatgtaaagacaaaatcttaccatacctcaaaaagctaggattcaacccaaccaaggatctgacgttcatgccgtgctccggcatcaccggcatgggaatcaaggaacagatcagtgaatccgtctgcccgtggtaccgagggccagccttcattccattcatcgacgagctgccttcgctgaaccgcaacacgggcggtcccttcatcatgccgatcgtggacaagtacaaggacatgggtacggtcctgatgggcaaggtggaatcgggaatggccaagaagggaatcaatctgctggtgatgcctaatagaacgcaagtgtcggttgatcaactgtggtctgatgatgaggaagttaccgccgtggggcctggcgaaaatgtgaagatcaaagtgaaaggcatcgaagaggaagacgtgtcgcccggatttgtgctgtgcgatgcttccaacccaatcaaaaccggcaaggtcttcgacgcgcaagtagttatcctagaacacaaatcaattatctgtgcaggttactcggcggtgatgcacatacactgtgcggcggaggaaattactgttaaggctctcatttgcttagtggataagaagacaggcgagaaatcaaagacccggccacgtttcgtcaagcaggaccaggtggccatcatgagaattgagtgctccgggctgatctgtctcgagcaatttaaactattcccacagatgggacgcttcacgttgcgagatgaaaacaaaaccatcgccatcggtaaagttttgaaggttattgaataaataagtttttaaatcagtacacagacatagttacgaaaagaaacaacaacgctatctcgtcctctgccgtaaggaacttgtcccctcagacagcgaaacaagaaaagaaacccactcttactaacaatctgcaaacaaatgaaggcatcaagccggacactgctttggccattcatcttcccgatgtggttgatgaaagctattaatcgtgtgtccatccattgttatgtttattcctatcaagaaaaaaaaacgaatcgtatccactaggaggtaaatcttttcggtattgcttcgaaagcagaacaatgttaaagatcatggattctttcattgccgggaaactcaacccctctaagtccccgaatagtgaaaccaattttcgttccttgtagagcacgtcgcgcgtaaaagcaaaccaagatgaaacaaaacttaagagaaaatcaagacacaaacataccacataggaaatgcttatgataacaatcatttgtaaaagaagaactaattgaaaataaaaaaaaataatcgcggaagcggaggactgaacttatatacaataagcgaaacacaagaaaattaaaacaaacacacacacagtaaactaaaacaaaggaaacgatgataaaagaaacaagaaaaaatgaacatcatacgcatcaggaacaataatcttaatgataacacgttattgtatagaggaaaaatccaaggcgagcaggtgaaccgtcatcgaggaagtttcttccttctggtgttctgtcctcggacgggtctatctctccgagagcacggacagcgatgcgcacctacagacataccaatggtcgaggcaaacacaaatcttactaagaaatccaaccaattgttacttttgatttgtttcatcatgtataatgcttattattatgaggtttttagctttttgtattgctaaaagaataaacaaaaaaacgagattgccgtgaaaagctggcgggcggtaatcaaattcatgtacgcagatagcatcgttatagctgagagagaaagaaagagaaattgattattagagggatacgatcgaagtcgaagttcacaggaagtaagcgacagtgacacgacggcagcaactagaagtcggatccagattgtgtatttaacgaagtgcttctcgagattttcgaacttgtgcgtgtgtgcagattgtatgttcgtagtatgaatgttgcgatatgcgcggtaccagagggcgggttttcaccatttaggattgaatatagagagagtagcagcagcttcaaatgacgccttttttattcgcctggaagcaaccggacccgggattgattgtatgcatgcacgaacgcgggtgtgattgggtaaggtatcgaaatgagaattaatttaactagagctaaatacgctaaaaaacatttacacaatttacacacataaaccgttgagggacagattaatgaagaaataaaaaataaacatgcagtagcatacaaaccgcattgagacaagatattaatccttgttctgtttcgagctagaaaggctaaaaaacgaacacacaaacaataaaattgtaatctagaaaagagagagtaaagagggttaagcgaaatgaaaatagaattgaaacggagcagatagcgaacagccaagagagagggtgaaacagcagcaaaaaacaactattctacatttaatcaaaaacaacaatggaaactcctttatctaattataattactattttcgttttttatttgtttatcttttaaagaaaagaagtaaaataaacacctctttaaaaacac

SEQ ID NO: 1265 - DNA, 1920 bp, Aedes aegypti
gaatgcagacggcgagtttgcattcgaagacgggcaacgctttttcggtattaattcgcttctgttgaatgattctacgataaatctggattgatgtgaaccacggatggtgggcatccaagagcagttgtatgttttggaagcacaaagcttgaatagagaagatacgtgtcttgaagatatagtttttgacagcacgaatagattctgtgggaatacagtgatcgtataaatgaaagcggaagtgttaagttaacagttcacggaagatatgtcgtcggacagaatacacagagcggccaaggatggtctgcttgacgtgctcaaagaggctactcgagccgagtcaaattccaaagatgccgacggtatgacaccggtgctatgggccgctttcgaaggtcgcctggaagcccttaaactactagttggaagaggaggtgatcccgacaaatccgaccaatttggaaacactgcgttgcatttagcctctgccaagggtcacatgcaatgtgtggacttcttggtacagtttggagtaaacttatacgcgttggacatcgacaaccatactgcgcaagatttagccgccattaataatcgggacaatattttgcgttatctagacgcagcagccgcaaacctagaagcagttgacaagaaaaaagtacgcgacttgaaagagagggcgaaaaagaagtccgccaaaagggcccaagagtacactgccaagcaacagaaggcagataatggaaaagatgaacaacggattagaccccaccgaccgtccaacatgttgcaaatgctgaaacacaaaatttggtccggaagtcaaggaaatttgaagagttccaataaggacaatttgaacaacaattcgaccaagtttagtgcattggttgctggtaccgtgactggatcacgaggtgctgtaaagaaacgagctgaagcatccaagttgaaacaacagatggagaatggagacagcacaaaagcaaaaaagtttcactttgcttatagattcaaaattggagaagttgagccaacgggaaagcgcagcgttcgttctatccagggtttacaaagagattcggaaattctgtacgtgggcacatacaattcatcagaggacaacagtaaacgcggcaaaattaaggatgtgttcgacgtcgattccaacgggtatgaagaagttgacgatgacagtgaaagcggtggatccagtgcaaagttcaacacgatttcacgatcagttagtcagccggacttcctgacaaacttgaatgacgatttgacaaatgacgtaatgctccaaaatagacccagtatttttaataggccatccggaaatctggctatgacgcgttcggtgtcaactgtgctggcacaattaggcaatgaaaactcagccaacgattcgtctgatgggtcaacgatagccaaacccaaaaatggacctataaaacctcgtacacagctggttatttcggattcagaaagcgaagcggacagttcggataatgacgaaaatgagtccttagcggtgctaaggtttctggcagcattcaaacttgaagactattaccctatttttcagaagaacgaaatcgatatggaaactttaatgttgctcacagaaggtgacatcaaatcattggatttacctattggtcctcatagaaggctatgtatcgcgattcaggaacgcaaagaagcactcgccagccccggaacaatattggatagccgcttgtaatagttgttgcattgccattcaagatttcaaattaattttagaagcaagaaacatacttgtaatggcagtgtacataaattgagataccgtggtcctcctgctgtacaatacaaatccttggtgtaaataatgaaataaattattctgaaattttaggaagcatg

SEQ ID NO: 1266 - DNA, 2187 bp, Aedes aegypti
ttcggtttgtctcaagttcgtcgataacgaatgaaactatgggaaccatgggaaagagaggattaaacgaccaacaagttaaaacaccaaaaaaaaacgataattacagttaaaaaatcggttttgtattagttatctgtaacctctatctctctgctatgcgtggtcatcctcttgaaaatatgctgactaactgattacgtgacgtcaccgttgatccactctatgtatgtcgagttgccggccgcggtatcgttcatatgtttgtggctagctttcgttttatgggatcaaacgttgtagttggatcacaaccttcgtcaactgcgtatctgcctgcggctagcaatatgagagttctctcatgttttttgttgacgcttgtaacgatcatcagtgataatcatgcggatgctgcgcgaattcttggagtgttcccgacaccatccaagtcgcattggattcttgggtcttcgctcttgaaggaattggcaagcgatggacatgaggtcactgatgttagtccattcaaactatcgaatccacctgcgaactaccatcacgtggaaattgcaacagatcatgaatttttcaaccagaaggtggagcaacttttttcggaaactgataaatctcaaattagcaaaatggtggaaatgtatactgcggttaactacttttctaacagtacgctatcatcacctgctgtgaagcaattgcttcgatccaatcaaaaattcgatttagttatcttggaaatcttcctcgaccatgctctgcttggctttgcagaacacttcggttgtccagtcattggcaccactactcatggagtgttagggtggattaactccctagtcggaactccgcaaccactttcgtatgttccacatgttcacatagggttttctaatccgatgaacttttggcagcgaatggctaatgtgatttttactgcgattgatgaaacgttgctatctgtgttggtatacccagaacaggaccgaatgtacagagaagcgtttcctaatgctaagcgctcgttgagtgaaatgagacgagacgcagtgtctttggttttagtgaataatcactttagtttaagttatccaagaccgtacgttccaaacatgatcgagatcggaggcttccacgttaacagaaaagtcaatccactgcctgagaatattctgaatttcatcgcaaactcaactgatggagtaatttatttttctatgggttcgaacttgaagccgtcccaaatgggtaaagagaaacagcaagacttgcttaacgcattctctaaagtgaaacaaaacgttatttggaagtgggatgacgaaagtttgaaactcgacaaaagcaagtacttcattgccaagtggcttccccaggatgatattttagcgcatcctaatgtaaaactgttcatcactcacggaggcttgctaagttgcacagagtccatccaccatggcaaaccaatcattggaatcccaattttcggggatcagcaaatgaatatggatcaagcggaaaaagcaggatggggcgttgccgtgaaatttaccgatcttaatgaagagtctattactaatgcactgaatgaagttctcaataacgacaaatacactaaaacagtacaattaatatcgaaacgattacgcgatcaaccactaccgccaatggacatggctaaatactgggtgaactatgtcctccgtcatgatggtgctgaacatctcaagtcgcctgggcaacaattttgctttatccagtatcacaacatcgatgtatatgtctttataatagctttagttgccatactaattgcattacccatcaaagtgttcagagctttgtgcagtcaaagtgcgaaacattcatctaaaattaagagcaagagtaagaaaaaaacgaattgatttgtaacgtgaatcaataatgaacaaaaataaagtggaaattccgttgcagaaaaaacacaaatagtcaaatcaactaacaagcattgaacttgaatgatgatgacaatggtctgtacccattttcttttacgaatctttttagctaaacatgttgtaatttttttcttcatatcactgcaaaagcccaaacgaaataaattttaaattacttttccgcatttcattaagtactataataagcaattctcgttgaaaccag

SEQ ID NO: 1267 - DNA, 5680 bp, Aedes aegypti
tgtatatggctgaacaaattctcatttttcattgaacaccactgtttctcatcttagtaacgtcgaaaaaagactcgttgtgaggtgttcacttcagcgtgctatttacacgatcgatcgatccgcggaccccatattgagaaacgtgacgtaagacgaaaatgtttgtgctcattttttaccacttggtcgagacccaaaaaatgccttgatctaaaaaaatgaccacgattacccaccctactggaacaaatatatgtgttagactaattctaaaagcaattccggaacgattagcactatttggaacagataaagttccagttttcttggcagcctacctactttagacgagttttcaatccgtattcgtagagtaggtttaaattcttgatccaattttacgcaatttagaattaaaaatatagattatacgaattttataatgtactctaataaagaactttattatgtcactctaattataaaacaacactataaaaggcctaactaatacaaacatttttttagaatacaattcatgcataaaatgttatgttaaatctctgaatatatcttttataataattatattttctgaactatagtgaaatattactcatcggtaaaatatttgaatttgggattgtgctatgaattattttttaatcttatcagatattgctacttccattaaactaaattccagtaagctaattgaaacatttttttgtaatattctttcgttattctgttttgctctaattctacataaaaaaaatcgaataattgtcgcacccttgtgttaaaaccaaatccttatacacatttacacatgtttccattctctttttttttgcggcttgcttacagtgccaatcaaaccgcgtggtgaagaacttctacgtgaatctctatggggttgcctattctgcgagaaaattttgtgatctacactgtacacgataatagctgtgcgggagagcaacaatccactcacataaatcatctgttggaagtaacattcagttgacggcagtaagttttctgtaaatcaatcactgcgttctattagaaatatatctgttgaattcagattgaacggaaaggatttctccgtgagcacatcgtctattcccatcgagacatcattgaacacattcattcgcaaccatgcccatctcagcgggacccagttcatgtgcttggaaggcggttgtggtgcatgtatagtaaatgtatcagggccacatccagtgagtggagaaattgtttcccatgctgttaactcgtgtttgtttccaatattcgcctgccatgggttggatatcgttaccgttgagggaatcggcgatgagcgaactgattaccatgctacgcaaaaagtgctcgcgcattttaatggtacacaatgtggatactgttctcccggcatggtcatgaacatgtacagtctgttgcagtctaaaaagggaatggtatcgatggctgaggtcgaaaattcatttggaggaaatatttgccgctgcactggctatcgacctatcttggacgcattcaaatctttggcctgtgacgctgatccaaaactgaagcaggcgtgctttgatatcgaagatctaggagaggctttttcgaaaaataataataagtgtgctggaaaatgccctgtcgatgagaaagttcatgatcgaaagtgcattcaattaagcttcccaggaaacaaggaatggtataaagtatacagcgtaagcgatgtgttcaaaatatttgaaaagatcggatcaaaaccgtatatgctgattggaggtaacactgcacatggagtatatcgtagaagtgataacttgcaaatattcatcgatgttttctccattggtgagctacgatcacacaaattggaaagcaatttgatcgttggagctaacgttacgttaacagaattcattagtatactatccgacgcctcgagtaaaaatcccagctttaattattgttccgaacttatgcaccacattgatcttattgctaatgtaccagttcgaaatactggaacgattgcgggaaatttgagtataaaacacgagcataacgactttccatctgatctatatctgattctggaaaccgttggagcaacaatgagaattatggaatgcaatggcaacatcatctgtgtaaaaccatcggaattcgtttgcatggacttgaataagaaattgattttgagcgttatcttgccacctttggaaccaaaacgtcacgtgttcaagtcttacaaaattatgccgcgagctcaaaatgctcacgcatacgtgaacggagcattcttgttaaagttcagagaggatcgcaccattgtagatgcagcagccgtatgctatggaggaataaaccctgccttcacacacgcaacagcaacggaacgctatcttgtcggacgggacgcttatgacgacaccactttgaataatgcgctaacagttctatcgaacgagcttcaaccggatagtgttttaccagatgcttctccagaataccgaaaaggcttggcagaatctctattttacaaatttattttgagcacagcgttggaaaggtccatcccgattaaaagagaacttgtttcaggaggaaccccatggcaacgtccagtatctagtggttcacagcaattcgatacgattccacaaaattggcctctaaccaagaacatcccgaaaatcgaaggactgtcacaaacttcagggaagtcccagtttgtcaatgatattccagtcatggccaatgaattgtatgcttgtttcgtgctggcaacaaaagctaatgccagaattttgaacattgacgcggatgcggcattgaacacttctggggtggtagctttctactcagctaaagatgttcccggccaaaataaagtaatgccgttcaaagatatttgtccagaaaaagaggaaatattctgcagtgacaaagtgttgtaccacggacaaccaattggagtgatagtcgctgaaactttcgaattagcaaataaagctggcaaacaagtttcagtcacctatgatgtagcagataagccttcctactgtaccatacagaacattattgagaacaatcaaaatgatcgcatcatcgagactgaccatggtttcgaaggacaaaattatcctaaatccgttgaggggccaaagaaaatatccggtcaattggatctcggtttgcaataccactattatatggaaactcaaacctgtatctgcgtaccagttgaaaacgaaatggatgtatatccatctactcaatgggtcgaccttgttcagatagcaatatcccgaatgctcaatattcccgaaaatcggctcaacatccatgttcgccgcgtaggtggttcctatggaggtaaagccagtcgctctgcatttgtagcgtgtgcttgcgctcttgctgctcatctgttaaagaggccagtacgaatggtattaactttggaggaaaatatggcagcaataggaaaacgctacgggtgttactcgcaatacgaagctagtttctgtaaccaaggaaaaattcaaaaactccataacaaatttatccatgactctggatcttcgtacaacgaaactcctttctacatcaacaattactattcaaattgttataccaacgacaattttaaaatagaggcgtctaatgcacggacagacattgctagcaatacatggctgcgagctccaggatcagtggaagctattgcaatgatcgaaactattatggagcacgtagctcacaaagtaggactagacgctttggatgtccgaatggcgaacatggctgaaggatctaagatgattgaacttctttcggaatttcggaaggatgttgggtatgatgatcgaaaggctgaggtaaaccgtttcaatgttcaaaaccgctggcgaaagcgaggaatcgccgtcattcctatgaaatatcaaatgacatacttgggagcattgcacgcaattgtttctatctaccatggagacggaacggtttccatcgctcacggtggaatcgaaatgggccaaggattgaacaccaaagccgttcaggtggcagcatatgtattgggaatcccaatggagatgataagcataaaatcaacgaacaatttggtgtcgccgaatgctgtttgtactcaggccagttacactagcgaagcagtcggatatgcaattaaaaaagcatgtgaaatactactggatagaattcgtccaattaaggacaaaaacaaagacgcatcctgggtcttcgtaatagaacaatcctaccgagaaaatataaatctcagtgcatcatacatgtacaaagaatcagagcttgaaccgtacatcatttggggacttagttgtgcagaagtcgaaattgatgtccttactggaaacttgcagataattcgtgtggatatccttgaggatactggagaaagtctaagcccgggaattgatgtcggtcaaattgaaggtgcttttgtcatggggctgggatactttttaacggaaaaaattgtgttcgatccgatcagcggagagttattaacgaatcgttcatggaactataagcctccgggagccaaagatattccgattgattttagagtaagatttctccggaatagccccaatccagcgggtgtcctgcgatcgaaaactactggtgaacccgcttctgttatgagtgtagtggtcttgtttgccatacgtaatgcgctaatgtcggcgaggaaagatgccgggattgatgcagatcagttgtgggtgtcattgggagcgcctacaacaccggaagagatttatctacttgcaggaaactcgattacgcaatataagttgaattgatagaatgaagtgcaatcttaacagttaatgaacttctgttaaaatgaaataaaaaataattgcttacatttccaactctaatcaacgttatcacattcaaaagtattattagtggttacattaggaaaacgattcgatttcaaatcttggtagtagaaagaacttcgtcttacttaacataagtgaggtcggtcatgtaatccccatcccatggtttagtagaaggtaacggagtgaaaggcctcgaaagaagaggctggacataagatgaatttaaaactgacataatctgaatatttggcaaccgtaagcccgccccttttggaagaaaaaaaggccgcctgaaagagtcggagtctgagcagatggaacagctgtgccggtgtcaagaaacgcggaagttcaccgaaagcttaccgcatcctgtaatagcattgtgccgcgagccgagttgtgaaagaataattaaaaggcctaaccgcaaagcggtgtaagtgacattttgaccggttttgagttgaatttactgtagaattctactgtttccatcctttccaacggttatttaccttgattttttcatccaacagaaaaaaaatacataattcgtaatagatttcgctgattttttggttcccatacaatgtgttatgaatgaaaaattgctaaaaaacttcaaagtcgatttcctcaaaactaggtttttgtcacttgcttctaaccctcttaattatgggagcatcttacccaacgatcgtgaggtgatcgcaagatggaagcagcacttcgataaacac

SEQ ID NO: 1268 - DNA, 303 bp, Aedes aegypti
atgaccgctaaaactaatcaatatagttcactgtgccaacgggggttcgttcacgacttttgtttactggaacttcattttccgcgcgccaaatcgaaactcccgcaacgactccgtcgcatcgcatcaaacacattcgttcatgtttcatcctcggcgtcggacctgtgccaattccgttcgttgaacctgttttactacggccaattccgtcggatattcgggttcaagaaaactgacgatcaggacaatttgataagttcctgtgaaattcctacttccgagaaaatttcgggtgtataa

SEQ ID NO: 1269 - DNA, 960 bp, Aedes aegypti
atggctttggcttgcgaagactcgcgaatgtcgctggatggcagcgatctgtcaaacttgtcaccttgcaagccgacgacagtcatcaccgacaacaacaaagctccttcgctatcaaaaacaacagcaacagacacgacgaagcaggcggcggtttcatctccagaacgtcgttccgtccaaaatacggaagaacagaacattggcgacgaagcccagaaaccgggatccaaatcggagcaaatcgagagccttagttgggccgatatcgtcgaaagcgcggaaaataagaaaaacgaggaggaatctgaaacggcaggcgcgccgctatcggacctagttggatccgataccaaaatgtccatggatgagagcaacagcaatgccagcatgcgatccaatgggtcgtccagtcggcaaatcgaaatcgacattctcgattcggccaacgtcgaaaagtacgaaaaattggtgcgcaacgaaaagatcaaatctcccttcaaacggcggctatcgggtggcgaagatgacgacgatggtgccgatgacgatgatggtcacgccaaatttgtcgacgcagaagagaacggcacactgcaacacaatctgcacaagaagtccaagatgaacgagaacgatcacggtagggaacggttccgacgagatagttcttccagctcgggagacggcagcagtcagagcagccggaaaccggtcgagtacgagaaggacttgtcgatcctggagcgacgccagaagcagatcgactacggaaagaatacgctcggctacgagaattatatgaaacaggtgccaagggaaaaacgtaccaatgatcacccgaagacgccgccaaagcacatcaaatacagccgacgagcatgggacggacttattaaagtgtggcgcaagaagttgcactgcttcgacccagatgcaaagccggaagccgacgcttag

SEQ ID NO: 1270 - DNA, 756 bp, Aedes aegypti
acccggttgagcttatatagaattgtgaatcaggagtacaaattaatcattcatccacacaatgagcaatacgaagattcccctcataccgaacgagaagatattcttccaagaagaatcgacacgtcggaaacctttgaactatgctgatgctcgccaccgtcaacattcatccggtgcctcttcttcatccgactctcgtcgcccaccttttctgacaccgcagaaattttcctggctgttgagacactcggcagccgtggccgagcacatggacccggatgccttcgtggagttcgaggtgctgcagcaaatcagtggcgccagcaaggatcgcatgctagagctgatagcccaggatcagaaggggcgatacgagatacgcggagaagaggtccgtgcagtcaacggccatagtgtgcacttttgcgataactacgaagtgctttcgggggaacgacggccggagtttctgtaccatgccaccaatgataaggccctgccgctgataatggccggggcactcaaacggatgggtcgccattacattcacatgtacgacgggccaccgcagaagacttcggtgcgctatcgaattctacggattaggcctcttccggggcatacgctgtacaggacgaagaacggatatattctctgtcgggaggatataccggcggagttcattgaagtttggaattgattttgattgttaacgttttgttgttatgcgatgtaatatatttataaacgatg

SEQ ID NO: 1271 - DNA, 6583 bp, Aedes aegypti
atggccacagacggtatcacttctcgttttggtttcaacgagaggaggagaacacacaatcggaacagctgccggatacttgaagacaagatgctagcgaaactacttcttctcgctttggcggggctcactgctgcctaccaatacgagaactcgttcaagggctacaatcctggctataagggctacgatgctggctacaaaggctacggatacgatgctggttacaaatacaacaaccaaggctacagttacaagaacggtttcgaatatggatatcagaacgcctaccaggctgctttctacaagcatcgtccaaatgtaaccgaattcgagttcagctcatggatgccgaactacgaatacgtctacaatgtgacgtccaagaccatgaccgctctggcggaattggacgatcagtggactggtgttttcacccgtgcctacctggtcatccgtcccaagagccgtgactacgttgtggcctacgtcaagcagccagaatacgctgtcttcaacgaacgcctgccatacggatatgccaccaagttctatcacgatatgttcaagtttcaaccaatgccaatgagcagcaagccattcggaatccgttaccataagggcgctatcaagggtctgtacgtcgagaaaaccatccccaacaatgaagtcaacatcctgaaggcctggatcagccagctgcaggttgatacccgcggagccaacttgatgcattccagcaagcccatccatccttccaagaacgagtggaacggccattacaaggttatggagccattggttaccggagaatgtgaaacccattacgatgtcaacctgatcccagcctacatgatccaagctcacaaacagtgggttcctcaaggacaactccgtggtgaagatggtcagttcattcaagtcaccaagactcagaactttgaccgttgcgatcaacgcatgggttaccactttggattcaccggatacagcgatttcagacccaacaccaaccaaatgggaaatgttgcctccaagtctttggtttcatacatgtatttgactggaaactggtacaacttcaccatccaatcgtccagtatgatcaacaaggtcgctatcgctccttccctagtaaacaaggaacccgctctggtgtacgctcaggttaacatgaccctcaacgatgtccacccttacgataaggtcccaatgggcccagccgaagatctgaaggtgttcgtcgatttggtttacagctacaacatgccaagtgataagaagaactacgttcgtcctggcaacgaaacctcctcctcctcatcgtcatcttcttcatcgtcctcctcctcatcggaatctagctcgtccagctctgaatctgtggaaaaccccaagatcagccccgttgagcagtacaagcctctgctggacaaagttgagaagcgtggaaaccgctaccgtcgtgatctgaatgccatcaaggaaaagaagtactacgaagcttacaaaatggatcagtaccgtctgcaccgtttgaacgatacttcatccgactccagcagctctgattcctcatcatccagctcgtcggaatccaaggaacaccgcaacggcacttcttcctattccagctcctcatcgtcctcttcttcatcgtcctcttctgagtcatcctcctactcatcctcttcttcctcttcctcggagtcctactccattagcagcgaagagtactactaccaaccaacaccagctaacttcagctatgctcccgaagctccgttccttccattcttcaccggatataagggatacaacatcttctacgcacgcaatgttgatgccattcgctcagtcggcaaacttgttgaggaaatcgccagcgatctggaaaacccatccgacttgcccaaatccaacaccatgagcaagttcaacattctgacccgtgctatccgagccatgggatacgaagacatttacgagctggcccaaaaatactttgtttcgcagaaggaacgtcaagtcgcccagttttccgacaaaaaattcagcaagcgcgttgacgcttgggttaccctccgtgatgctgttgctgaagccggaaccccctccgctttcaaattgattttcgatttcatcaaggaaaagaaactgcgtggatacgaggctgccaccgtgattgcttccttggcccaatctatccgctacccaaccgagcatctgctgcacgaattcttcctcctggttaccagcgatgttgtattgcaccaggaatacttgaatgccaccgctctgttcgcttactccaacttcgtcaaccaagctcatgttagcaaccgttcagcttacaactactatccagtattcagttttggtcgtctggctgatgccgactacaagatcatcgaacacaagatcgtcccatggttcgctcaccagctccgtgaagccgtcaacgaaggagacagtgtaaagatccaggtctacatccgttccctcggaaaccttggacatccacaaatcctgtcggtattcgagccatacctggagggtaccattcagatcactgacttccagcgcttggccattatggtcgctttggacaatctggttatctactacccaagcttggcccgttcggtgctttaccgtgcctaccaaaacactgccgatgtccatgaagttcgttgtgctgccgttcatttgttgatgcgcactgacccgccagctgatatgctgcaacgcatggccgagttcactcaccacgacccaagcctctacgtccgcgctgccgtcaaatccgccattgaaactgctgccttggctgacgactacgacgaagacagcaagttggccatcaatgctaaggctgccatcaacttcctgaacccagaagacgtgagcattcagtactccttcaatcacatccgtgactacgctttggaaaacctcgagctttcctaccgtctgcactacggagaaatcgcttccaatgaccatcgctacccaagtggactgttctatcatctgcgccaaaacttcggaggattcaagaaatacacctcgttctactatctggtttcgagcatggaagctttcttcgatattttcaagaagcaatacaacaccaagtacttcgctgattattacaaatctgccgactacagcactaactactacaactttgacaaatactccaagtactacaagcagtactactacagcaaggatagcgaatactaccagaagttctacggacagaagaaggattactataacgataaggagccattcaagttcactgcaccacgtattgccaagctgctgaacatcgatgctgaagaggctgagcaactggaaggacaactgttgttcaaattgttcaacggatacttcttcaccgctttcgataaccaaaccatcgaaaacctcccacataagatgagacatcttttcgaaaatttggaagatggctacgcttttgacgttaccaaattctaccagcaacaggatgttgttctggcctggcctttggctactggtttcccattcatctacaccctgaaggccccgactgtcttcaagttcgaggttgatgcttctgccaagacacacccgcaagtgtacaagatgccagctggtcacccagaaaccgaaaacgacgatttcttctatatgcctcagtctattaacggatccgtcgatgtgaacctgttgtaccaccgcatggttgatgccaaggttggatttgtcactccattcgatcaccaacgttacatcgctggttaccagaagaagctgcatggttatttgcctttcaacgttgaattgggattggacttcgtcaaggatgagtatgagtttgaattcaaattcctggaacccaaggacgaccatctgctgttccacatgagctcgtggccatacactggatacaaggacattaccgatatgcgcccgattgccgaaaatccaaatgccaagattgtgcacgatgataaccaatctaccaagaccatggaacacactttcggtcaggatatgaccggtgttgctctgcgattccacgccaaatacgactttgatctgatcaacttccaacagttctggagcttggttcagaagaacgactttgtttcggctgtgaactatccattcgcttaccagccatatgaataccatcagttcaacctgttctacgattcccagcgtactcacgccaaatcgttcaagttctacgcttaccagaagttcggtgctccttctttcgaagaaactggacccaagcatccagccaaccgtcactcttactctggaaactattacgagtcaaactacgctcaacccttcgtctacagccctggaagccaacgccgctatgaacaattcttccgcaatgctgcttctggaatcagaaatagcttcgttcgttactacgacttcggcttcgaattctacgctccacagtataagagtgaattcaccttcacaaccgctttcgctgatagtccagttgacaagacttcccgccagctgtactacttctatgccagcccaatgttcccaagccaatcgtacttcaaggatattccattcagtggaaagcaattccagttctgcgccaccgctaccagtgaattcccacgcgttccttacctgaagttctcggactttgacaaatactacggagatgctagccagtacttcgatttcctgtatggtgaatcttgccaaggaggagctcacattgctgtgaagggtaagcagaagcagactggaaagtaccgcgaatacctgcgattctcggatgttgctaaggcttgcaaggaacagatggccaacggatactaccaattcgaggaatgccaacaggctatcgatcaggcttactattacgacttctacgattacgccattgagtacaaggatgtcggctctgttgccaagaatctgaccaacaagttctacaactacttccagtacgcgttctacccgtacttcgaatcgaacttcttctaccatggaaagtcaaactacatcaaggctgaattcgaattcgctccttacggcgattactacaacgcttcgttcttcggaccaagctacgccttccaggttcagaactacccggtcttcaatgactactctacatacttcccatacttcttcaagtacactttcttcccacgttatcaaccatactacatgcaccgtctgccagcgcacaagccccgcaaccgtccgtactacgaactttccaactacgaacagttcgccgtcttcgatcgtaaaccacagtatccttcatgctcattctccaacgactacttctataccttcgacaacaagaagtacttctacgatatgggagaatgctggcatgcagtgatgtacactgtgaagccagactacgacttctacgctcaacaatcccacttctacaactctgactttgagtacaagtacaagaatggatttgaagagtacgaacagttcgctgccctggcccgtcgtggatctgacaatcagctatacttcaagttcctgttcggagacaactacattgaagttttccccaacaacggtggtattccatttgtaaagtacaacggacgtccatacgacatcagcaagagcaacattgcccacttcgaatacaaggaaggctacccaagcttccccttcttctatgcctttgcctacccgaacaaggatttggaagtcagcttcttcggtggaaaactgaagttcgctaccgatggataccgtgctcgcttcttctcggactactcgttctacaacaactttgtcggtctgtgcggaaccaacaacggagaatacttcgatgaattcgtcaccccagatcagtgctacatgcgcaaacctgagttctttgctgcttcctacgccatcactggccagaactgtaccggaccagccaaggccttcaactatgcctaccaacagaaggccaagcaggaatgtgtcaagcgtgaggtctactacggtgacatcatctacaatcaggaatactaccacccccgctaccgctactacaaccacaatgttgaagagtcctccagctcttcatctagctcctcttccgattcttcgtcctcgtcgtcttcctcggaatccagctctcgttcccgctctggcagctcatcgtctagctcgagctctgaggaacaaaaagaattccacccacacaagcaggaacacagcatgaaggaatgcccagttcagcatcagcaccaattcttcgagcaaggtgaccgcacttgcttctccctgcgtcctctgccagtgtgccactccaagtgcgttgctacggaaaagatcagtaagtacttcgacgtccactgcttcgagaaggattccacccaggctaagaagtacaaatccgacattggtcgcggctacactcctgacttcaagagcttcgccccacacaagacttacaagttcaactacccgaagagctgtgtctacaaggcttactaggaaacgacatttgcagatcccatttttgtatgacgaaccaatgaactaacgaaataaattataaggcaatttt

SEQ ID NO: 1272 - DNA, 2233 bp, Aedes aegypti
ttttctgattactattttgacgtttctagcaatcgtcatccaactttttcatcatcatcatcgagcgtcactcaaccgtcaccgtctgactaatcaccatcatcgtcattattctttcgggtagttgaccaatcatggcaaaggccttttgtttacgccgggtactctttttgttctcgttttatttctgttgttttttggctttcatttcaacatcgtcgtcgagtcgcgaacataaacgcacaaaacggtgatctggattctcttcttgctgtgctcacagtttgatggcaagccatcatcattatctcccagcaaggccacatagtagttacaacagtatcgaattgaccgtgcgggtgaagacaggcaaattaagcggtgggccgtctgctggttcgccattcagtcgtaaaagtgttgttgaggccatcagtgaaaggagcagcgccaaaaaagtgaaagttgctctatagatctaatccggccattttctccgttcgggttccagggaagatgtccactcttctcggaatttgtttgctgctggtcctctcgattggaaccaccatcggccacagaaatgtgctgctgctattagcggacgatggtggattcgagatcggggcctaccggaacaagatcgtgcaaaccccggcgctggatgccctcgcgaagcaaagtctgatcttcaacaatgcgtacgcctcggtgagcagttgctccccgtccagggcttcgatcctcaccggcatgccggaacaccagaacggaatgtacgggctgcacaacggggtgcacaatttcaacgcactcggcaaggtgaagagcatctcgaaaatcttgtccgattccggtgtcgttaccggactgatcggcaagaaacatgttggtcctggggaggtattcaaattcgattacgaacgaaccgaagagcaatatccgattaatcaggtcggacgaaatattacaaacatcaagctttttgttagagagttccttgaggcaagtaaagaaaaggatcaacctttcttcctgatggtttcgttccatgatccacaccgttgtggacacataactccccagtacggtccgttttgcgagcgttggggatccggagaggaaggcatgggtttgatccctgattggcatccgatctactacgtgtgggatgagttgatccttccgtactatattccggacaccgaacctgctcgtagagacgttgctgcccagtacaccacaatctcccgactcgatcaaggcgtcggcttagtgctgaaagaactggctgatgccggattcgatcaggacactctggtagtctacacttccgataacggaccaccccttccagctgcccgcaccaatctctacgatcccggaatggccgaacccatgttcatccgatccccagatccaaagagtcgccacaacgaagtaacctattccatgaccagccatctcgacctacttccaacattcctcgactggttcaacgtttcttacccatccgatcacccggaagaatccgacaccaacgccatagacgaacaacacccaccaaatcccatcctaaccggcaagtcccttctccccctactgtccaccgaaccgccctctgatccagatcaggcagtgtacgcttcgcaatcgttccacgaaatcaccatggcctacccgatgcgcgccatccgcaccaaacgctacaagctgatccacaacctgaaccatcaactgccgttccccatcgatcaggacctgttcgtttcgccgaccttccaggatctgctgcagcgcacggccagcaaccaggacctgcgctggtacaaaaacctccggctttactacaaccggccggagtgggagctgttcgatctcaagttggatcccgccgagaggaagaatctggtcggcaaaccggtagtcaaggagattttcgagaagctcaagggaaagctgcgccagtggcaggaactgacgaacgatccgttccgttgcatgcccggaggagtgctgctcgataccggtgaatatctgaacaatgccacttgttttgatttgggccagtagttggtaggtactccatgaaaagtatgtggcaagattttttataatactcattagattttaggggttggatgatttggagatctttatgtctgtgttgttttataatacatacaaagtttagaaacaaacactcgttgatagtttaggggtcatgcacaaa

SEQ ID NO: 1273 - DNA, 1658 bp, Aedes aegypti
atgtgtgaccacgaaatcctgattgagaaatgcgaagaccatcggaagattcaccacaagttcctccggatgttcgacaacgtaatcgaaacggttctgtgtatgcagactcttatggccgacctcaactccggctacaacgaaatgctggatctgctgaaagcgccacctaaggcactttcatctccttccccacacaagcgccggaaagcgcagtccttcgattcgccatcgtcggccacggtcatccggaaggaggaaacgcctcggaatcggagcaacccggaagtgtcggcttccatcctggaccagaatatagacttcccggacacggaggattcgttttttgccttgactcaaagcccgtcccgaagggagcctttgtcaccggtgaaaatacagctggagaatgtccccaagactccaccgaagaaggatccggtccgggtggacgagtgtaaggtagcggggagtgataagaagaaggcgaagaaaagcattctgtccttgagtcggttttcgagtagcttcgagacgtcgcccgaaacgagcaaacaggccgcaatgcttccgatgcgccaaaagttggccactccgaaaccgaagggtcaggagcaggagaatttgatgccaccggtggggaagtggacggcgaagaagacgaccccaggtagtagcggtgggaaaatggacacttccatgcgaaagactccgaccagcagttcgaagaagaatggatcgctgttgaaccgaactcgaatgcgacaaaccaagctgaagttcccggactgcatgaacaaatccttcgcggacgacgacgagacctatttcgaggagtttgtggttcccagtccaacttcgacaacggcgctcagcggcacacggttcctgaagagtgccaagaaaaaagagcaatccacgctaattgccccgccaaagttcaaggcgagggatactcctggcgacgaggacttcgatatcgatcaaacctatttctcggaagcggaaaagggtctgagtcgatcgaagcaatttgcccatccggttcagccagcacctcgcatcaaattagaacccttcacgcagaaaaaatctccttcgaagtcttccaaaccatccccggttctggcgaaagactcacaggactccgatacaagcagtgttctctatgtgaagcccccctcacaggacgagatcattacgatcgaggaaacgcaaccgaacaagaccgatctgttcatgaaagccatccgagaggaacgccgaaaggaagacgacgcccggaagtcggtgctgaacgtcatgggaccatccaagcgggacattaaaaaggaagaacttatcccaccgagatcggacttcaatctgttaagaaagcccttgctgaaaatgcccccggcagtccccaatgaacgacgctgttcggactgtacgagacaatttcagcatttgcttaattgtggccactcgacggacgtggcccggagtaaactgccccagaactgccgcgaatgccgattggcgcagctgcacgagactcccccggggttctggaatccggagtttacgccaacccaactctgacctttgccagacgtgccattcgttgataacttattaactcgtttacttagcaataaagaatttgaatttgattc

SEQ ID NO: 1274 - DNA, 768 bp, Aedes aegypti
atgtctatcgggataaatttacgtgtcaccggccacacctcgatcgggggccggaagtatcaggaagatttcttctccgtcgcttaccagcagacggaaaacgaccaaagtttggagtacgcctttttcgggatctacgatggccatggcggagcagaagcgtcactttacgcaagggaacatttgatgaatacgatcgtaagccagaagctgttctggtcggaaaacgacgaagacgtcctgaaagccatccgggacggttacatccagacccattattcgatgtggcgcgaacaagataaatggccaaaaacttcgtccggattgcctagcaccgctggaaccaccgctagtatagcgttcatccgaaggggaaagatctacatcggtcatgttggtgattccggaatcgtacttggataccaaaaggataaagaatcccactcagggaatgaagcctgcacgtggaactcaatgcccctgacggaggaccacaaaccggaagcgtatgccgaaaagatgcgtataatgagctgcggaggaaaggtggtcaccaaatccggcgtaccgcgagtggtttggaatcgaccgcgtattggtcataagggtccagtacgcagaagtactcccatagatgagataccgtttctggcggtggctcgcagtttaggtgacttgtggagttataattctgcggtggacgagttcattgttagtcccaatccggacgtatccgtaatagaaatagatcccaagagataccggtaa

SEQ ID NO: 1275 - DNA, 1425 bp, Aedes aegypti
atgaatcgtaaccgtaaaccgtcaagtgacgaagtcgttcctgcgtccagtcgtaccgacgcatcagcgaaccggcgccaaggaggaagacgccctccctttcggccgaagacatcagccttttctgatgtacccgacgtaccgcgtccaccaggacagcatctatctaaggccccgtcggaagtgaagaactatcctttatggatggcttatgcaccgtccgccgccgaggaagtgacacccatcgccgaagaggttaatcacttcgtggggttcgagggtttgacgcatctggtccgtgaaacctacgatcaaatcttagcgcataacaagaactttcgggaatgcgtgcccgaatccgcctacgcctactacctagctacactcacctgggcaagagccctattcctccagcatgccaatggatatcgcacacatgttgctgaacgtgagcttctagacatggtattgactcagtctaactaccacgtcccacgctcagttggtatctatttgtcaggaatgggaaacttcaacatccctagctcagtagaatcaaagtttaggctgaaaccatacaccctggggaataacgggtaccccaatgaccttgatgcagatcatctgcatatgactttatatcccaacatccctgtctacgtccaacgcattcgagagcaaatacgctttacggctaaccagcagaacgctgcatggcattgtaatggcttagcccatgtatggaacagcagactgatgggttatgccgacgctgatcagttacgacctaatcatagcgtcatctacacgcgtgcccggattaccgccaatgacttcccgagtgagattgacactctcccactgaataccgtgctccttaacgccgtttcccactacctagctgaggttccacgcatcgaactagtaccagtaccccagactattgctggttctgttggacagatgttgctatgtgctccagtgaatacaacagccgcaaacctgtcgtaccgtggccgtacgcctctagccatgcctggatcggcaagctactaccttggaggagccttcctgtatagagtcagtcgatcagacttgggtcaagccgacgccgcccgaatttggccgtggactatcgccgcacctacgccagctcagagagcggcattgtcattcttgaatactggatggtctccaatactatctgatatctaccattatgagaacgtaccgtccaacccggacctctaccgtccgggccgtagcgcccaaccgaagaagaaaggcatcctcgaaacacaccaaacaagccaactgaaaccatccaagtcgcatcgaatccaagcaagccccgttcaaacgatcaatcaatcaagcgaaaaacaacggtcaaaccgatgtagcgcccggatggaatatttttga

SEQ ID NO: 1276 - DNA, 1990 bp, Aedes aegypti
tgggtttttaacagccgtatatatgcacatccacagcaagacgacgaaggaagcacgcaaagcaaaagaagcaatacctacttgaggctagactgcgagacatcagtcgcatacttagcgcacgtctggagagagtgtctactttttagttagcgcttgattcatttcaaaattttcgtttgcttttaccgtgtgccatcatcactatctgttttaagagtattttagacaaaagattttgttgtttaagtgttatattgtgcgttgcgttcgaactgtgatttgtttgataaacgggtttcatcacgattttagttgcttagctatatagtataagagtaggttgaagtcggaacacgtaagggaaaaaaagtcgctatcatgtcgaaaccacgggtgcttgtactaggaggatgcggtttcattggacgtcatttggtcgactacctagtaacgaatcaccttgctgaaaccataagagtggtggacaagacgcctccccagatggcatggctaaaccaacggcataccacagctttcgccagtccatgcgtagagttctgcagtgccaatttaatcaatgctgcctcatgtcagaatgcattccggacggatgacggttccggatgggactatgtcatcaactgcgcagccgaaaccaagccaggtcaaacggatccagtgtatcaagagggtatcgtaaagttgacactgaattgtgccaatgagaccttgaaacatcgtgcgaagcgatttgtcgaacttagcacgggtagtatgagttccagcgagaagattccacaagcggaagattgtccaatgaaaccatggacgatggtgggaaagtataaagctcaaaccgagcaggaactagcaaaagtggaggggctgaagtatttgattttgcgattgccgatatgttatggagttggagataggaaaggattgacacctcggttgatcatatccggaatttataaataccttggcgaaacaatgaaactcttgtggacgggttcaatgaagatgaacgtagtccacgtggaggacgtttgctgcgctgtgtgggaactgatgcaaaatgaacaaactaacggcgaaattatcaacgtttgtgacgacagtgaagcaactcaggaaacaatcagtgatttgctcgcggatatatttggcatcaagactgactactggggaatggtcatgtccagtatgaccaaagtggacatggcaggagcgatcgaggaagtcaacgacaaacacctcggaccgtgggctgagctgtgccaaaaggacggtgtattgaatactccgctaacaccatacatggaccaagagcttttgctatacaagcatttgaatcttgacaacagtaaactcaaaagctacgggtatcaactgaggcgcccgagaatcacacgtgaaagtcttgaagaaattgttagggattttatcgcaatgaatcacttcccaagatcacttctcgaggcctaattgaatgtactttttaataactaaaccctttgaaaacttaattgctcaatacgtcaaccttacatacgaagcagtaattgatatgtgatctctattttgcaatttggaaatcagtgtactgaaatttacgcctagcatagtagaagttagagatgcgagagataaacaaaatgatatcgaaattgtaagtgataattacaattttccttataaatttaaatatgttgaaatgtacttcaaaagtgtacaatatgtgcctaaaaaataacataatgctacacagttatgttgtcataaatgtagatacgaatatagaagtaataaattgtttcaccctttagacatgctttcctttaactatacgaaactttcttttcgtgactttttgatacaataataaataaatctgagcatccatgactatgaaccattctgcgataaagtgtaggatgtcatcatgtaaattccaaaagtttactgatggaggaaagcaaactga

SEQ ID NO: 1277 - DNA, 705 bp, Aedes aegypti; identical to SEQ ID NO: 169

SEQ ID NO: 1278 - DNA, 681 bp, Aedes aegypti
atggcccaccaaagtctggagtggaagctctcctactacaacgatccggagtatgcctcggtgcggcacgcccagagtggccgcctcttcaactgggtcaaggtgtcgcatggcttcaaaaagttccgcctgcggcgttggaactccaccggatcttggagccccgaaccgtccggaataatcgatctcaccaacttccacgtggccgaagggaactacaccaagcggaagaacgtcttcaagctgaccactgttgggggctacccgaatccgcacctgcagcagcaacaccaccacccgcaccagctgcatccgtttgccatgatgggcggaggaggtccaacggcagcccagtcccatcagcatctggcggtgcaccacacgcagtcggccggactcagttcggtggggccatcgtccgggtcgccgtcgctgtacaagggctacgagcgggaactgctgctgcaggccgactcccacaacgatatgcgcctgtggatggactcgctgcggaccgtctgccggagcagtcagtacctgaatagtagtgtgagtacgagggggatatgggaagaggggggtttatgttgttcctctgggagggggttgcttgaggccttatcgatgatcggtgacgtgttggactcagattttatggcggcgttatctgatagaaggtag

SEQ ID NO: 1279 - DNA, 2652 bp, Aedes aegypti
atgatatctctcttctggaataggttggaatgcgttcagatcaccgccacttggaagacaagatcattttccagagaatgggatctgttgttgttcacgcagctttccggttacttgtgcatcaatgggaacgttctcaagtacttcagcgaaacggcctacaacccggaaacgaatcaacgaccccagccgcagcagctgttcattccaaaggcatcctcgacgcccaactcgcggtccagcattgcaagtggcggaggcggcagtgttggggtcggagtcaagcgcatcctaacggaccaggagaagcaagaatcgctctacagcacgctgcaggaaattgtcgagaatgccgccgcgaacaaggcgatctacgccgaggtccccaagatccgatcgcctccgatggcggccgaagcgcctcaatccttgcagcagcagcaaagatcgaccgtggccaagccgctcgttttcgactttgatcctgcgaagcagcagcactacctggcccaacagcagcacagcaaggacagcgattcgatcagttcatacgactcgctgaaatccgccgccaccctttcggccaacgatgtccacctgatgggcggcggcgacagtgcaataatgtcccgactgcggaagagttttgaacagaaggaggaattcctgaggcggccggcaccggctccaagttccgccggtgctcaaccgtccgtcgctgctcccttcgatgtccagcagcgggaattctacggccggcccaatcggttacagaaatccgtgtggccaccgccccccgtacagcagcagcaacctcccccctccattactaccatgcctgtgataacctccaacgagcaccaccctcaagattccttacccaaaccatcgaaaatgtcctccgggacgcaaacggcggtgccctcggtcccggccaagccgattccattctccggaagcagtctggcgactgtacgcgagcaacactcgtcccacctgtccgcgatccgcgaacaattcttcagcggcatcaacggactagccttctcggaagctccgcccaaatcggcccctccctcgctggccttccagcgggaacaacagcagcaacaccagctgagcggatcgcaatcggccttgcccctgtcgccgcaaagtatgcacgtcgtgtcggagaaggccaaactgttcgagtcggggcggcccctctctccggacggcgtcgaccgtgccgagctgtacaagagcgaactcagccggatcaacaccaaacaggtggtggccaacgtggccgtgcggcggaaagagttcgaactgaaggcggagagcactggctggcgaaggtcgacagaagagaaaccccgctcggtcagctcggattcggactcccgtcggacgccaatccgggtgcgatcgctctctgtcgaatcaacccacaccaaggatctctccgcagcggcggcggcaatggcaacgagcggaagtagcgacgatcagcaagtcatggccagcaaggagccggtggcagctccgggagcttgtactctgctccgacagcgaccggttcgggagaactcctaccgcaatgcagtccgtaactcgacagactccagtcaggtcgtcctgcgccagaagcatcaccatcatcagctgccgtcgtccacgtcctctgcccttgccatcgaggaggatgagcgcaaaacccgccggatatcgtacctccgggcgacggcccacgagaacctgttccagatgatggagagtagcgatccgtcggacagcagtccgatgtcgttgccaccggatacgcccgatacggaaccggaagcgaacgttggagatatcccatcccagcaggcgcagcaattgcaacagccgcaacaacaacaacagtcgcagcaagcgttgagcttggttgcttcgcaaccgcagcaactgaagagcgcgtatcgtccctggagacgtccgcgactcaccaccgacattctgccgctgcggagattgttcgacgagtcagccccggtggtgaacttgccgccgatcctcgagcagcagcagaagcagcatgcttcgtcctcgtcggaaccgacgactccgacgacccccacgaatccggacccggccggaacgggatcggttctggacctgcgcaagttgggcagcgacggagatgaggaggggatgtcgcctacggctcctccaagagctcactggagtggtgcgtcggggattcagcagaagcagaaacgatcgtcgtcgctgacgacggccatgctgagcagtcagctgggcgggagcagcctggggaatctgcacgtgatcaccacgacgtcggcttccggggtcgtcaccaggagctacttcttcgctcagagccacagtgccaaatcgaaggcgttggcccacttccgggactcgccggcggacccgtcggttccggtcctgcgagaaggtgaactcaacatcaaggtgacgctgatcgacgggaagcggtcgcaggatcgcagttggcgcacggtccatgccgagttgcgtggcaaccggctgcggttgacgttgctacgcgacaccggcaaggcgtccagtcaggtcttcctgctgggcatcctggaggaatctctggagatgtttctgatgggcttcaagaagtag

SEQ ID NO: 1280 - DNA, 1798 bp, Aedes aegypti
tttcgcgctcgaatcgtgagcagcttcaatcgcgaatcgcgagtaacctcgaccgagaagtagtgaccatcaacagccaatatagtttaccggtgtggtagatgagaaggattcattaaccacattgtttcacagtaccgatccgattgagaggcaatatacatcgtctggagccatgctgcacctggttagcagtaccatcagctaggccatcgcattccactaaaccttccgtctgactgaactgagaaagaccaagctcaaccaaagcaatcaagatgaccgtagtgaaagcggcgccgaccagcggcggcttgaagcgggagatgggcttgatgtccgccattaatgtcatcatcagcgttatgatcggttccggaatattcgtctcaccgacggctgctctcaagtactccggaagcgtaggattttgcctggttgtgtgggcagtttgcggaataatatccctgctaggagcactctgctttgcagaactgggaaccgtcgtaccacgatcgggagctgagtacgcatacctcatcgaagccttcaaaaagaccaacaaattctggggaccgttaccctccttcatatgtgcctgggtctacgttgtagtgctacgacctgcagaaattgctgtgataattctcacattcgccgaatactcaattctacctttcagtaatttactcgggttgaagagcctccctgaagaggatctgcataatcttatcaaactgatagccctattaggattaggtgttatcacttatattaatctaagcagcgtaaagttatacgttacgatcaacaatatttttggattttgcaaagtttttgcatgccttatagttatttttggtggtatctaccagctagcaataggcaacacggagaatttgtccaggggatttgctggcacaaacttcagccctgggcatatcgcattggccttctacaacggcctttgggcgtacgatggatggtcgagcgtcaccacgatcaccgaggaaatcaagcgacctgaagttaatattccacgatccatcataattgccgtaccgatcatcaccgggctgtatgtgttcatgaacatggcctacatgacagtgctttccccggaggaaatgatccaatcggaagccgttggactggactttggcgatcgtgtgcttggatcgttctcatttctcattccgctaggagtagcattgtctacttttggttgcgccctgagcatccaatttggcgtaactcgcctctgctacgtggccagccaggaaggtcaaatgctggaacctctttcgtacatccacgtgcgccgtgcgacaccaactccagcagtggcaatgcagggtattctagcgttcgccttcatattggtgggcaacatagaggagctgatcgaacttgcgtcgttcctcatttggttcttctacggatcggcgttcatcgcattgctgaccttacgcaaaacgcaacctgacacacccagaccctacaaagtgccattattcgtgccaatcttcgcgctcggagtatccatattcttatcagtagtgccaatcatcgctgaaccgtcgcccaagtatttcttcgctgttgcattcatcttgagtggcgtggctgtctacacgccgttcgtttactacaaaattaggcccaagtggatgaataaactcacctatctcatccaggtgttatttgaggccgtgcccaccgcggagaaatttgaataacatctattgctgcgcatttttataagcttttgtaataaaagacataaattttacgtttt

SEQ ID NO: 1281 - DNA, 4687 bp, Aedes aegypti
caatcattaaaattcagctccgcgtacactatttgaagctaatcgcttcaaactggcaccacttccgttgttttgcatctctcgcgatctcaacgcggtgccgtttgtaaaagtttgcgtctgttataaatcccaaaacctgcgtgaaattttagtgaaaaatccgcagttttcgtgtcaccgcaatcagtgaaatggatgtttgtcgcacgtgtctgaatgaacgcggaagtgagctggttgggagcgattttcggtccatttttaccaacatcgaagtcgatgaggtcaatgtttacatcgcggattgtttgacgcagtgggtcgatcgcacgatttttttacaatggaaatttgtcgtttgtgtatgcaatgtgatggtaaaaccttaaagtccatattttcagttattaacgatgtggacattgcacatacgattaccttgagctgttctatacagctcttcgaaggcgatggacttcctagcaaaatttgtgaaatctgcgtacaggaagtacaaactgtgaatgctttcattaaaaaagtgcgccgcagcgatacaaaacttcgaaacgacgtaccacagccagatgagaagctacaatttgaggtgatcgtcatcaaaacggaattatccggcgatgaaaacgatggcggtgaccatttcgagcaaagtaacaatgaagtgaaatatgagacagactccgatgaagatgttctaagtaacatcaaagcacggatcaagaagattcagaaagcaaacaaagctgttagtaaaaagcaacgtagaagtaaacgaaaacgtaaatctgaaagcgaatgcgaatcggaagagttgaaagataacgactctctggatgaaaaagagcttgagatgtttgagatcatcgatcttccagcaatcaattatatatgctgtggatgttttcaatatttcgaaaccgcacaagaactaggaatgcatatagaagttcatcagaaattttcggtaaaaagaactgacacgatattttgtgatatatgcaaacgcagattcaatcagtcaagggatttggagaaacataaaaaggaattgaaagcggcgtcaaaagtttatgaatgccgcaaatgcaaaatacgatttattagtgccgttggtagacgaagacacgcttacaggcatcctaaaacaatcgaagacaaaatgaaacaggattttggacaaatactgtgctgtgtaacgaactgcaggaaatcgtacccttctgaagaccaactgattaagcatagccaagaagaacataagattaacaaacgggcgtacgaagcggaagatgttgtacaaaaaccgtccgaatgtcctgtttgttacaaaagatttacttcggtactgttacttcgcaggcatcgcaaacgcaactcgaagcccatgaatcatcagtgcgctacttgtggactcaagttccgaaccagagatgttctgttaatccacgaaagcaatcacaccaataagaagcagttcgaatgtgatatatgtaagaagagctttgccagtaataatgcagtaaaggcacatcagaggtaccactccaatgaaagacccttcatatgtgcgacctgtggagctggattctaccaaaaggcactactcgtcacgcacgagtacggccacggtagtgcaccgcttccgttccaatgtgaggtttgcagcaagtattacaaaacgaaaggcgcgctggtcaaccacatgcgactgcacaccggagaacgtccgtatccgtgccggcactgttcgatgtcgttcgcaaaccataccacgcggcaacgccacgaaatgaatcacactgcattggccacacatgaacgatcccatcgcaacgagaagccgttcgagtgcgagatctgccataagaacttcaccagcaagggcagcctcaaagcgcacatgatggtgcacagtggggagaaaccgttcgtttgtacgacctgtgggtggagctttcgccgcaagcgaaaccttcaggtgcacatcctgtcgcattcgaacaaccagccgttccagtgtgagatttgtcagaagacgttcaaatcgaaggttcacctgcagtatcatatgcggacgcacacgggagagaagccgtacccctgtcgtttttgtgacaaagcatttgctgaccacacaaataggcaacgacacgaaatgtctcatacgggcatcaaaccgtacaaatgcacctattgtgataaaacgtttattcgcaaacgatttcaagtcgaccatgaaagtagtcatacgggtattaaaccgtacaagtgcagcttctgtgataaatctttcattcgtaaacgctttcagatggaccacgaaagctgtcatacaggtgtaaaaccgtacagttgcgacctgtgcaaacgcagtttcagccatcagtccggattacgtcggcatcggctagaaacgcacacagcacaaaaatcagcggaatgtccggtatgttacaatagatacgccacagaggtactccttcgcaggcatcggaaacgcaattcgaagcccatgggccatcagtgtgcaacgtgtggactgaagtttcgtacaaaggacgttctcatattccacgagatgaatcacgccgaacagaaaccgttccagtgtgaaatctgcaagaagtatttctctggtagcaacgctttgaaggtccatcagaggtgtcactccaatgagaaaccattcgtttgtgcaacgtgcggtgttggattcaaccagaagagtcaacttatcacacacgagtatgaccacggaagtgcaccgcttccgttcgagtgtgaggtctgcaagaaatgtttcaagctaaagacgaacctcatcaaccatatgcggttgcacaccggggaaaggccattcgcctgtcgacactgttcgatgacgttttctagctacaccactcgccaattccatgaaatgactcacaccggtataagaccatttaaatgcagttactgtgataaaacttttacatttaagaggctgaaattggagcatgagtgtaaacatacaggtatcaaaccgttcaaatgcagtcattgtgataaagctttcgtacgaaagaaatttcaagttgatcacgaaagtactcacacaggcgttaaaccgtatcgctgccacctgtgcaactgtagctacagtcacaaaaacaatctacggcgccatttggagacacatcagccttctcaggaaaaagaagtaattcccgaggaaacaccagcagcaacgcaaagctcggttccgacaacagtaccgccatcaacggatacaaccggttcgatgggtccggaaaacccagtggacgatcatgcagtatcccagcgaatttgtaactctccaacaacgcatgtaatgtcctccgtctgtcgagtttgtcgcaaggctaaaaatgactcgaccagcttcgtttcgttgttcctcaaagagcgccaagcagccggcagtggggagtcgactctagcatcgatgctcgagttcgtcgggagcttctcggtatcgccggaggaaatcgatatgccacaagagatatgccttccgtgcatgggtcaactgagggctgcttacagcttccggaaactgtgtatggaatcggacgacttgttccggaagcagaacaaacctgaaatggctagttctgccaatgtccgtcaacagccatcgccaatccaaggcactgccaagaatagtgcgatgtaccttcagaactatgatccctccttctatgaactaacgctggatcgatactactatatggaacttacgttccttggtcctcgatgctgtggatgtcgtcaggcattccagtctgaggaagagctccaggcccattccttacaagagcatcgacagaatcgagcggttctaggtccccatcagtgccagatttgttattctcgtttcccgtacgcggatgccctgcaacaccaccggcaagcaatccaacggaacgttttctgctgccgggagtgttatctgatattcgaaaagaagcacaccttattcatccatctgcggacggaacatggccgggcggaatatgagttggacagggacatgtatgaagagcagcatccgcagatgggacatagtatcttcgatcccgatccggatccggagcctaatctttttgcaggccatgtccagtctcttgtgaatccgaatgccgacccgtacaccatgggctactgtgaaataacgtcgaatctgaaactgagtgacctccgtcccacgcagtaccgtctaaccgagaaaaccgaaggattcagtattatagaattcacctggcatcgatgctgcgcttgcaatcacatgttccgggatcagggcgatctggacgtgcactgtacggaggaacatcggttgcgctacagtcagaacaacacatcccaggcgcagagcaagccattcctgtgcgagttctgctggcgccggttcaagaagaagagccttctggggctgcaccagaagttcaaccggaagaagacctactcctgcaacacgtgtttgcatttgttcttcggtggaccggcctacgagaagcatctgctcggatgtagcccctccggagggcagtccgtggacgagaactatgtcggccatcagatgatggcggatgaacccgaggacgaggacgatgatgacgtttacattttgaacgattga

SEQ ID NO: 1282 - DNA, 671 bp, Aedes aegypti
cgaagatgaagaagaattatcattcaaagaagtctcttcacgcaattctttattcataaggtcatatgaataaaaccgagtacttgctcatactcaacacgatttaagcaaagtaaagtctctgagcatttactcaaaaccatatgaataaaacgatactttactcagaaagaaagccagcggtgcacaaagtggtgtttttctatggaagtgcctttgcggatctcatccgcattttgccgtaccaacttgaaaaagccgtgtcgtcttttgccggctgatgacggagccacaaaccccgggggaactcaaccgccagcttcactccctcctgggatacgtaaagggagaacaccgattcgatgcggcgcaaacggaattcagcgctaccgatgaccgtgatcggtcttttcgtaaagcaatcggtgagtggttagctaccgtggcctccagtggaatcggtaccgaagtgctagtcaaagcaccagcagaatgaataacggcagcaagatcttcagaatcagctaaacgaggcaaattccggtcgacaccaacgaaaaccgtttccatcatgaggaggatctttttcgagagggtttagaacataagaaaaaaatataaactaaaatgtaaaagcaatcgtgaaaatttctaaaaagggtgtgtttctc

SEQ ID NO: 1283 - DNA, 459 bp, Aedes aegypti
atgccgcttccggtgcttccgcatgtaccgctcgtgaacgaatcccttcccgcagatgtcgcacttaacgctctgatcgctcccgtggctcttctcgtggatcaacatattcggccgcagagcaaatccgcgattgcagaaccggcacacgaacggcttcaacgaattgtgcgtcagcaggtgacgcttgtggccagacgcgtgggcaaactgcttcgagcagtacttgcactggtagggtttctctccggtgtggaccctcgagtggatctccaggtagttaggggttttgaagcggcaccgacatatcgggcattggtattgaggttcgcgcttctgggattcgggttcgtgcagcttgagatgcgtttgcagattgcctttgctgaggaacgtcttctggcaaatggaacactcgaaccgccggttttcggtgtgtatcttttcgtggttcgttag

SEQ ID NO: 1284 - DNA, 2825 bp, Aedes aegypti
atgttggaaaacgaactcttacaaaatctcggcaaagtggaccgaaccgcagacgaaatattcgacgagcacctgaacaacttcaccagacagcagaacagtgccaccagactgcagaaagagttcaacaactacatccgatgtgtgcgagccgtccaaaccgcgtccaagagccttatggaagccatcaacgaagtatacgaaggccagtggaccggatcggaagccctgtacgctcagaccaacaccgtcgaggtgctattccaggatttctcgcacaaactcggtgaccaagtgctgataccactcaacacctacacttcccagtttccagagatgaggaaaaagatcgacaaacgaggtcgcaaactggtggactacgacagccagaggcactccttccagagcctgcaagccaatgctgccaagcgcaaggatgatgttaaggtcacaaagggccgagaacagctggaggaagcgaaacgcacctacgaggtgctaaacagcgaactgcacgacgaactgccagccctgttcgactcgagaatactgttcctggtgacgaacttgcaaaccctgttcgcctccgagcagcagttccacagcgaaacggccaaagtgtacgccgaactggaagcgatcgtcgacaagctggccaccgagtcgcagcggggctcgtacacgctcaagaagatcaccgctaactccactccgtccagcccaccacagtccccagtgaaagcgaacttgtcgattgtaaataacatcaccaacggatctgccaatgccaacggacgcgccacaactaccgatctgccaccgggtgtcttgtatcgagtgaaggccacgtacaagtatgttcgagaggacgttgatgagctcagctttgaggtcggcgatacgatcaatgtgatcgagtacgaggacccagaagatcaggaggaaggctggctgatgggcatcaaagagggcacaaacgataagggtatgttccccgcgaacttcactcggccgctctaaatcggaggggttcagcagcagcaacagcacgatcagcacatacacaaaaacactactggatgccactggaacaaaccaccctgcaattccattgattttaacaacaacgcctctgaacacagcagacacggaaaatgcagaaaacaaagtttaaagtttatcaactacgactacagaacaaccgcttaaaattaggattaaaacaaacagaagtaagcaaaacactcgaaaatcgaaagctaacatttaagaacaaaactaatttgaaagtgcagcagaaaataatgaaaagagttttatgacgtacggtgaggaaaaaaaaacattggaacgtgcctttagaaaaatgtaatttataaattgtataatgtgaccagaccagaaaacaactccagagaaaatgagtgatcaagtcggaaaatattacgttgttttcccgttttagcaattagtttttatgattgtctacaccgtccgcctttcaacactgagttgctgacagcatatctgtactaagtccttgtactattgctattaaacgtcttcccattttaatagaataatatcaatacccagaaaattctacaatctgttcaaaagtgtctttctgtttttcaattattttatccgtttgagtattgtgaaattaaatgctgtcagcacgcaaaactttttgtcactaaagaaatcaattgtaaataattcacgtttgtactgctactgcctgttcagaaaatttgtatcaactttaatcggagcgcaataaagtctaaaatttggttgaacgattcgagctgccaaaattttacaactgaacctcccaaaaattgccaatcccgtattaagtatattgtttctttgtaattaatagatgtgcaaaacgtaagtatcttgattgtataaaacaaaaacttcgttttcacccacgttttttttaatttatctgtgttttactatttcgcagcactatcttttcgtgtgagagtcaagctatagacaggattctagaaggtagcttattgaatcgatacatatttcaacggttcatgaaacaattcgcaacattaaatcatattcaaagaaataagttttagtcatagcaaagcgattcatgcatttttacaaaagattgttaattatcccaatgaaaaaaaacacactgattgtagctttatatccgtgcgcaataggccatacccatagtaactcttccagtctcgaatagatttgttcattcatcttccccagtcaccgtactattctatttttccataccaattatttctagctgcttctaagaacaacaaccctatcactggtcatttactatcactattaactattttccacccatcattgtttttattatatttgaaagttttatcttatttaacaaattattaaattaattcataacttagttgattagtgttaacaaaacagaaatgaagaaactgcaataatcggttggaactattgtagtcataaatgcacacatacaacacacccacaaaaaaacacatgtaaaaaacgaaacgcaacccgatttgaacgtttttgaaggaaaaagcgaaattcgaaatattattgatgaagaagaaagagaaaaaaataactcgaaaataaatttaaaaattagcaaacatctattgagataagtgaaacaactgatcggataaaaaatgaaaatatataaaaataaagaggacgatttaatatatgtatttcaagtaaaatgaataatacaataatatgataaggataaagaggatctaaaagagatggatgaaacttgtgtacaattt

SEQ ID NO: 1285 - DNA, 177 bp, Aedes aegypti
atggtcacttcgctctcgaatgaactcttttttgcgattccgagagtcgactcgaatgagctggaactttcggcgcaagaggaacgaaatggacgcgacgaaggaaagtgcgggatgtgtggattatcttcaaagtgtaacgattattgcaacagaaccgcaggaacttggaagtag

SEQ ID NO: 1286 - DNA, 309 bp, Aedes aegypti
atgtgtgcaacgaccgtggctcccgaaccatccgccctggaagcttctgtagtagccgatgaggacgacgacgatgttcggattacgtccgtggaaacgattccgattgcgttcgatctgagtgaagataacaacgatccgttcatcaagatggccaacgattggtactgttgtaaagtgtgttcccgcctctaccaggcgtttccccaactggtggagcaccttcgcgatgtaaacccggacaaggcggagatattgcgccaacgatcgaaagagtcctacttccgggccaaggaaagttacctgtga

SEQ ID NO: 1287 - DNA, 4448 bp, Aedes aegypti
atgattcctatttccgttcgcataacagtcccatatattgagcagattgagggttatctggagaatgcccacatgactgtgatagaagcgctgatggtgttgtacgctaaagaagtggcttccagtggacgaatttccagtgcattagaaagaatatctggccgcagtgtgtcgcaaggcgctcagcatcacgaagctgccttactgagctggatttcgcacgtttgcagtgcgctgaaaaggcgcatcgactacgagctgactaatggcgtcggaggtggcaatggaggaggtggcggtaccaaccctgcagtcgatgaatacggtcaacgattgcagagtccgacgatagccccggtacgagacttccgcgagctgtgcgacggagtctgtttagcctacctaatatcgtactactgtcccaaactagttccttggcatagtgtcaaattcaatcacgtaccaacgatcgaggactccattcacaacatcctcatagttagtaatttctccgagcggagtttgccatactcagtgttccacatgacgccagaggacataacctacatgcgaggagccatgaagcaaaatctggtggtattactggccgatctgttcaatctgttcgagatccatccggccaagtgtgtatgctatcccggcatggaacagcagcaggtagccgagtttgatttggtcacaacaactaatccgacaatgatttattttcttccctccttcaatttacctcttacagtgacccgttcaccttctgcgagtaccctacggaagcatgtctccactcgggatatgcacgatcaacagcagccacagtattcacagcatcctcagcagtctcatcagccgtaccatcaggatcaggatgaaggagtgccaacactgtcctcgatgcaggaaccgctggttcctgcacggataagacaagccaaggaaaaaaccaacaacgactccaaagcggaagagcgaggcgatagtattccagcaggtcggcccagcaattgggaggaaaaccggaagcaaagcttttcaggtcgccgatcgcgacgcaactcgctcagcgaagactctcagctgacgatcgagaactttggtggttcgcaagaccagctcaacacgatcggacggttcgatcgggagcgcaagacctctagcgccagtctcacctcagtggaacccgttacgccggcgcggtcatccatagccgatgcacgcggctcgatccagttcgggtacgacacggattcctccggcaacgagaaacaggaccgggacaccgagaagccaactccggccctgcggcggcacaacagcaccaatctacattccagcagcgtcgagcgcgacatcatcgatggtgatatgagcgctactcatggcttcggcggcggaagtggtccggcgggtcccgtcagtgtggccgatgtggaaacgacaccacgcaggaaaacgtcgtttgcgacgctgccgaacaacaccacaacgtggcagcagcaggccatcagcgtgcagaagatggaagatgttgatgacagccagtcgggcttcgaagacgccaccaagatatccaccatcaagctgaagctggaggagaagcgccggttgatcgagcaggagaagcgacgcatggagaccgcctggtccaagcagctgcaaacggttggaaaacaagcctttttacaagctattaacaagtggaatgcacaaatcatcgaaccgaagaaaacgccagatttggagaacatggatttggaacagtatcaacaaagtatatcaaaaatgaactccaacctgcacgacattcaggccgacattcagcgtctcacccagcagcagacgcaaatccaagcgcaaaccctccaggcccagcagctgttgcatgcccaacagatcgccaacctgctgaatcaggacccccagcaggacgaggtgaacgagaagggtttctacatctcgttcgacaacgagcagccaaagcgaccgaagcctcccctccgtaccaaacggtcaccaaagaaggacaaacttggcgacgggatggaacacaacaaagaatccgaaaaacccagccatagagaaaacaatcaaaacaatttcggcacctttagcgtgaagaccgcgaacagtttttcggccaatttcaacgaggagcaagtggtgagccgcaagagcataatcgatagtgcgagttccccgttcgaaacggcggccaccggaagcagtcgggctagcaacaacaacatggcggccacgatggatcgagacattggcgagcggaggcacctggaggatgtaacgaatcacaccagcaccggcagcaatgcgatgaacaacaacaatatccatcattacaataataacaatggagatgggtatggcagcgagaatgagaaccaacggaaggccaaactagtgatagggaacgatgaaggcaatctggatccgaattccgtcgacgagatggaacggaagaaggagaaaattatgcttctttcgttacaacggcggcagcaagccgaggaagccaaagctcgcaaggagatcgaagccatgcagcggagggagaaggagcgggaaaaagaggaggaacgggcacgcaagaaggaggaacagtttgctaggcggcaggccatcctcgaagcgcacaaactcaaaaaggccatcgaagaagcggagagagaaggtaagaccatcgatcgggaactcctgatcaaacatcagcagagccaagctcagctgcaccagtccagccggggcggagacggcggaatgcaccaccaaacctcatcgacaccggcggccaagatgcgaccgcagaaactcagccgacctcggcccaagacgatacacgtcgagacgggctcggtggatctgagcgaaacctccagcctcagtagtcggggtaagaagggatccaactcgaatctgaccggaatcggcctgcacagctcaaactccatgcgacgagattactaccgaggatcgcaggactcattagcgataagagaatcaccggatgaataccccagtagcagctcaacgccgataggccgacgaggctcttacaaaactggaagagaaccggcgacgatcgaacgaggtcgtaccttatcacgtatctcgctagcgaaaggtgccaatttccggggacgtaaatccaactccctgatgaatctatgcggaactaaaactagtccgaagctgtacaaacaaccggcaacgaagtcgaaccggggcatcatcctgaatgccgtcgagtactgtgtcttccccggcgcggtgaaccgcgaggccaagcagaaggtgctggagaagatcgcccgttcggaggcgaaacacttcctggtgttgttccgcgatgcgggctgccagttccgggcgctgtacggctactggccggagaacgagcagatcatcaaactgtacggaacgggaccgagccaggtcgacgatgtgatgtttgataagttcttcaaatacaactccggtggtaaatgtttctcgcaagtgcacaccaaacacctcaccgtgacgatcgacgcgttcacgatacataactcgctgtggcagggcaagaaggcgaacctcccgagcaaaaaggacatggccctggtgatttgaagcggccgctgatcggcggtcagttacacaaaagtgctataacatgtgctgtataggaattcctgcctcaggaatctcgtcgttccaaatccacaatcgttcgctctgctcctgctgagagagggaagtaggattctattctgtgtgtgtcaaaaccaacaactagtaaccaacaaaaaaaaacaggaaagggacagtatttttcttcctccgtgatattgtcgtcgtgcgcgtttgtacgtttgtctattgtttttctgagcctcattgtgttgtaatcatgaccttataacgcggattgagaacgccaggcgaatgtgcgtgcgaagccagaggaatgtactctagtgaatgtgattcaacttaaggattagggactgcgcgaaacgaattgattatgctttccaggagaaacttgattgaacaagttccgcttgaccttccgttgcctagaaagaacacaatctttaataatccataaccattaaagcatagagtcccgtttgctttcttgtgttttctctttgtaaaaaaaggtagcttttctcttgtaaaattctaaccactttccgctgcatgctgagtaagtagggaactcaaacattaacgactgttgtatataggctattatcgatagttagctagcgctctcttccttcttctaaagttacgcgataaaaaaaagttaagttcatgttcacgcggaaaggccacttttaggaaatcaaattatcattgaacaaaacaaagttctttttgttactaccaacactatcgattgcacccaaatcaataaacgtgtagcaagt

SEQ ID NO: 1288 - DNA, 2312 bp, Aedes aegypti
atttggaaccggctcgaaataaacaagccaaaacgtcaatctcgctcgtggatcaagggaggagaggcgcgcacaccgcagacgcatcatccgccagtcccccacccatgttattcggttttgctgtcgtcgcattttcctacacgacgactaactacttcacgcgtagtattttctggagcgaagaaaaggtgatcaagagagtgcagaagaaagcagtttataacgatagcctccacagctggaatataagccaataaaacgatattaccgatggctgataagcggcgccccaagaaacgcaaagatgaatacactggtccaggcggtgccgaccaggaactcgacaaagccaccaaagaagagtacaaggtggcaaaatggctcaaatcgaacgtaccgaccaagaagaccaaatttctgaaccacaatgtggaatatttctcagcggtgcgggctgtcgatgccctgatggcttcaaagtttgcccagggtgacaattgcatgtttccccaccgtcaggcggtactcgatttcatggacgaaatgctgcaccacaagtttttccatcgcgccaaaaaggttccggtaagcgaacaggaattgcgcggtaaaagcaagaaatccgacaaggaacccgagaaggaaaagcccaaaaaagatgaaaaaacaaccgatggcggcgaaagtagccacgctgaaggtggcaaaggagataaggcttctgcggacaaagaaaagcgcaaacgcaagattcggttggaaatgcatccggaacagttgttcgtcgatggccacgaagcgtacgtctggttgtacgatcctattccaatgcactactggatctttggtgccctgttggttgtcggagctatcgtcatatgtctgttcccactgtggccacctatgctacgaaagggtgtctactatctcagtatagcggctgccggctttttggtgtttattctaggattggcagtgttgcgatttgtccttttctgtattgtgtggattctcaccggaggcaaacatcatttctggctcttgccgaatttgaccgaagacgttggattcttcgcctcattctggccattgtatgatcatgaatacaaagacggaagctccgagaaggacaagaacaaaaagaataaaaaacgaaagcgcgacaaagatagcgatgccgaagacgaaggcacggctgcggtaaatgttccgcagaagatagaggaaaccgcggaacctgatgccgagcaaaagaaacaggattccgaattgcgacaccgaggaaagggcaaaacggctgtcgctgctgaaaaggtggaagaaacaacaaatgccagcgatggacatgaggacgacgaggaaaacggtgttgatgacaaacactcaccatcagaaagtgaatcggagagttcacaacggtcctcaactgggaaagatttcgaaatgttggaccatgaagaggtagaaggatcgtaaaacacagcaacatcccaaacagaacctgatatcgcagacaaacagataagttaatatgataacaatgatacaaacattttaaaaatgggcacattaggtgaactgataatacagcaaccgacatggataacttggtatattgacatccactagacgcagccacactattattgtatttataatttatattttaatttgtttttaatagttgcaacaaattgagtgaataaattagaacacattttcaaattgtaatttagtactacaatgatttgggtggttattggaaccggtgcaacttctcacgtggttggagcattatttgctgcttcattaaagttgtagaattcttaactacggcagatatccatgcaataggcgaacatgaatgaatctacaagtagaaactaaaaaacatatacgaaaactgcagaaatgttgaaaccccttgaacatggtcgatttatcaaataactaagaataattatcaatacgtgcatcgtttggcattttagatgggtattacttttcatcacatattataaggggaagcgtacaaacacattgaaaatgcaacaaatgattcaagatttattccatcctgctttcttgttcgacaaaaataaataaataaataaaagaaacaaagtaaaaaacaaatttatccaggatgatacttttgctaaaggagacacaaaatcatccctgtactgataacagaagttgcaatgaaaatatttaattgagtagtaaaagatgagttttgaaacttctttgtgcaagcatcggtgatgcggaaaataaataaaaatatatatagacattgaaaacaa

SEQ ID NO: 1289 - DNA, 1399 bp, Aedes aegypti
aaaaaaggacaaaaaaaagtgcgatcgtcgtcctgaactggtcgtccctcagttctgaacgtcgtttattcctgcattagcattccacgaaccaaggcaaaagtgtgtgtcgagtgaaaactgggaggagtcgcatcacaaattcatagatcatcctttagtggctcgaaatccagtagtgctgtgttgacacaactctaacagcattgttaacttccattccttgagtgagaagcgtttccatattccgaacaaagcaatggcagagataaagccggaactcggggaaatcgacagcgatgctgaacagaactattccctcggcagtaacgttgatccgaagaacatgcaagagttgaccatctacgttcagaatctcctccagaatgtgcaggataagttccagaccatgtcggaccagattatctcccgcatcgacgacatgggcactaggatagacgacctcgagaagagcattgccgatctgatgcaacaagccggcgttgaaggtgccgagaagtgaggactgccaggattcggatgggaacaaaagatttatcgcaagcatgatttagtttcgggataagtttccctctcgtcccgtatcagaacgtgtgacagtgtcatatttgcgaaaaaaccaagtttttctgctggttagggtatcacggtgtgtcttgaaccgttgttaacgaataaaatggccatcaatcagtatcgaccattcgaaagatatggtatccagtgatttaaagatagagggccattttcaaaataaatatttctatgttggataaaatatatttactgcatcatttattttttcagaattaatcaaaccatcaagttcacattcaaaagttgtggtatcttagcatcttccttgtaaattgaagacatttcgttgacggaatcaaaataaccatgataatttaatgattccacaaacggaatgtcttcaaaaacacaagggagatgtttagataccacatttttattgttgaatgtgacctgatgataaattaataaataatatttatgatagcgtgtgggattttttttttatcaaacatgtaaatatcccttgaaaatggttttgaaatcttcaaatcgctgtaacttgtgaaaatgttagaatctacgaagagtatgcttggataccatatctttcgaatggtgagtgcagaattgatggttattttatttcgtcagtaaagcttttagacacaccgcgggtatgattgggagtcatggcattatcgacaaaattcatccattagttttattgaatccaccttatacaaaaaacgaagggaggaagagatcacacaatcaaacaatcggtacgaagtaagccaaaaagcaaggatacaaatttaaatatagagcacgcagtaat

SEQ ID NO: 1290 - DNA, 1632 bp, Aedes aegypti
atgactgaagcgaacgaagatgacgacgagagcattgcgagtcagaaaagtcgagtgagcagtaaggataaagttaaccggtggataaaggatcacgttggcatgttagaagacagcgacggtcaaccttatccggttggtggaaaatcaggatctagggaccccccagcgaaaccagcaaatagggtggaagaaggagcaaagcgccttgaaaccccacttacgtcgttgggcgaaaatgtcggcaaatctaaagcaacggaagtactgaaacaaggagccaccacatcgacgcccaatcagccaaatcgtttgggaccaccagaatcgtttttgcagatgcaacaagcacccgaacgaccatcgaaccaggaagatctgccggttccgaagcagcacgctttgaaatcaggaccactgctgtcccaccaaatccaccaaccagttttccagtcggtacagcagcaagttccacgatctgcagcatggccaccgaatcagcaatcggagccgtggctattttcttcgaaaccacccttagtgcccccgagtcagcaatcagtactacttccgctgggccagcaaacacgacagcccacctcgacgtcattcccaccatggcagcaatctgtctcacaacacgccgaaggtgtgccggtggtgccaccccctcgaccgcctcctggatttccgaatccactaagcagatcgctatcgtttcaacccgatcagtcccaagctgcatggggccaatttcagcagcagctggcggcaaggcaattttccctctcgcccacccacaggaaggaaccactggtagtgatcgatctgctgacggtgattagttcgctgagtggtccaacgaatgagcagatctacggttgccggaatcagttcgccgagtcgcatgcggatcaattttgcgaccggatgatcgaggccggagctcggttggtgttttttatcgacggcatgctccaagtggagaagtataggcactggatccaacggcaggagaaggtctacgtggaatgtctgaagaaggtggaggattcgagtcgaggattcaagcagcgcagtattggcggcaatgtgacaaagcatgccttcatttcggcgctggtggccgcggccaggaacaagggaaccctcaaaacgtcgtacgatgtggagtgcgatcgggagatggcggcgtatgctaggaagcataatgccttggcgataattaccggggattcggactttttgattttcgagggcaatttccggatctggtccagtctggatctgaatttacgccatatgaatactaaggaatggaaccgaggcaaactgctgagcgctttgggattaagccagaaacaaatgccgttctttgctgccatagcagggaatgatcagttcagaaagcggcctggtggaatgcgctctctggagagcgtagcgcgaagggtgcgtgaattgaatttgctgcaccgaagcaccaggattactgaagacctgtgtgggaagattttcaaccaggggaatcatcagtactcccatacgagcagttttgaggtcgcagttaatttttatgatacgttagttatctctaagccaccgatcagatcgcatgtgaagttgaaatag

SEQ ID NO: 1291 - DNA, 2837 bp, Aedes aegypti
atgtgtgactctgataacgaggaattcgaaagtgctgatgaagatttcgaggatgtgaaaaaaacgcagaaggtcgtcaaattgaatccccttcctccggctccaaagtctgacgtggagcctgcaaaaattgatggcgatagcgctagcgggaagctgaccaaagatgacgatgttggtgctgaccttgaccggctggacaagtccgcagaagaacctaagaaaagtgcagttagaaaaattattagacctgataaagagcggctgaaggaagccaaactggttgtggccaaggctggaggagaaccgaaaactgcagtgaagcagctggagcctacaacaactggcgatggctgggatgacttcgatgacgattggggagatttcagcgtggattcgagttcgggctctaagaaaaccaaggaagtggaccaaaaaaccgcgggaacgaacgccagctacaaggatgtggacattgacgaggtagaaaacaagctgaaagattttatgaaagggcaggacgatcctccggtgagttccgtgctggatcgtttgtctaatcagcaggatccgagcaagtcggcagcggcagggcaatcttggagtgggtggaaacccagctggggtggtgctgctgtatcgtttctttcgtcagcgtcgaaaagtgtcgcctcaattacgaccaacatttctcaggcgattgaatcaggaattggtgttcctacgccggaagagatggctaagcgccaagcggaggaaaaagctaagctcaaagctgatggttacgtaccggaagagagtcaaccgagaatcgaacctggaccaacgactgatcgctttggatttgatcagatcgtttcgggtgtgacccagataagcagtaaagtcattaccggtggattggatactttggaagggatcggtaagaaaacgatgacgattctgcaagagaacgatcctggattgctgagtaaacgaatgaacgatggcgtcgttttgagtcaggtactgcgtgaagccaaggaaaaaactgaagagcgcgaaaaaaacttgaagcaggtacaaaagcatctttacaaaaagaagctacactttgaaacccttttcgatgattatcacggtttggtgcacttagaagctctggaaatgctttccaagcaagcttctctaaaactggattctttaatggtaccacttactggaaatgccctcgaagagttacaagaaaccatgaacgaagtcaaggaactttgtgaactgccggattcggaaaacgacgacgctgatggtacccatagcgttgaagagttggaacaaaaactcaaggaagccgttacggacctggatgaggtgaaagtcgacttccaagatctactcaaatgctggcaggagaacctcgaatggatcgaaaacacttcaaccgtacgatcatcacagcagatcttcgaaaaggccttgcatgcgctcgcccaaacgacagccctgtgcgtgctgcggatgcacaaattggccgaaattctgctaatattagatcatcacagtacagccaacgaggccgacgccttggtccagctcactaccgtgttttgttggcacttgagcggagtggcagcacgcttttcagcggagttgagtaaactgaaagcggaccatcaaacgcgccggtcggcgggcgaggatagcgataacgcactgataacgaacattttcttagagggttccaacagtacttcttatgtgcagaatgctttccaattgttcatcccaatactgcaaatcggagcagcgtagtttgcattcgtctagcatgaacgcttataaacgcgagtgtttctaatctaaaatcacggtgttttatcggtttaaatatatgaaagtttattactcttctcgtaatacctatttaattattctgaaagaaaacaactatttaactgaagtgaattccctctgaattgaacgcatgtaggactgccataaagtcatcgatatccatggtccgagctcgtttggcacccgcatcgatcttcgccaggatgccttccaccttttccttgatgctgaatccctctggcaaatcttgattcttgagtgaacattgcattttgaagttctgctccagtgctgtcatgaccgaggtttgcttgaatgctgccgccaacgttttattcttgcgcaggaaagctatcctcgtaagaccatcccactcggtgtagtttatgggaggtgatggatttctcggctcgattcgcaccacactgctctccacttttggcgggggtcggaaattgttctttcccaccttcatcagcatatcgacgcgagccagaagttgtgtgttaacgctcaatctacagtacaatttgtcccccggtttggccaccaggcgttgagcgaattctaactggaacatgagcaccgcgcagcggaagaacggtctgtgcagtaaaagcttaaacacgaacggtgaactgatttggtagggcatgttagcaacacaacagtcgaaaaacggcaaatctgctttcagaacgtccccgataaggatctgtagcttcgattgcattggagtgccctgaacacgcttctggagttctgccaccaatcgaggatcgatttcacaagcaacgacttttttgaccttttccaacagcttcaccgtcatgttaccggtaccgggaccgatttccaggaccacatccgttggccgcaggccggccttgtccagcatcgatgtgacgatgaggggattcttcaggatgtgctggccaaagtccttatcgatcataccttgtttggctacatccgtgtggactcgggattttttgtctgcacgt

SEQ ID NO: 1292 - DNA, 1450 bp, Aedes aegypti
gctatggaggaagtgcagcgccattcagtgcacacgctagtgttccgttccttgaagagaactcacgatttcttcgtggcgaatcaatcgctgctcccggagatggatgaaaacctggaaaaatctaaatattccatcaaagcgcgcgattcatacggactagtgtttgatcgagtggccaatgccaaaaatgtatccatcagacgaagcgaagtactcagaacggaagccggaccaaatccgactcaggatcacatgctggcgatcactgccggaggtgaacaggatcaaggtgcaaatacccaatccgctctgctgccagttggtgcgtcacagagcagccagaatacaaactccaacactgtccagatactgccaaaaaaggcacccacaatcccgaaaccgaagtggcacgccccctggaagctttgccgtgtcatttccggtcacttgggatgggtacggtgcgttgcggtagagccgggtaacgaatggttcgccactggggctgcggatcgggtgattaagatctgggacttggccagtggcaagctgaagctatcgttgacgggccacgtaagtaccgtcagggggctctgcgtgagtccacgacatccctatcttttcagctgtggagaggatcgtcaggtgaaatgctgggacttggagtacaataaggtcattcggcactaccatgggcacttgtccgcagtgtacaccatggccctccatccgacgattgatgtcctggtcacggctggacgagattctaccgcccgagtgtgggatatgaggaccaaggccaatattcacaccctggggggtcacacgaacacggtggccagtgtggtttgtcaggcggccaatcctcaggtgataaccggaagtcacgactcgaccgtacgtctgtgggatcttgcagcgggtaaaagcatgtgcacgcttacgaatcacaagaagagcgttcggagtatcgtcctgcatccgtcgctatacatgtttgcatcggcctcaccggataatatcaaacagtggcgttgccccgagggaaatttcattcagaacctgaacggtcacaactccatcgtaaacacgatggcggtcaatccggagggcgtgttagtttccggaggcgacaatgggaccatgttcttctgggattggcgcaccgggtataacttccagcgcttccaggcggcggtccagccgggttcgatggacagcgaggcgggaatctttgccatgacgtttgacatgtccggttcgaggctcatcacgaccgaggctgacaagaccatcaagatctacaaggaggatgacgaggcttcggaggaatcgcatccggtcaactggcggccggagatcatcaagcgaaggaagtattaggagcgagggcatgtgatttgtgtgcaaattgaccttgattttttaatattacagttctaaagtg

SEQ ID NO: 1293 - DNA, 910 bp, Aedes aegypti
atgttaagcgaagctttattgaggaaaataaagagacgaggcagtggcagtaatctccccatggcgatgcgctatcgaacgctgaaagaaacgtccaaggaatcggtgggagtctatcggtcgcacatccatggccgcggtttgttctgcaaccgtgacatcgaagctggcgaaatggtaatcgaatacgccggtgagctgattcgttctaccctgacggacaaacgcgaacggtactacgacagccggggcatcgggtgctacatgttcaaaatcgatgaacatttcgtcgtggacgcaacgatgcggggcaatgcagcacgtttcattaaccattcgtgtgagccaaactgctactcgaaggtcgttgacatactgggccacaagcacatcatcatctttgcactccggcggatcgtccagggagaggagctaacgtacgattacaagtttcccttcgaggacgtcaaaatcccctgctcgtgtgggtcgaagaagtgtcgcaaatatttgaactagagcagaactggattcgcattaagcaatggagcaaggttttagaacgagaggcgtagcagaagaagcaataggtgtaaccgaccatcggatacaggttgatttaaggaattttgcatggaaaaaataccaaaggtgctgttttgagaaagggaaaacaggaggcgatcttttttttcgtaaacgatagttgaaaacgtgtgatatttagaatgcatcacagtgtagacgaaacgcaacatgttgcgttactcgcgacagccatatgtttaaggtgaaatgtttccttttttatcgaaacctaagcgtacacttgtgtgtttgtagatttgaatagtagtgtctccaaagtacgtgtattataacacataaatacattgtgagtttttcaact

SEQ ID NO: 1294 - DNA, 1056 bp, Aedes aegypti
atgaaaaaaaaaatgcaaaagcatgatgctatattttatgttactcatcttcaggtttgctgcccaggcttacggttctcacaagatactataactacctctaccactaccacccgtgccacaactactactgctgccagctctggaggatttttcttcttctccggtccttcgtccagtgcttcaaatccaatcacaacgaccctgcttccgccacagccacagggcccctacaaactaccgatcaattccgtcgaccgctgtggaatgtccaacgcttcacattctcgtgttgtcggaggtatggatgcccagctgggagcttggccgtggatggctgccctgggatatcgttccagtaactatgatcttaccaccgggcctgtgtacctctgcggaggaactttgatcaccgccaggcacgtgttgactgcggcacattgcattcaaaacttgctctattttgtccgattgggtgaatatgatatcacttccaacaatgatggtgcttctccggttgatatctacgttgaaaaatcattcgtccatgagcagtataacgaaaggaccattcaaaatgatgttgccctaatacgtttgcaaagcaatgcgcccctatcggatgcgatcaaacccatatgcttaccagtggaagagccaatgcattctcgcgatgtgacatactactcgccattcattgccggttggggaacgacatcctttcgaggaccaacggcatcccgtttgcaggaagttcaggtgatcgtccttcctattgatcagtgtgcgttcaactacaagctgtactttccggatcaagttttcgatgacaaagtgctgtgcgctggatttccccaaggcggaaaagattcatgccaaggcgatagcggtggaccactaatgttgccgcagctctccaacaacggccagtactactatttcaacctgatcggaatagtttcctacggttacgagtgtgcaaaggctggtttcccgggagtttacgcgaaagtcagtgcgtacataccgtggatcgaatcgaaactgaacgcctga

SEQ ID NO: 1295 - DNA, 1362 bp, Aedes aegypti
ctcattacgcgcgcgcactctcagcccggtggtggacaaaacaaagaaaaccttataatgtctgctctcgttgtcgttgtcaccgttgctgaagtcgcggtcgggcgcattttcatcgcatcgaagcgaggcgagagctcttaaacggcacgaaatcaatttcctgccgtcgatccggcacgcgacatttcgcttttcttctgaatgtgtctgctgtcactgctgcgctactgggggttttccccatttgttgctttcttcgtttgttcatgtggaaaaattgctccgatccagttcttggaccccgtcgccgtcgcgctagggtttaccggtcgcacttaataaaattatgccctatctgtataaattgttcgccccggatctcccgctgcttcagttgtgctcagacaataaacagttccggacccgggttccgcctcaggcagctgctcagtttgagaatcgagaacgagaatcaatagtcgagaatggagaaatcattggtgggactgcttctggtgttgctgatgggattggctctgccagttgagtcgaaagatgcgctcaaagactgtctcggcgtgaagaactctatgtactgtttcggtacaaaaattgtgcaaaatggactcaagcgattggccagtgaaaaatctttgcaaattatgccaggacttgagatagtggaggctgcgcctcaaggaagtgccgaggaaggataccggtcatacaatgagatcaacaacgaagaagatacgggagtgttgggacgggtcagccggtatttggccaatcatgaactgaaggtgaaccttggggaaatgatgcgaaagaatgatctccagaatgtgctgagaaccatccaggatgatatggtgggcgaaatggaagaggcccgcaaaaaggacaagggtggtatgggagccattctgatgatgggagtgatgatgagcaaaatgttgggagcgctcggcttcggtagcgtggccatgctggccatgaaggccctcggcgtgtcgatgatggccctgctgctgtccggtattctgggactgaagaaactaacggaaggaggcggcgatcataagggccgtcacaatcaggacgtcgacttccaggtgttttccggcgattcttcctcgggaggacactacgacagcccccatgatgactccggccatcgaaggacgtccagtttggcgtaccgagggtggaacgaggagtataagcggctgtgagaagctgttgggtaagactggaatgctgcatcggacagtattgtgagttatcgtgaggattactgatattttgaaagattgttatttattttagaataattttcgacattatttatttatcaac

SEQ ID NO: 1296 - DNA, 1098 bp, Aedes aegypti
atgggtttgttggttaatcgcagtcgggtgcttgatttacggtggtcgttagcactgtccttggtcgtgttggctactctggtacgaggcgatggattcaaactgccggatcaaacggacgctgctgtaggaaaggcagccgttgatggcccatccgtggtaccagctaccggagaaggtcgtcgtcagggaaaacacctactggacttcatcggcctgggtaccggaggaaacgtggacccctacctggctcgaaccaacgctcagtgtctgaacggcgaactagctgattgtttcaaatcacaagctctcaacacgttcacggacttcttcgcaaaggatgtctaccagttaacatccaacgcccgtataactcgcctgccggaaactcagctccgatcattccagcaagatccgttcgagtactcggaagaaccccggcaactagattccgaatgggaccaactctacaagttcggcctccgtcagctggagcgcttcgtcaagtccactgccctcgagttccaaatcccagacgaagtcaccgaaggcggccgttaccaggcgcgcttcatcgatgaaatttccgacgaaatcgacgtcatcgaggacaagaaagctccactcttcacccggcatcgcctgaagaaaatcttcatccctctgctgatcatcctgaaaattttcaagctaaaactcctcctcttcctgccgctgatcctcggactggccagtttcaagaaacttctcggattcgccgccatcatcatccccggtatcatcggatacatgaagttgttccgcccgaaccagagttgctgctcaaacgatctcttctccaacagctaccagccccagtactctccgcaaggactgggctccgtcagttacaacccattcaaaccctaccaaaaccaatactcccgaccggagcccaactttgccgctccttacggcaactactaccgagacagccacgagctgaagaatggaggaggaggtggaggaggaggaggagtcaagttcggagatgaccaagcctaccagggatactcggagtaccgaagcaacgataaggacatcaaagcggaaaattaa

SEQ ID NO: 1297 - DNA, 1338 bp, Aedes aegypti
atggaaacgagacgaaggcaaagcagacgaactctgctccgacgatgcggacatcaaacgatatgttttgcgttcctagctttgacggtttccctgttacctggcagccatgcagtccaaagctccgataaactccggctcaataacaccacaacagcaaccataactaatctgaatctaattagctcaactgcagcaccttccagctccaattccagcaccgacatcggaatgctggaagagctggagtccgttctcgtaaactacgtcaacgatgcgctggatcgaaattacaacgaaattctgacgggaatttcaccggccttgacctcgaggaacgtgtccagtccggcgggaaggaacggaaactatggctacagcagtattctgaacggtctgccggagctgtccgagttcgatcggaaaattgtccaaggggtggcacgtttcgtggatcggaggtttttcagccgggagaaaatggcccgggccgtcgagagtgggaggctgtttttcttcaaaggactgaagaaaatcgtttggccgctgctggttggtctgcaaatcgttaagactgtcctcctggtgctgttcctgcccagtatcatcggatcgttgggtaaaatcgtcggcaaaggattgtcatcggtgtcggtgctatccaatcagcccacaacggtggaagatttggacttcaaggacaattcctataactcggatcaggacttcaacatgaacatggacaacaacgcttatctgccaccgctggatgctcaaccggccgggacaagctacaacatgatgtacgatgcgaacaatgcaaacgccgccctgtccagattgggtttcggaggcggtcgggtgacatatgtcaacaccggaaacgactacaaccggcagcagaagcgaaatgatttcaaaattttccatgacatcccgagcagcagtctgctgctgacgaattacgatccgttctacagtccactgctgtcgcggctagatgccgtttttgcccagatgggtctgtccaataaagaggagaactgtcgggaaaagctggtgtgcctgatgtacgccaacccggcgaagtatgcgccgtatagcaatctgatatcggcacagctgagcagggaactgaacgaactgcgcaaaccaacgaacgacaacccggacatcttgcggtttttcaagtacatgcgagcggccaaggacggtcaagacggagtggactgcgagcgggtgcacaaggactgcggcacctacaacgatctgtccaatccggccatggtgacaacgttcaacgacatcaacaaactggtccaggcccgtaagctgtag

SEQ ID NO: 1298 - DNA, 1157 bp, Aedes aegypti
caataatagtggcaaactgtgtttcatacgtgtacattgtggcttgttcctaaaaaccgaaacttggtgttctaactccttcgattatatttaaacaacaaccgacaatgagccaatcagaggaagaaacttcgggaactgaatctccattcctcaagtcacgagcagttacccgaagtgaaagctcatcggaggaatacgaatcggagcaggatggaagcgtagatgaagcggaggaacagccagatgaagctgaaaaagaaactgtgcaacctaaagtacctaaggcagacaacgtattatcatcggctccaaagcctaacgagtcgtcatcgaccccaaaaactgcaaatcgtgcgatacgtcctgtcgtggtaaaatcaaagtcgtacgatgtgatgttgttggaagcaatgaatgccctcgacgagaacaagaaaagcggtgtctcaataaaaagtgttatgaagtacgtccaagataacattaaagtaagagaaaacttcaaaatgcacatgttcaaaaaggccatcgacaaggcactgctggcagatttgtttgttcacacttctgggactgggatgactggttctattgctttctcagccgcacagaagaaatcaaggaaacttcagaaggcaaaggaaataaaagctgctgagaaaaaggccatttcggatgccaaaactaaggaaaagcataaaccgaaagctatcaagaaagcttccaaaccaaaaggaccatcgaaggataaaaataacaactccactgaagcccaaggtgcttcgaaaaaaacaactggaaagggcaagaaagccagactatcagtaacacttctacctaccatcaaagctaaacctaaaccaaaagcgaaaccaaaggcggctcccaaacccaaatcagaaccgacgaaagccacgtcgagcaaagagatgccgaaggcggtttctacggaagcggctgaccaaaataccaagggaagaacaagggctggcccagctaaaccaacagccacgaaagagaagcctgcgaattcgaagaagtaggcgtgttcattagtcatataagttaaacacattttcttataagttaatttaaagttggaactatgaaagagcatgtaataaattaatgtattttattgtttgactgtaatc

SEQ ID NO: 1299 - DNA, 2930 bp, Aedes aegypti
attcctgtcctgttcgttcaagagttgagacccgtgttaagtttgctcgtggccattcctgccggattattacccaaaaattttaatttagtgctatcccagttcaagtgttttttgtaacagcgtgttccggtgtagtttgaggacgtgaactttttgtttcactgcaaaaatggttctcaaatcgaacaagatgtacgtcttcaagcgagatggacgcaaggaggaagttcacttggacaaaattacatcccgtatccagaaactgtgctatgggttgaacatggacttcgtcgatccggtcgcgatcaccttgaaggtaatcaatggactctactcgggcgtgacgactcaggaactcgacaatctggccgcggaaacggctgccaccatgacgacagagcatgcggattatgccatcctggcagcccgtttagccgtgtccaatttgcacaaggaaaccaagaagcacttttccgatgtgatgcatgacctgtatatgatggagaatgaacacctgaagaagcgcacaccgatgatctcagagttccactacaaggtcattatggaccacgcggaccggctgaattcggctatcatttacgatcgggactttggctataactatttcggcttcaagacgctggaacgatcgtatttgctcaagatcaaaggcaagatcgtggaacggccacagcacatgttgatgcgggttgccattggaatccacggcgaagatatcgacgctgccattgagacgtacaatttgctgtcggagagatatttcactcatgcttcgccaacgatgtttgcggcggccacctgccgacctcagctgtcgtcctgcttcctgttgaccatgagcgacgacagcatcgagggaatctacgacaccttgaagcagtgtgcgttgatttcgaaatcggctggaggaatcggcctgaatgttcattgcatcagagcaaagggaacctacattgctggcacgaacggaatttccaacggtttgattcccatgttgagggtgtacaataacactgccaagtacgttgatcagggaggtaacaagcggccaggtgcctttgccatttatctcgaaccgtggcatggcgatgttttcgagttcctggatttaaagaagaacaccggcgctgaagatgtccgagccagggacatgttctacgcgctttggattccggatttgttcatgaagcgagtggaggctaacgaagactggtgcttgatgtgccctcatgaatgtcctgggctatccgacacatggggtgaggagtttgaaaaactgtacacatcatacgaagcggaaggacgatacattcggaaagtgaaagcccaagatttgtggtttgcaatcatcgagtcccaagtggaaaccggtgttccgtacatgctgtataaggatgcttgcaacaggaaaagtaatcagcagaacatcggaaccatcaagtgctcaaacctttgcaccgaaattgttgaatactcctccaaggatgaaattgctgtttgtaacctagcgtccatcgcattgaacatgttcgtgaaacccgacaagacatatgatttccaaaaactgaaagaagtagcaaaaattgccactaagaatctcaacaaaatcatcgacattaatttctatccagtgccagaggccaagcgatccaatatgcgccaccgcccgatcggaatcggtgtccagggaatggccgatgccttcattttgatgcgttatccttacgacagcgaagaagctcaaaaactgaatcagcaaatcttcgaaactatctactatggtgccttagaagcaagctgtgaattggccgaaaaggagggtacctacgaaacctatccgggatgtccggtgagcaagggagttctgcagtacgatatgtggaacaaagagccaacagacatgtgggattgggctgccttgaaggaaaagatcgccaagcatggcgttcgcaattccctgcttctggctccgatgcccacggcttcgacggcgcaaattcttggaaacaacgaatcattcgaaccgtacacttccaacgtttacaaccgacgagtgctgtccggagaattccagattgtcaaccatcacctgctaaaggatctcaccgagctggatttgtgggatgacgacatgaaaaaccgaattattgcaaacaacggatcaatccagaacatcgaagaaatcccgcagcacatccgcgatctatacaaaaccgtgtgggaaatctccgtcaagagttgcatcaagatggcagccgatcgtggtgctttcatcgatcagtcgcaatcgttcaacattcacgtggctgagcccaactacggcaaacttacctcgattcacttctacgggtggaaaatgggactgaagaccggaatgtattacctgcgaacaaaacccgcggtcaatgctatccagttcactgtggacaagactcgattgaatcagtcaaatcgtatcaataacagcgacaccgttaacggatcaccatcgaagatgaatggcgctacgagcaccccgagcaagatgaacggcacagccactagcagtgcatctccggtcaaggcatcatcggacaactctcaacagcagttgaatgggtcccatgccgagcgtaaccgaaggatggccgagatggtttgctcgctggaaaataaggaagactgcatgatgtgcggatcgtaatctgggacgcgcatgaaatgaagtgtggctaaatgatgcttacttaatgtatagactctagtgaggttcaccgtaaaaaatcatttttggacatttcattttgatcatctaacttctattttattaaagtaatttgaatgtacctatttcactgttttgtaacattcttaggattaagttttaaatgataacctctagaatataccaaaattactatgaacac

SEQ ID NO: 1300 - DNA, 745 bp, Aedes aegypti
tgtacatcagtgatcgattgcttcctttcagtactttctctgacagcgtggagtcgttgctgagctaagctaagtgcgattatattacttcgaatcataccaaaaccatacattaaatttacaacaaaatggcattacttccttcgattttgcgcgatttgatgggtgattttctggccaccccgccgcgcatatctcatctgattgagaaatcgttgctgcacgattttttgcccgatgaagatcaccatcattccgccattgatcaacctcaccggcataagcagctgaaggacgtggaagcggcaaaagctcaccatcagttgatcaagagctgcaaggatggcttttcggtcaatgtcgacgtttcccactttcaaccggaggagatttcggtccagcaggaggacggctggattaaagtcgagggaaagcacgaggagcgtcgcgatcatcacggttttgtgtcacgacattttctgcgtaaatatcgtctgccggagggacacgattcggacaagatggtttcaacgctttcatccgacggtattttgaccattagggcaccaaaagtggcggcgttggaggatgcgccgaaagacgccaaggagattccggtggttcagacgggtaaacgtgccaaggcaggtgaagaaaccgaaggagctgtcgaggagaatgatgccaaaaaagtcaaggtgtaaagagcgggacgctaacggaagttttgtattctggtcacggg

SEQ ID NO: 1301 - DNA, 932 bp, Aedes aegypti
cagaaacacgcattcgataaagtgattgtaagtgcaagtataaggtggaaacatttcactaatcagtgcaaaaaacacattcagagaaaaaagtgttatcaaaagaagaaaatgtcgctcattccgatcgtgttccgtgactggtgggatgactgctgggatactcctctgcgtacatcccaactcttggaccagcacttcggcagtggaatcagcggagatgatttgctaacggcactcaccacggcagctgctgctcagtctgcattgcagaatcagagacgctcccgctataacagaccatggcgcaattcaagccttgccgctcgtcaggattccggatcaacggtcaatgtttcggacgacaagttccaaatcaacctggacgttcagcagttcgcacccgaagaaatctctgtcaaggctacagacaacagcattatcgtcgaaggcaagcacgaggagaaacaagatgaacacggattcgtttcgagacaattcgttcgtcggtacgtacttccggctggacatgattgcaaccaaattgtctcgtcgctctcatcggatggcattttgacggttactgctccaaagaaggccttgccagaagcagaaggacccaaagcgattccgatcattcagaccggccagccagcgaaacaactgcaggattctgaaaagaaagcagtcgaacagcgcaaataagcatttctgagtgctgctacttgacaacgctacctcaatttgatgtcttcacttttaacgctaatcataatgattaactataagattcatatgtaattcgttcctgaactgaatttcttgaatattgtaacgttctaagttataatgttataaggtataactatgtgcttttttgttttatttgataaagtaattaaataaagcgttgattctgctgttgtattaat

SEQ ID NO: 1302 - DNA, 2005 bp, Aedes aegypti
atgccagatggcattaccgcccgaaatggcccatcattcagtgaaccttacgagaacagaaacatttgtaatggaggaagtgcaaccacacagctttaccaacagcagcagcaacaaaagcaccagtatatcaccagtaccccacccacctcggcatcttcttcacccgctaagaaatcatttccgtcaactccgacgcacaactttagcagtgcaacattctccactggagcaggaggaggaggaggagcaagtgcaggatgttgcaacggagagttcaagctctgtggatacgacggcggcaatggagaggactgcagcaccggcagtgttggcacatcaccggcggaaatttttggggtattgggattttggctaaaactgcgacacgacttgaagtccgttccctggaaacaattgagggcgatcaagatgaaaaatgcacgtgctgcaccaggctgtgcctacattcccactaagatcgaacacattgccaacgtcatcacgcatggtctctgggtgcttccatcggtatacgccgggttgaacctgttcttccgaagctacacaggcgcacagatgctgtctgccataatctacgggattgctctgacgatgctgttcttcgtatccaccttcttccattgtgtgttctactgcaaccggaatcgccaactaaaggacgtactgcaccgctgtgatagggctatgatttacatcttcatcgccggatcgtactacccatggctcagcctaggacacacttcccatccacagatagtatcggtggtcaagtggtgcgtctgggttatggctgtcctgggtatcatataccaacagatatttcatgaacgttacaaatgcttagaaacctttttctacacagttatcggtgtagttccgtcgctggtgatagtctgttggggccatgagtttacaggaatgactgagttgaaattgggcggacttctctacattgtaggaattggtttcttcaaatccgatggaatcttcccgtttgcccatgctatttggcatttattcgtagtcatggcttccaccgtgcactatttcgcaatactcaatcatctgtacccggtggacgtagttggtaccacttaaaaatgaacttctgtacccagaacgtgctttcgatttagttaattagtgatattgtccatgatcaccaaaaatgttgacatttaaaacgctaaaagcggttaggtaaaaatgtcgaattatgattattcccttcgtactatattattccctgtttcaagggaagtttatgattttgttcggatgttacatcactgtcccagaccctatgtcgaatacgataattgtcctttggtgttcattttccttatctattacacaccgatacagcataccaagtacaacctaaatatagcagattgtaaacagaaaacacacgcaggtccgttaccaaaaataatatccacttccggtattgaaccaccgaaccatctcgaatatagccctactgagctgaaagcgaaaaacatcgtaccatcggttttgtttctagtaggaaaattgtgatattcttttttgttctaggaatattttaaacccattttagatttaatttaggtttcctgagtggaagaaaaatatactaaaaaattgcgtaaatactggaatagttcaggaattgacattctttattaattcccgtcatctgcagtttaaaccaaatactcatttgttgtaagatacagcaacttatatgactcaaaacaacaattaccataatccataaggggaatagaaatagccatgtagtaaactgacacgtatcagatcaatttctattagacaaaaagaataaacagattagaaaatgcaactatgtatgtaactgtaccacctatactatagaaaaagttactattttgaacacattctgtgaaatatatcccacaccttctggaataggccccatgtcacaactgagaacaaatataaaagaaaaatgaat

SEQ ID NO: 1303 - DNA, 1390 bp, Aedes aegypti
gttttctgtgtcgaaaactgctgctcatttgtagagctccacaagaacagaagaatccccatttccttgtagctctgaaggcgaaagcgaaaggcaaaccataatacaacatggcggaccgaagatctggcggatctagccgtaacaatttcaacgaggagaaaagtcctgctgacattccgcccatgtcgcggctgttcatcatctgtagtaaaaccgtcacagaggacatcctgagggagcactttgaaaagttcggtgaaattgaggaaatctggatcgtcaaggacagacaatccggcgatgcgaaaggggtggcctatattaagttttccaaaacatcggaagctgccagagctctggaggaaatgaatggcaaaactatcggtgataattctcggccaattaaggttttagttgcggccaatcgacagcaaggctcccgtaagcaaactgataacgaagaagaaaaatacctacgactattcgtcctcatcccgaaggaaatgacggaggagtcgctgcgcgaagaattcggccagtacggtaccatcgacaacatcacaatcattcgggacaaggtaacgaaggagggcaaaggttttgcgtacgtcaagttcagtcgcttcacgcatgcagcgcgagcttttgaggaatgtgatgccaagtataaggcggtatttgccgaacccaaaccatcgcggaatgcttccgtgtcgtccagtgacaattttggaggatttggtagtggaagcggagcgccgaatggcttcatggacgaacgcagaggtggctccggaatgggaagttctggtccgatgatgggatttggagcgatgggtgcttcgggaagtgaccgtcgaggacccggcatgaacaacgatcggggagcaaatttcggattcaccagcagcggttattccggtcagagtgcgaatcccagtgatacatcgcttacagtactgtgcagcccttcgctgaaccaggatcagctgtggagactatttgatattatcccaggattggactactgtcagataaataacgattttaacaaccgtaacgtgactgccacggtggtctacaacaatgctcagtctgcgatgtacgcccgcgataagattcatggtttggaatatccacccggtgaacgcctcatcattcgcctgggccatgaaacagctaacatgatggccaacgcagatcccttcaacggcggaggtaagctatacattaaccatttttggttgaacctcactgtaaaaaagctgtaactttgtagagaaaagagatagaaatctgaaatttccgaactttaacatttgaaaataaagctttcaatgacctctatgagtggcaataattaataatgcattatgcattaagggtt

SEQ ID NO: 1304 - DNA, 1982 bp, Aedes aegypti
gcatgaaactacgtgagccgaacggaatgctaccagaaggataagaactattttaccacttaaaacgctagtgacgaacgaacaaaccctactacaaacagtactcctactacataaaatacaagtacctagcccccaccagatcgattctgaaaaaactttcagaatgaagaccgtttggactgtgcaaaagaacgtacaaccacaagaacaacccaaaaatcaagactttgcttcaaactgcatcgatcgaaacgtaagaaaacgctatggacctgtctggacgtcaaattcaaaactgcactcaacaactgtagaagaaacaaaagaatagaagcaatgaacatcgcccgatgacctccagactttcaagttacaccactttccgggacgagttagtaacaaaaaaaaatccaagggaaagaagacactttcccgacgagactggaagatatggtacaaatgaacgagataactgatcatactaaagttcgggagtgaaaagacgaccaactggactggcacaactgagaacgttcagaacactcacagagaattacgctatacaacgtacgcaccctcagcaacaaggtgccgcattttctgttacttctttacgttttctccatacggcagtttactcgatttcgccgaaaatttccgttattttattcattaatttttgattgtgttcgtttcgtcccaaaatattctaaaaatcatgttaatgtaaatcacattataaaattcattttacactttctcaacttcaattaataatttacaaaattacgcgattcgaatattactcataagatgcactaatttgttttaaattgtaaattaattgtagtcacattttaatgctttttgaatcacaaaaaaatgagattatacactaactcttgaattattctggcgaagacatattaagaccttatgaactggaacgatggataaactcacaaaagtaggtatattaccagcaacactattcgacgctatcgttcgctctcactatcaaaagtaacattcacattcttcatataccacaaacacacattattcgtgacttttgttttactgcagataatagaatgtagcaaccaaacagagagtacattttaactttgcaaactatgtttttatttattcgcaagctaagaaagataactgattttatataccgagattggaacaacaaagatttcttttatttttgtacatttgtattgctaaagatcatatttttacggtatggttagagatattgatagaagttttaaatactaaaccccctccggagtttaaacaatcctttagctgttaagcattacagtatcactatcattctattccatctcctcactatctctattctcaatcaaacaatcaattcaacaatcctcttaaccatcgatactgctattctttaacacgcaagagcaaactgggtaagatacgctagctgcgaacgtggcatctaacgtcaaaaagttgcaatatataagcttatttttggttctgcaacttatcccaactaaacatttccttccacgacaaacgacacagtcgtacccaaaaaaatgtggtccaattgattaatacaaacataaagaaacaaaatctagaggttcaaccaaacaaatattcatatttaggagtaagattggccaacagccgccaattcaatcatcgtttttttttcattcatatgacagagtatgtagagcagtttggacttcgggcgacagctccgtcgaaccgtgctgaacatcaaactctactgtataataatcaatagcagtataatatagacttcttcctgggtattttatatcattttgaactatgcaaaaggtgtatttcagtataactacacataacatatactattattacttttaccgcttagtatgcgcatgagtgtatcggatgacagcaacatttcagattaaataaaggaattaccaacagttttt

SEQ ID NO: 1305 - DNA, 583 bp, Aedes aegypti
atgcctccaatgctgtaccgcaaaatgtgggatgacgccccgaacaaatcccatcttccggatcagcacttcggtcaggtcgtaagcaccgacgatctggtggatgccctagcagcgcaccaacttcgcagaagacaacatggcgtctataatcggccatggcatcacaatggcgccatccgagacacaggatccaacgtgcacgccgcggatgacaaattcgaaattaacctagatgtggcccaattcaaaccagaagaagtttcggtgaagctctctggccattgtatcaccgtcgagggcaaacacgaagagaaggaagacgatcacggagtggtgatgagacagttcgttcgacggtacacggttccagagggacacgatctggatcggatcggatcgtccctgtcttcggatggtgtgcttactgttacagttcaaaagacgacagctgccgagcctcaggccctgcgcgatattccagttgtgcagacgggagagcctgcgcatctgacgagcgataggcacatgattcgtaacggaaatggcgtctcatagaaaggttttcaactaattttgaaga

SEQ ID NO: 1306 - DNA, 512 bp, Aedes aegypti
atgaccgttgcaaaatctgaaacgataaacttggctgtcatcgtgggcacgcagttgccctcaactcgcccggagtcggatttcacacttgatttaccccgggccgagcagctgcgggtcaaaatgaaaaaggaaaagcagtttcgaagccgatgccgatggttcttctacttcctgagtgtggtgttcttcctgctgtcggtcatggtggtcagtctggtgctaacccggggaaagcgaatgtttggcagtatgatttgaacaccccaccctcccctcatgaataatgtggtgcatttccggtgcaaaacgatatcattcggacggctgtcattccgagaagccggggtaaaactggtgctgctggacagtatgagaaatagtgatcgtccgttttgcgttttagatttgatgctgttttttctatgatttaatttattgtgatgatattttatttgattgataactgctaaacatgttgagtgaataattggataaagacatcaaagtat

SEQ ID NO: 1307 - DNA, 862 bp, Aedes aegypti
cagtaccatttcggattagagacaccagtgcagtgaaaatcgttgttctatcgagacgcatcaattctggcttccatcgaaaatgccgttcctcaagttgcagtcaaatgatggtgaaatttttaaagtcgacatccaagctgccaagtgttctaaccttctcaaagtgatgcttgagggtcctaatatagaaaaggactacgacgaagtggtgcccgtgccgaacgtgaacgctaccactttgcgtaaagtgctcgaatgggccaactaccataaatacgatccaccaatggaggacgacaaccgccccgtacacatttgcgattgggatcgagagtttcttagagttgacaaggaaatcctcatggagctgattctagccgctaactatttggtaatcaaaggactattggatgtaacgtgcgtagcggttgtcgacatgatcaaggaaacaaaaccaggaagaaccaggctgatgagaaatgtgttcaacattgacgatggattcgctgcaaaagaagaggccagaaacagtcatcgttgcagggaatttgagaaagaggagtaatgcttttcaatagttgagaggtttttgctacagagattaaaacaatggttgatgacataatcaccacaccaggaagaactaggcattatctgcctacctgtcaacgttgaaagcattttagatattgacattggtttcactgcaaaagaaacgtttatttaaaataatcactaaaacacaatgggagaaataaagtaatgtatttcaaaacttgaagggatttggctacagacactgcgaaaaagagtgacataagagtaatattctttacggttttgcgaaatgaacagaata

SEQ ID NO: 1308 - DNA, 537 bp, Aedes aegypti
atgttaaattatagttccgaactgcgattcaacggctgctgcgatcgaacattcgtcggtgcgagaatgttccaaaaccgttcgtttggcaaccactgcccaggaacgacccatcgcagcaagccaagtgcgcttcgtcatcggtcaccacggcgacgacgtcatttttgtgagggtgtcatttcgcgcgacatccgctccaaacactatttttccaattacactgccagcactgtggcagcttccagtattgcggcgtcgctcagcggactcaagtgggacctgcgcagcggacaatcgattagctatctagtgaataagtttaccgatctgaccgggatcgaacaggaattcatctgtgaatgcatggacaaaatggaagccctgttccaggagcagcgccgccgattaccccagtcaatgcacataacctcggcgacggctaccatcgtgtcgcaacacctccagcagcagcagcagtcctgcgtcaacttcaagtgtagttccacgactccgaccgacgtcatcgagttgtga

SEQ ID NO: 1309 - DNA, 979 bp, Aedes aegypti
atgcaggaattcatctgtgaatgcatggacaaaatggaagccctgttccaggagcagcgccgccgattaccccagtcaatgcacataacctcggcgacggctaccatcgtgtcgcaacacctccagcagcagcagcagtcctgcgtcaacttcaagtgtagttccacgactccgaccgacgtcatcgagttgtgaagcaccgtcagctcctgctcctcctaacgatattctgcctaccgtaatatctcatcagaagagaaaaagagagatatttccctccgtgtaagtaggcgcgcggaggttcggggatttcctagagtgtctttctcttccccccgtctctttctatcggattcacttcatcgggcatcgaagtaggcggcggcggcggcggccagagcagcgggaaacgcatcgcgcaaaaagtggaattttttgggtgctatatttttttaacaattaaatttaagaacgttacaaaacacagatcatgatggtccgcaggcggcggatcaaatcgaaagagcaaaaacgcgagagcggttgacgcgctttaggcgctcgcagagagaatttgaatttaaaggaagagaaaaaaagagcagagcagcgagagaaagagagaaagtaatacactcagagaaattttaagatcaatttttgagcaacggattacacaaatcgcatgtgtatgagcgaagtttagaggaaaaaaaggttgagaggtgaggttaggaacttggagcaaggaatgtacagcaaaacacgcacacattttcgtgagattgagagtgattctatgatagtatgtagtctctagttaggagtgaatgtgaattgcaagcatatcggtaaggttgaaaatgttacaattttttcttggttaggatctgtgtacatatatattattattatactgttagaagttagaaagcaacagtcattgaagctgcactaaaagcaactacgcaaaacactg

SEQ ID NO: 1310 - DNA, 1485 bp, Aedes aegypti
atgtttcggccggccggattctactccgactcggagggagattccgacttcgattatgacttttgctacaacagcacagagacgaaaaaagatgccactcggacggaatactcgccgccggtgatggtggaaagtaacgacgatctcctgtacaaagctgtcaacgaagcaaacctggacgaggtgaagcgggttctggacctggatccctatctactgacctgctgtctgcggcagggttggccactgctcctgctggcttgcaacgaggcccggttcgacatagtgaagtacctgctggaggtgaggcggctggacgtgaatcaagcgtatggcctaagtaccgccctgatgatgacctgcgcttccaaatgcaaccaggaagatgtgctgcgggtggcggagttgttgctggagttcggggctgtgattaactgtaaggactcgtatgggatgacccccctgatgtttgccatcgtgaacgatcacccggaagtggttcgactgatcattgaccagacttcgctggaagcgaccgacaatgaaggactgacggcgttgttccatgccgttaacaatcgacgggtggaaatggttcagatgctgctgaaggccggcgccatggtggacattgtcaaccggagaggatacactccgaagcaggaagcggagttcagagggtaccaagaaatagccgatctgttcccaagtgcgaagaactgcttcgaaattcccttcaaatacctgggctatgctcgctaccaagatataactcagggaaacacggaaagcgatgtgcccggctattaccaggagataggactacttctgtacggcatgtacagtgatcagcatttggcggtgtttgcaaaggaggatttcgatctgttgcggtttctgacgctcaccgatgacgatttgaagagtttggagtttaaattacccttcgagcggaagaaaattctgttcggcctgatgaagtttcaccggcagatctggagcaagcgcagtatgaagaagttttcccaggggcatcgatatgattcctacgacatcctcgaaatgctcggtaaccatctgaagcagctaacagtgctacacgcttcgctcattcatgttgcgcagacgatacctggcgaagcgttgaaaacccagttcgctccggaactggacagttgccttcgaaaggtgaaccaactgcagcagactgtgaccagctttggcgaggaaatcaaacgaatccacagcttgacggcacccgaaccggtgttacacatcactaaaaaccgttgccagagtgtacgcatttcctggtttacccaggctctcaagttatccctgctctcagcagttgtgtcgttcgtcgtctacaaaaaactaaaagcgtgataaaggttcctgttcgatttatgtattggattcaaaagtacaatagaaaaatatcttctatcttatgttattatgaaatgtaacatttcttaacgt

SEQ ID NO: 1311 - DNA, 814 bp, Aedes aegypti
atgctgttccatcgatccgggccaatggccggatatccccggggatacgccttcgtgacatatgaaaggcaaaaggattcggaaatcgcactggaggttctcaatggcaaactagtcggggacaaacatatggtggtccgctgggcgaaaaacgtcaatcgggacgagatggaaaagaccaaaccaaaactgcagattccggccctggccggaggttcaaaagccggtcccagtgggccgatgagtcagcaaacgaaaatccaggccttggaggcaaagctgaagatgatggaaagtcgatcggatgatttgatcattaacaaatcggctacaggggagcgacccatcatcgaaaagtatcaatataataagaatcaatcgcaacagcgaccggatgcttccaaaatgaaacggaacatgacgagaggaggtggcggaagaagcggtccctacaagtcgagtaggttcaagtgaagggatccaaaaaagccgtaagtagatagcgaaatttgtgtcggagatttctttctctcccatctcgataggttttagcggtaaacgttcaattgtgactcattatttttaaagatctaacgtaatatatacttaggcaacgaactaaaaagctacaagtgaaaagcatactgcagaagctctttccaagaactgacaaagaacctttccatgattcgcctattccttcatttggtagatgtatttccctcgcatgtgcttcggaacgggaaccactccggggcagggcagctgtccgggaacctcgcagatgcaatgctttgcgcagccgacgccaaag

SEQ ID NO: 1312 - DNA, 2088 bp, Aedes aegypti
cgacgccgttaatatgtttacaaaagcacgttttcaagaccaagaccaagagatttttgtgtacagaaaataatggtcgtgggcgcgtttttcttctaactctgcattatattaatgatggattattttgcgcatttaatcgcgaacaaaacttcggccgcgagaacggttaagattcgaaaaatctacatcaacgaggaccctactcaggaagacaccgagccttgtcccaattgtttggcgcgcagccaatcgagcaacgtgcggtacatgtacataaacctgcaggaggctatctataaatgtgaggcgccaaactgcatgtacccattccagaactttaagttcaaaaactacaccgacaatacagtttacgtttatacgtccgccgaagaaacgcctcccgctttggaagaattcgttgggcaatcgttccccaataatgctttatctcctgtgaaacatccgccagggcaacttccatcgatgaacgaaagttcgctcatagatttcagcttcaatttcttctcccctgagcgcagttcaagtaattccaacagggcgtctgaagagagtcccgccaaaaacgcatcgctgaacattttcgacagtccttcgctcagctacaaaaacctggtgcaggatttcgacaccggcttcatagatgacatcctccaggatctcaatcaatcgtcaacggagaagacatcgaaaccggttctggcaagtcctgtccgcgtagtggaatccaagtccaaaccgggccgtcagcttaaacgatgtttacagatgttcaaagaaactgcggttcccagcgatgtaacgttcaaagttcctcccctgcctggtgcagaaattcctagccctccaaagattaaacctaagaaacattctccgttgcgccgctcaaagcatgctcggcggacacatttgaccagtgggggatcctcatcggaaaaagtaccgaaaaagcggaacttgaaacctctagagttcattgaatccatcaacagtatgcgtccgaaggcagtcgcgtctccagaaccggaagtgaagccgtcgtgtaaccgaagggtggaaaatatgctcaacttcatcgaaagaagtatgaagaatcgacagccaaagccacttcctgccactactccgccccccgcatcacccccgaaacattccgcaaaacgtcccatagagtcacaccggagctaccgaaagacccacagatacatgtccctttcggaagccgtcctcaacgatcaccggttcgagtacagcacttcggaatcggaacaggaagacgcaccggaaacggttccctccccagtcaagtctgacggcgatgcgagctccgaatcggtaacatcccaggaggaccctcccaccatcccggatcagtcgtcgttaccttcgtttgaaaatctgctcatgcacattcatccgggggaaccgaaaatgcagcaccaaaatttcccgcctgtgggtttccgttcggccggatcttccccgacacgggttccccagtgggcgcaaacaccaccccgcaggatacacagcatggagtcgttgtgtgacttgttggaataaagggaaccgttgtcatcgataataggtatgaaaaatttgagtagatattttagtgcaatttgtaatgtgaaagccatgtgcacaatacgtatcattaacatctttttattttttggtcgatatgtttttcacacctattatagatataatatctagaaccagcctcgagctgcaaattttcttatagaaaaataataatataatatctagggtcgatgtaccaatagccgcatagttagtaaacatatattgatttctcattgaattatatgacaaattatcactttttgaatgatttttctcactacgttagtcgataattatctaatcttcaaatttatttaaattaccgtcaataaaatattaaggtacaagtgacattcgattattcttcttctttttagcattacgtcctcactgagacagagcctgcttctcaactttaattaactgagagcttgtttttgccaaagttgcacgttttgcattcgtatatcgtgtaac

SEQ ID NO: 1313 - DNA, 2336 bp, Aedes aegypti
gttgagttccatgacttataaacgaagcaggcatcactgctcaaaatgtcatgaaatttttagtgttgtggctttcatcgccatcaacaaacatcttcagaaggaaaagatgaccgaagctctcgaggattgtctcacttgccggaggaaaacggacaatttcctccggataacggacccgtccaccgccgttgaggatatcggcgatatcgttgctagtcatttctggtttcaggccgatcaatatgaggatcgtgtcctctgtaccagttgctgggagaagattgacgatttccacaagttttactgtgaagtgaaacaggcgtggaaccatgagcacttttccggtagaactgttgtgaaaaaagaagcgacttttgaagatgatggactacagcaggaactgttcgcatccgaactggtcaaggtggaaatcacccagaacgaaggtggtttggaataccaacagagggctgaagaggcaaaaatcgaggaaaagtttgtagatgagtcaataaccaccgatgattcagaggaggattcaactgtacctttagcaaaacgattccgtcatgacaacgacaaaccgaaattgtctgagaaagataacaaaatccgtagaaagcgacgagttagatcgaaaggaaaatcatttgggcagaataaaaatacgtcaccgttccagtgcgacctttgtgttcccaacaggtcattcaggaaggaagaaggcttactaatgcacaaagtgctgacccattcggatgagtcccagaaaacgttccagtgcgatctatgtgagaaagcatttgcctacgaatggcaactttccggacacaagacctggcacgagaaaaagaacctgaacatttgctgcgataaatgtaataaatacttcgattcaggtcgttcactaaactaccacattctggcaaatcatcctgaaagcgtacccgccggaacactacctatgttcgactcgatcgaagatactgatgagaacggttcattagattggccaacatctggccacacttcgaagaaaatatctgaaaattcatcccaaagcccctcatcgaggctcaaaactccagaagaacatgcccaatacgatgtattgattcgtcaattctgcactctcatctgcgacaaatgtggatttgcgggcgaaaatttctacaatttggagaaacactgcaaaaacgttcacgatcatcgaggctatgccacgtgctgcggacgaaggttttataaaaaacgacagttgtacgaacattgtcaacggcacgtcaacccggacacgttccactgcgagatttgcaaaaagtccttccccgacagtgagggtcttgaaaagcataaccaatggattcacacgccggactcggagaagcccttcaaatgtgagatctgtgattccgttttcatcaaggaatacttgctgaaaaaccatttgatgtatcaccttgccatagagcagaaaatctactactgcaaagattgcgatagacccttcggagcaccatcctacttgcgaacacatctggaggccatacatggtgccgcatcgagttgggtgtgcgatatctgcgcaaagggattctcgcacaaatctttcctggaggcgcatcggctttcgcacaccgaggaaggagcggctagtttgaagcgccaatgcgagcactgtaaaaaatggctcaaaaacgccaagtctttcacccggcatctgaagcgctgccaatccggtggccccgtgacgtgtgatgtgtgcggcaaggaagtggccaacgaggtgtccttggccagtcacaaacggttctatcactccgagcagccagtgtacccttgcagctactgcggcaaaatattcaaacgtttaattcggcacagggagcacgaagccaatcaccgtggagaggttctttatgaatgccccttctgcccttattcctgcaactccaactcgaatatgtacacccataagaaggcggctcatgctgaacagtgggctgcgaaggtggaggaacggttttacaagcgataacttgatttttgcagtttagagtgctttaacaaggtaagaaatcttatattaatttcagtgatgcttgttttcattgtctaaggcatcccgaaacatcattcacttatactataacaaagtatgagtaattattaaaattattttcccaacttttcttccgccattcgcattaaatgaccagctcattgaagtcttccgcattttatactcctaataatattttcttcgtctttttctacttcttggcattaacgtcctcagcttagagttgttatgagcacttccacagttatta

SEQ ID NO: 1314 - DNA, 1904 bp, Aedes aegypti
atgtttgctaccaccggcgtatcgattcgagtgcgaagtcgaccggtgcagtacgtttccaataagcgaaaacacacgtttgaatgctaccgaaaccgtcaacaacacaaactggagaagctgaaaacaaaacagctcacccaaaatacaccgtgcgacaattgggtacttaattgcacagacgaaattatacctgatttcgtaacacgatcgctgcagcttggaagtggatacaacaatcccaatccccattcggcaccgtatgtgagagtgctctcggagatagaatctgccatacaacgcaatccatctgctgacgtcatccgtcacgatgtatcaaatgccatcatcaaccacatccactacaccaaacaaccgttccatgataaacatgagaatatacggaaagagatacaaaagtccaaaaagtatctcagggaccgagacgatctcgtcgtcaccaaagcggataaggggaaaacggtcgtagtgatgaaacgtgatgagtatgaggaaaaaatgcaagctttggtcaacgacagcgaaacgtatgagcctcttgcaagcgatcctaccaagaagacgttgaagaagatcaacacgctcattgatcattggcatgaaaatggtttcattgagtattctgagagaaccaaattgaaagttttcaactgtaatccaccccgtgtttacggtctgcccaaaacccacaaagacggcagaccactgagaattataaattccgcaatcgggacagcgacctataagatggctaagtttttgtccaaaatcctcaaccatgtcactggaaaaactgaacatcatatagtgaacagttttcagtttgctgaagagatgcgtgaacagcaaataaccaaccaggatgttctgttctctctagacgtggtttctcttttcaccaatgtaccggtcgacttcgcactcgaatcgatacgcctgaggtgggaagaaatagaagagcacaccaagctggatgaggaaagtttcaccgagatggtaaagattgtactggactctacctatttccagtacaaggggaaattttataagcagaaatttggcatcccgatgggttcgccaatatcaccggtggtagcaaacatcgtactagagcgaatagagaaagatgcgttggagaagctgtgtactcggggaattgtacctcgtttcttcaagcggtacgtggatgattgtttgttgtgtgcgcgaaaggaggaagtggaggcaattttgaacgtattcaatggcttccatcaacggctgcagttcactgttgaattagaagtagaaggaaaactgaaatttctggacatgattctgcggcgcgaagacaacacaatcacaacggagtggttcccgaaagatgcagacgtatatgagattccttgtggtgcatgtgaaaaatcgtacgttggtgaaacaagtcaatttctgtgtaaacgtctaagtcaacataactcaccccctccaccaaagcacacaccacaccgaacatacacagcacgagcgtggtatcaacttaactacctctgtctgcctggcttgaagagggtcgtttctcgccactctcttcgactgggagcgtggcgtctcctgtaacgtggctgctcacgggtcgggttacggactgatttgaggttggggtccactgtgtgccgggtaagtccatgttgacgggacgtccgcactaagctgaccgtcaatatgggtgcaatgggggagcccgatgcattcaggttggctaaagagagatgaaccgagcgaggggtgaaaaccagcagctaaaagtctccgcggtaagcagtagtgggatcgcgtcccggagtggacttccggtgccagcctgaccaatatagtcacactgtaatctttttgcataaccg

SEQ ID NO: 1315 - DNA, 471 bp, Aedes aegypti
atgatgaaaagaagatggtccaacaatggtggcttcacggcgctccggatgctggacgacagcagttcggaggtaacgtcgtcttcggccgccctcggtatgaccatgtcgcccaattcgctcgggtcacccaactacgatgaactggaactgtggagttcgtacgaagacaacgcctacaacggccactcggtcctatcgaatgggaacaacaacctgggaggttgtggagcggccaacaacctgctgatgaacggtatcgtcggcaacaacaacctcaacggaatgatgaacatggccagccaagcggtccaggccaacgcaaacagcattcagcacatcgtcggcaacctgatcaacggcgtgaacccgaatcagaccttgattccaccgctgccgtcgattatccagaataccctcatgaacaccccgcgaagcgaatccgtcaactccatttcgtcaggtaagtga

SEQ ID NO: 1316 - DNA, 4320 bp, Aedes aegypti
gtcaaaacacgcacaaaatcgcagccatcatcgcatcgcagcaaaagtggagtgaaaactgaaaagttgaaaacggaaaaaatttcattcgcctcggaaaaggtgtgtaagcgaaaagctcgtcgtcgtcgtcgtctttgcgttgggtcgcgagaatcccccgcggatcgaagtgcagttttgtggagattgtaggtggaaaccattggaaattattggcaaattgcaattacgaagaaacagttttcccctttcgcttcgatttcggtttcggtcgaattgtgtggctttttgggtgtgggggaggaagtcaaaagtaattacttctcggaggtgcctccgtggccgaaactctgggatagtgttctatggtggcccgaatttaggccatcgagtcgtgttagcaaagagaagtcaaagtgcggcctctcgaagtgtaagtggctaaggaattcctccggagacggagacgcagaagacagtgtcttacttctggaagtgaaaggggcgacggcagggaagaaaatcgtcagaatccgataaactgcttctccaggtgtcgtcaggctgggggcgaatcgcggcaggaagggcgccggaagcgaaaaatgttgacagaatggcccaccaggcaacaaccagtttactgagctcgggaatctcgcgccgcaatccggaggacgagtacgagctgatccacaagattggctccggaacgtacggcgatgtgtacaaggccaagaagctccaatccaacgaactagcggccatcaaggtgatcaagctcgagccgggcgatgacatccaaattatccagcaggagattgtgatgatgcgcgactgtcgccatccgaacatcatctcctactatggatcctatctgcggcacgacaagctgtggatctgcatggagtactgcggtgggggcagcttgcaggacatctaccaggtgacgggaccgctgacggaggtgcagatcgcgtacatgtgccgcgagacgttgctggggctgtcctatctgcactcgatggggaaaatccatcgggacatcaagggggccaacatcctgctgacggagaagggcgacgtcaagctggcggattttggcgtgtcggcccagatcacggcgaccatcaacaagaggcggagttttatcggaactccctactggatggcaccggaggtagctgccgtggagcgaaaaggtggttacaatcacctctgtgatatctgggcctgcggaattactgctatcgagctggccgaacttcagccccccatgttcgacctgcacccgatgcgggccctcttcctgatgtccaagagcgggttcaaaccgcccacgctcaaggacaaggaccggtggagtccgaacttccactcgttcctgaaggtggcactgacgaagaatcctaagaaacgaccgacggccgaacggctgctgcagcatgccttcttccagtcggagatgtccatccggttggcgatggagctgctgcagaagtaccacagcccgcaccagagctacttctaccacgaggaggaggagggggctgttgcaattggaccacaaagaattacgagcaaaatgcattcccctagtccggtgtacatgtgtaaacccatcatggagaacgatcgatcatctagtcctgaaactctacctagtgatatgcggacgttgccgctatcgaataacccgaacgattcgctgtctggtggcggcgattgttcctgctccggagacaacagctacgacaataatggagcacgggacgattccacgctgagctacgcagatctcgatctgagtgcacggttcgagaaactgaatgcgcagcaacagaacggaacgagcgacgatgatagtcagactaaacggcgttcgatggatcagttgacgggactgttcaacgatctggagaagtcttccaggcagcgaagtttgagcgacggagacggtggtaatgagaatgatacccagccggatcttctgaacaacactcctccggtaccgccgaaacgaagtcatcgcagccggcggcacacgcctccccggcccgtctccaacgggttgccaccgacgccaaaagttcacatgggtgcctgcttttccaagatcttcaacgactgtccgctgcacatccactgtacgacgtcgtggatccatccggagacccgggatcagcatttgctgatcggtgccgacgagggtatcttcaacctaaacatgaacgaactgcacgacgcggccatcgagcagctctacccccggcggacgacctggctgtacgtgatcaaggacattctgatgtcgctctcgggaaaaacctcgcagctgtaccggcacgatctgctggcgctacattccaagcaaacgcatcgtttctcgctgcacatgaagaagatcccggagaagttggtgccgcgaaagtttgccctcacgaccaaggtgccggacaccaagggttgtacgcagtgctgcgtgacgcggaatccctacaacgggtacaagtatctgtgcggctcgctgccgagcgggatctttctgatgcagtggtacgacccgctgaacaagttcatgctgctgaagcagtgcgactggccgtccggaaacctgcagtattacggtgtgaactcgaacgtgttcgagatgatcatcactccggagctggagtatccgatcgtgtgcgtcaacgtgcggaaagggacgaacgacagcctcaagctggacttgatcaacaccaacaacacttccagttggttcaactccaacgcggaagagatggacggcatggccacggtgatcaaccggagggacaccttacgaccaatcaaagtgcatcagatcgaacgagatgcaattctagtgtgttacgataatgtcgtacaaatagtcgatgttgtaggatttcccaaacagagtaaaaagtatatttctcggctggagtttagttttaatatcgatagtatagtttgtcttaccgatagtgtgttagcgtttcacaaaaatggcatgcagggcagatcgttgcggaacggtgagattacccaagagattaccgataccagtcggatatacgagctgatcgggagcgatagccggatcgtgatgctgcagagccgaatcatgcggccggcggaatcgatggagggatccagcgaggagggccacgacctgtatttggttgccggtcacgaggccagttactagggaagcagctaaataggaacaaaaaaagaagaaaaactacgcaaggaaaaaggtatgtacgttacacgcaactattaggcaacacatttgcagcgaataaaactcttagaaaggatttagcaaaaaataaatcgcgcaagaatttgtattgagattgtacagccgggaagctggagcttctgataaactataaagtaggatatatcaaatatatcttttcgccgaaaagaaattgtaaacatgtaaagttttgatctacacacacacaagtaatggagcagcagttgatgataaatgtatgccgaaacccctttttgcatttgcaacgatgtcgacacgactgagggtcgacgatagggtaaattggaacttttgagccaccaggaacaaccgttttgatagtcattggttttaattttagttaagttgatgaccgtaagctccggatggatttcgatgttcttttaggttgtgttggagttggcgaaaaaaaaaacaaacttttacgcgcatatttcgatggtttattggacttttttcttgtttcaatggttttggttccagatttcgatgtaaaataatgtaaatagacgccacacacggaacgcagtttgtccaagtctgaatttcatgtttatactgattgaataatggccaaaatacatcatcgagatttgaacacaagatcttataattcactttttatgtaaatggtctcttaaggtgaaaatgaattgatcccataccaaacaaatcttcaagagaataaatctagagaatctagttgataattgatcgattgatcactttcagaattgcacagaataatgtctattcggattttctggaaaattcttatgaaaactttaatttttcgatttctgtttggataatttttcattgttcctgtaggtttcttattggttcccgtacggtctctttttggtctttttttttttttcaagcggcacttagtcgctaccagccctgtcatagggattccttcaaaaaatcctccatggattctctcgactaaagagacgaaatctgatcattttgaaaataaatcagctagcaactatagccaaatctatcactcagcactg

SEQ ID NO: 1317 - DNA, 3908 bp, Aedes aegypti
atgcaaagtccaattaactctaagtacgcctccaaaagggactacgaacgagaggctagccgatcaggtggctatggacgcgatcgggataattctccggctggaagttcgctaaacaatggcaactacaagtcaatctcaccagacatggactcaccgcgggatcgtgatcgcgacaggaaccgcgatcacgatcgggacagagaccgtgatcggggcggtgatcggtatctgtacggaatgagcaaactgcgagacaaggaccgagatcgagattataaaaaggacaaatattccgattctctacgatcacctaaagaaaaacgaagtcgcagcgatcgggacacggaccatcggtcgaatcacgaccggcggttaaagctttccgtgtcggagaaacgcggtggatcaagttcaaattctgacgatcgcgagcgtgatcgggaacgggaacgtagtgagcgcgagcgagagcgggaacgtgatcgcgaccggttacgagaccgcgatcgggatcgtggcggaggtggaggcggcggcggaggaggtggtggtggaggtagcggaagtggcgggagtggcggaggtggaagcggtggaggtgtaggtggcgatcgggtaaaccgcgttggtgactggagtgaacatgtcagttcatctggcaaaaagtattactacaattgtaaaacggaggtgtcacagtgggagaaaccacgagaatggatggacaaggaaagttacggtttcgacaggatcatgcccaaggaccagcaccgagagtatcgagacaaagaacgcgatcgcgagcgggatcgaaatgatcgggatcgtgaggatcggtattcgtcctctgccggcagccggtccacatcgtatggcaagcattccagcagtaaaagcagtaattcgaggatacggtggccgcaacatgagtcgcacaggaggaggcatgatgaaaaccaagacatggacataagccccggcgattcaacgccaacctcggaggccaattattctcactctagcactccgaccaatcagcaggggcacagtaataacgcggccaacaacgagggtagcacagccgggacgggactgatggcaaatcagttgcctcgattactgtcgaacccgatggcgacacagagtggcattgcgatgccaccccattcgcaatcacaatcctcatcgagctacccggcatcggtgtccacgtcgtctccttccgtactgcaacaacagcaacagcaacctcacatggttgtcgggtccagtggcgacctgatgctaagctcgaatactcccggtccaccaggttcgcaacagcaccaccaccatctacaacagcaacagcaacagtgtcaacagcagcagcaatcgcagcagcaacaacagcagcagcagttaggccagtcaccacattcgtccgcgaatgcaaccgctgccagcacgaatgtgtcctcttcgtcgtcgttagccggtttgccgaaaatactttcacaaatcaccggcaacaagacgatagaacacaacgaactaaacccccagaaggcgctgcaaaccatcaacaatgcactgatgatgcaatcgaggcaacagcagaacccgaacggttccgtgtccggagctacgctggtggacggcaacgccgcggcgaacagtttaagggaacacgcgttgaactcgccgctgtacaatgtttccaacttgtcgcacccctcgacgccgatgtcgtccggtggctgtggcctcctgaaccacagcaatcaccaatccaacaatctgaactcgtccacttcgggggcaaacctgagcggtggcagcaatagcagccaactgctcagtggggatggtccgcccacgcccacccaagaaatggacctggtgttaccggaccatcggaagatggaaggtacgagcacgaccacgacaagtgccgtgagcagtctgcagggagtgatgacctcgtcccaaagtggccgatctcaaggaccgaatctgacgcccagtttagcgaagtacttccgtgccgatttgatatcccatgtgacgggatggccgtcggaaatactggaaaagacggttcagaaaatgtcggaggaggcccacattctcggtgatctacagtgcagcaaagtatcggcagatttaaaatgtgctaggagtgtagttagaataacggaaatcacggcgaccctgcaagaacagaaaattatgtatctacgacaacaaattcgtagactagaagagctaaaatcggaaaactcttttatgtctgatgatctatagcgctattaaatacaaagttaaatttatataaaaaatacagaaagccctacaaaaaaaatgactaaaactagaaatcatcctttctttttaaaggaggaaaattacactagctaactgggatgcatgttatacactgcaatataaaaccgatcgatacaaagtttaaaacatcaacaaatacagaaacaaatttaaacacaaaacaaaagaaaagtcaaagtcaagctaaaccacacatcaatgtataaagctagaggaaaatttttagaaacaatcctgctctgaaatccacggagtcgacagaatgcgaggagacgttgaaagctgaatcatggaaacacaaaaactaactaaaaacacacatacacacctacatcatagccccttccgcatactctcagacacactctcattgataattgcgcagagattcactcgaacacttacaacatagccgttggtaatttctaggatgactgaacataggaagcaaatcgtacgaatcatcaaaggatatgattttaaactgttattattattatatttatatgaaagataatgaagaataaagtttttgttctttatccgtttcaaaaatgcaactaatcagataaaaatgcatcagaacttgtttaatgttttctaaaaatgttgtaatggaaaaatattgtgcatccgagtaaacaaaaaaatacaaatcattcattcagtagcgtagagtgattgaaaggcaaaaatcataataataatcagccccgcatctccctgtctttacaacataaaacaaaacaaaagaactgcattcatgccgggaagaggacgtcggcaatatctctactacactctactagggcctcacggatgacgatgatgaatgttggaaagtcgcccttccgcgaactgtttaggtaaaaaaaggagaaataaaaaatacgatgaagaatacatacaacaaactgaaggaaactgattcacattagaagcactttctagagaaaacaagtaaaaatacaaaaaatgctaaaaagtagtctaaatattcatgtatatttcattaaactataagttatgataagaacaaaaaagtaaaagcgtaaaatcaattaaataaaaaacgttgacaaatgaaacaagagaaaaaaaagaacatcagaacaaaacgtgtatgaaggcagatgaacacatccgtttttaagcagcgcttgacgtgcgttcaatccgtcgtcgttggagcagatgcaatttttttctttctacgaataaacttattgaggaagctcttgcatgcagaataattcaaacaaacacacaaaacagaactaaaccaaccaacctatcgggaattcaaagtacatacaaagtaatctaacttaacggaatgtactaaaaaccataaaataaaagaaatttacaactcgaaacggaaagtggactgatgagataccgactgacggaccggacatacaccagacgaacggacaggaagcagcaaaattttacatctggatccatctctttgatataaccacaagaaaacatggaaacataagtcatagggaaaaaatagtaaagtttagtaatatgaaataatacaacaaagtatatttaaatcaaagtgg

SEQ ID NO: 1318 - DNA, 1401 bp, Aedes aegypti
atgctcctcaggtgtatgcgtccttatccgctactgtgggcgtgtgaggaaaatttcgaagagctagccgtacaccttataaaaaaagatccaaacgttgtcaacgtcactaccaaaaagtacaaagaaacagctctgcactttgcagcagcgcaaggccatgtcaaactatgtacactacttatcgaaaacaaattggatgttaacgtccaaaacgttcataatcaaacagccctccataaagctgcttataacggatatgacgaggtagtgaaactactattagaaagacaagcaaatgcttcggcacttgataatctacagcaaactcccctattctcggcagcactggcaggacacagcagtatcgtacaattgctcattggaaagcatcctaacttgaatagtctgaataagcgaggatggggcgctgttcacattgcagccataaataaccataccgatgtcgttcggatattgctgtccaggaaagtcaaaatcaaatcaggcaaagccaagaggtggacaggattccttggaatgctgttgaaccgaggacatcgtgaaatggttgaactcttagtgacctacgaagtgaggtccaacgccggcacaaacgaaactctgttctgggctattcgacgaaatcatatcgaggttgttcgaacgcttcaccgagctggggcatcaatcaacgaaacggatgatcgatctggactctccacctaccagctcgcgctaaaagaaggttctttcaagattgcagaatacatcctggctactcacaatagctccgaaatgccagaagatgcattacatatggccgctgaagttggaagtgtcacatgtgtctccattcttttgaacagcaaagcagaagtgaatgttaaaaaccacaagggtgaatcacctctaggattggccctgaaaaattcccacgtaggcgttgttcagctattgctggaaaaatctgccagaatcactgaaaatatgctagtttatgcaatcggtgtcaacaagccgggttcgatcgactgcgccaaggaacttctacttcatggagcgaacccttcagcagtatacgaaccgaccggccaatcagcccttcatctggcggtacttgtcaaccattacgagtgtacgaagctcctgctgcaaagaggagcatcttgtcaccacatagacaaacgtggtcgcacgcctctccactatatggcagtggggcgctgcacatacgcgttaagggcttttgtggaggaaaccgttggttttcgtaatatacgaaacatgaagcaactaatccatatgaaagatcaatatctaggagaaacggttctcagttcagcacaaagttattatcctgaattctacaatatattaaagcatttcgatgtcaattga

SEQ ID NO: 1319 - DNA, 1296 bp, Aedes aegypti
atggcaaattctacaaatcttgagtggcatatgatcggcttccgaacgttctcggaaaacgaagtgtccaacacgactctgcgcgaggatctctacaagaagatgatcgccatcgatccggcagctcccacggccgaagaacaccagcagaaagccatcaccaagctacggtacatgctgttccgggagaacatgtcctcgtcgcacgagaaaggcttccggatagaggccctcaagatgcgtggttcttcgccggtcaccgacatgaaaacggtgaaaaccagccaggaaatccaagggaccatatcgaacttcgtgaacgggcgcaaaagcgtcgtcaaagatatgaccaaaagactgaaacaaatgcgaacgctgatcgaaaagtccgagttcttccagcgccatcaggtggtcggtagtagcatcttcatcgtgtacgacgatcacaaagtaggcgtgtggttgatcgattttgccaaagctctgccgctgcccgaaggcgttaaggtcgatcaccgaaaacgatggaccttgggaaactgcgaggaaggcctgctgtttggggtcgacgagctgattcgaacgctggaagatgtgcatagaggtttgcagcagtcttcgcatgattccaaaaagtacgggcgccgatagaggacactgctgtcatcttgtgggatgggacaaacacgtgaacccgagagctagtcatatgaatgctatttgaagaaaactacaagcgaaaagtaaatcaagactgaatttagtggcccttgttgcctgtaatatttttttttctagatgctaatgccagttaattaaattcatattaataagataggctataacaggaaaacatttgagtcagcgttcaaaatgccgttatggttcaatacttaatcaaagacttgcatggaaaagacatgttctacttaaagcaaagacaatacttaaacgccattttctccagaccaattttccacattggaaaaggaaaaaaaacacacatatttgccttaaagcttgtcaatgtaaattatattctccagtttagcttaagccctaagtgcccaaagtacatggattatcgaaactcctcaaactgtcattgaactcagatgtgtctatcatacgaagtacaaaagagcgagaggattgtcaataattctttgtactagttgaatgaatcgcaagcaaagaaagcaaatttcaacggtttagataggtaaaatcaacactatttataagaataaatcaacaaacaaatgttgtgatcaataaatacgaaaattaatg

SEQ ID NO: 1320 - DNA, 2275 bp, Aedes aegypti
atattttatcaaaattaactgcgaactatatcaaatatagtcgcaaagttgtgattataatgaagtttctagtagtagctctaatatgtgtaaatttaatgcccgcttggattgaagcggagaaagccgcagagaagtattccaaaaaggcaaatacactgccagattcggaagtttatcagccggattttcgcaacattcagcgtccttatcgaatggccaaacttaatctggtctggtcgaaggcacagcatcgcttaactgaaccaaagctgaaatctttgtacacggaactaaaaatacacgacaaagaagaaatagcatggaaacaactgaattcccagcacaaagacaaagaaggtttgaaggaagccgagctacgaaaaaagttgatcggaatcatgagcacctatggattgttggaatacttcgatgatactcaggatccagaaaagtacaaaccatacaaggcattctccggaaaagtggacaactatatgaacaaaagtttattcaaagataaaaaactcaataaactttgggaaaaggctgaaacgtcaggttttaccaaggaagaactagatgccttaaaagaggaatttgaacaccatcaagagaagattgatatctattacaacttgctggaaaaattagaccatgatgacggcaagtctggcaaagtgcacgagaacgctgtgaatgaagatgagcacgataaattcaatgaaataggtacggctgaggaggatagcaacgatatcatggctcaacagaaaaatgaggagaagcaaaactcttacctgcacaaatctaatcaactgagagagaagcaccgagatatcaaagataacttcgatagattggaacgaatcgccgcaaagggacccgatagtcaggatttcattgaaccgaaagtgcaagggctgtggaagatcgctgtgcactcgaattttacagcagacgaactggcttcgttgaaagtagaactattgcattatgagcgccggctgctgaaattgcgacacatgcatgcggagcacgccttgagcatggagaaacacaaaaacgcgaaacacggcgataaagctgatacgcacaaaatgatggaggagaatattaaaaagcagacaaggaaagttgagaaactacaggaagaggttgaaaagcgcatattgaagcatgcagagctatagattatgttccgaatttgagctttagaatgattacctgcccatattcgcataacagtcccatgttctttggaattttcgttaaacatgagaatgctatgcgaatgtgggcagttatgatgttaataaaaaatgtttgtttgacatgatctacagtaatggcatcaaatttgatataaagatatttacactcgaattattgaagcaatatattaagggaggtagagacatcattctggcataagttgtttagaataggaggtgaatcattttggcagcggacttatctcggactcagccatccaagaacaaattgactagcatttatgtgccaaaataaatcagaaaagaaaaaacaaactaattgttatgcatatggttcattacggtaaaatagcataaaaggtaagctcgcattatgaacacagttaaatctccatgagtcgatgttccttgactcgttagtaaagttcgaaacaactttcaaaagaattatgttagtagaatcattaaaacctgagtatgctaatgtcacgacttttcgtgttaccaacctcgaattttcctcgaagtgatagcgtgagtaccggctctcaaagtgtcacataaattttaaatattagaagaaatcaccctctacgccatggcactgagcaacgcataaaaaactacaattaaatgtcataataaattgattcaatttagggacaacagcgccgctagcgttctactactaaaaattatatttttggtgtcatgaatcgactgtcctttcaatatcggttcatggagattagactgtatgtatcgaatgtcattctcaactaggcaaaagcacaaaacaatcaaaatccaaggagtattatgtgtaggaaaaaaaaatcggaaaagcccatcacatttgggtttcagttagttattttgatgggcgtaattgagtaatagaggttacctgcgacctgcaaagccatgtatactaatgccgaagaaacctttcctattgtttgtccagatttgtgtactagtttaactttttctagagcgagcagctgatcttctaataacttttctatattaatgttcac

SEQ ID NO: 1321 - DNA, 1416 bp, Aedes aegypti
ccactttgtcacggcatcacgaagagactttcattttgctcgtgaaaatattgctaaattttataatcaatcgttcatagtttgcagtgcgtacggtttattaaacttgctcaaattgcgttaaattgttctctgtgataggtttttccttaggaaactagaaatgacggaacagcaaatggattgtgcattagatttgatgaggagacttccccctcagcaaatcgagaagaatttaatcgatttgatagacctggctccggctctatgcgaggacttgttgacatccgtggatcagcctttgaaaatagcgaaagataaggaaacgggcaaagactatttgctgtgtgattacaatcgagatggtgactcataccgatgcccgtggacaaatacttacgatccgccgctggaagacggatcgatgccctcggaacggctccggaagctggagatcgaagcgaatcatgcctttgaccagtatcgggaaatgtattacgagggaggagtctcttccgcttatctgtgggatttggaccatggcttcgcgggggtgattctgatcaaaaaggccggagagggcaatcaaaagaccaaaggctgttgggattcgatccatgtggtggaagtgcaggagaagagttccggaaggacggcccattataagctgacgtcgacggcaatgctttggctgcaaacccacaagcagggatcgggaacgattaatctggggggaagtttgaccagacaggtggagcaggatgccccggtgggcgaaagtagtccgcacattgccaacatcgggcgcctggtggaagacatggagaacaaaattcgcaacacgctgaacgagatatacttcggcaagaccaaggacatcgtcaacgggctgagaagcatccagaagttggccgacacgaaccagcaggcttcgatgaagaaggaactggcgttggcactcttacgacgaaccggaaagggagagaactgaattattgtgaaaaacccaactgaagtcatcgtcatgagctgcgaaaactatattttctgatgctgttgctgtgctgttgttcgctttgcgctaagcgaaattaccgtgaaacacactctctctcttatactggaaaaccggaaagaaacgatcgctacactttaaacggatgggaggagccaaatgacgatgtttgtaatgctaagtttaggaaataaaaaaacaatattttaatggtgttaagtatagtgaaaacttcaggtttttccaagctttttttttttgaatcctaacataacgagagtttaagtacgtagattgtgtatacctttaccttgatttagtttgtttgcacaaatagcttccacaaattattttgtttctagaaatcgaaaattaataaataaatatatgatttaatcgtc

SEQ ID NO: 1322 - DNA, 1401 bp, Aedes aegypti
tgttgcgacgccacttgaacaggtctagccatgaagcataaatgcagcatgacagctcgcgtgtgtgatggtagtagtagcaataaaagttagcgtagcgagatagcgaagtagtaggtaaacagttagaaagtaaataaacagaggtgatatagattcgtgaagcatatcgccattgcgggaaaacgcagaaataagatcccaattgaatttagtaaacgttttagcttaatataagtggatagaagtgtacaagttagatagattcgttctgtagtgagatctctaatcttagctacggtgaatttcttccaaacacctgggaaattcctgtgaaggaaaacggaaaaacatacctacctatccggtaaaattgattatccacgtatagtcagttagtagggtagtggtacccatattcaactctgggaagtcaataagaaattgtggaaaaggaaaccacttcttatcgttgtaatgggccaaccgctagcgcaattctacccaccgaccaagagtcccatatggttgagcttgaaaccggctggccaagacacactcttgtagtccatttggcgtttgctgtttttgttttgctctggttacaacactcgggagtcagtcagtaggtgcataggtgcatactctatataagcgggcgtatgggtcggcgttctgatcataattaattcaggtgttctaaggcaaactagttccttggaggacgaaccaaaccaaatccccgaccaatcatgaagtgcatggtagctgcagtcatcttggccttggccgttgtctcggaagccggaatcgtcccagcctggccttatggagtggccgcccattggggagctccaactgtgatccagtccaacgttttggcccatccttacggagctctgtcccatgctgccatccatgctgcttatccagcagttcatgctcatgtggctcacctagctccagctgtctatgctgccccgctcattgccgctcctcatgtgccagctgcctccgttgcccaccatgctggagtcgttccaggagccacctctgttaccgctacccgaggtgccgtccatgttgctccacttccgggacacgccgtctctcagcaacagctgaaccttgctccagctcccggaaccatctaaaatgtgaactccttcggaacacctgacgtaatgctagtcaccggatctgagcaggattccattcttcaacaacaacaaaaatgaggatcaactggattggattttcatgttcttttcttctccccccactgtctatcactctgtcgttcaaaagtgcactctatcgcatcctaattaagtccatctcgaatgaatgcaagttttggaccagcaagtgaataaaattgttttcattgtttcttcataa

SEQ ID NO: 1323 - DNA, 810 bp, Aedes aegypti
atgggcttcgtcaaagatccgtgcggaattgtttgcgtgctggtgacctacttggcggtgctctatgccgactatgtggtcacccggtggatcatcctgcagacaatgcaaaacagcctatgggccccgttccacgtggtggcattcaacaccatcgtgttcctgctctcgatggcccacctgaaagcggtcctgctggacccgggaaccgtgccgctgccacagacccgtatagacttctccgacctgcactcggaacggaactacaaccgcgagcacgaagagtggaccgtttgcacccgctgtgaaacgtaccgtccgccgagggcccatcactgtcgcatctgcaagcgctgcatccgccggatggatcaccactgtccctggatcaacaactgcgtcggcgagcggaaccagaagtatttcctgcagtttctgatgtacgtgtgcgcgctagccctgtactcgatcttcctcatcattgcctcgtgggtgtatccctgcgagaactgctccacaacggtaccggaaacgcagagtcgcatgctgcacagtgtcctgctgctgctggaatcggccctcttcgggctgttcgtgatagccatcatggtcgatcaaatgcatgccatcctgtacgacgagacggccgtggaagcggtccaacagaagggcccctacaggagccacaggcccaagatggcactgttggccgaggtgtgcggccgtggccatccggccatgtggctgttcccctgtgctacgctcaatcggaaacaccacgacgtgccgctgctaagtcacgacgtctaa

SEQ ID NO: 1324 - DNA, 3202 bp, Aedes aegypti
  misc_feature (1)..(600): n is a, c, g, or t
nnnnnnnnnnnnnnnnnnnnnnnnnnnnnnnnnnnnnnnnnnnnnnnnnnnnnnnnnnnnnnnnnnnnnnnnnnnnnnnnnnnnnnnnnnnnnnnnnnnnnnnnnnnnnnnnnnnnnnnnnnnnnnnnnnnnnnnnnnnnnnnnnnnnnnnnnnnnnnnnnnnnnnnnnnnnnnnnnnnnnnnnnnnnnnnnnnnnnnnnnnnnnnnnnnnnnnnnnnnnnnnnnnnnnnnnnnnnnnnnnnnnnnnnnnnnnnnnnnnnnnnnnnnnnnnnnnnnnnnnnnnnnnnnnnnnnnnnnnnnnnnnnnnnnnnnnnnnnnnnnnnnnnnnnnnnnnnnnnnnnnnnnnnnnnnnnnnnnnnnnnnnnnnnnnnnnnnnnnnnnnnnnnnnnnnnnnnnnnnnnnnnnnnnnnnnnnnnnnnnnnnnnnnnnnnnnnnnnnnnnnnnnnnnnnnnnnnnnnnnnnnnnnnnnnnnnnnnnnnnnnnnnnnnnnnnnnnnnnnnnnnnnnnnnnnnnnnnnnnnnnnnnnnnnnnnnnnnnnnnnnnnnnnnnnnnnnnnnnnnnnnnnnnnnnnnnnnnnnnnnnnnnnnnnnnnnnnnnnnnggacgagattctgctgaatgggaatgggaccggtggaggagcgcgggaaaatggcaataacatcggggatacgattacgctcaccacggatcagtaccgcaagttacagggcatcatcaatgagctgaccgctcagctgagagaaaaggagaacctgctgcagcacgcttccggcgatatcgaaaagatgagggaaagcttccggaatctgctggagcagcagagtgaacagaaaacggcgggcggtggaagcaagaaagcggcacccgaggagaagatagcacagattcgggaggagttgaggcactgcgtaagcacggtggccgtggaggacgaccaggggtacttcaatacgtactcgcactttgggatccatcacgatatgttgagcgattacgtgcggacggcgagctatcgtgatgctatcctcgataacggggagattttcaaggacaaggttgtcctggacttgggttgtggaacggcaattttgtccatgtttgcagcgaaagccggagcgaaggaggtgatttcggttgaccagtcggatatcatctaccaggcgatggatatcgttaggaggaacaacatcgagaacattaagtttgttaagggacgcctggaggattgtgagctgccggtggagaaggtggatattatcgtgtccgaatggatgggttacttcctgctgttcgaggggatgatggatagtgtgatttacgctaggaagcggtatctaaaggagggtggctttattctgcccaataggtgtaatataagcttagcggggtatggagatattgaacgacacgatgagtttatcgggttctggaagaatgtgtatgggttcgacatgtcctgtatgaagaaggaagtattgagggaagccacggttgaagtttgcaaacccgagcacgttattaccaatgctaacatcatagcaaatttcgatctgatggaagtagacgtagactgtcccaatttcagttatagtttcgagcttacggttaaaaagacctgtaagctgacggccttggttggctatttcgatacgttttttgaactaccgcaacacgtggagttttcaacttcgccctacacgagacctacgcactggaagcaaaccatcttctacgtcgaggaaccgattccggtgcaggaaggtcaagtgattgaaggtaagtttgtttgcagacgcgacccgaaggatgcacgatccctgttcataacgatcgagtaccttggacaggtcctcaagtacaccctcaactagcagattggaattctgattctgatcaactgaaccctagaacaagattgtacgaagcgactacagaagaccaataatcaactacagctttaaagcacaatgaaaataggagcttgataatacaaataagtaagatttcaacactttgatagaacgaagaacaaacacactacgaacggtggttgtgaagcgacaaaataatacacgaaacaaaggcaaaccaatcctatttaaactgcctcgttggaaactgtttcccaagacatcatagactatctacgctttaattttgaatcctagctagtttgatacacttaactctttcaaagttttaaatcctcacctagaaactatactcaaaaatcaactcattggagacaatcagtttctctgtcaacaggtccagttagcttccttcactcctatcataaaaatacctaaaacccctttgaacacgaaaggtttccccaaataataccgttagagacgtagcattttttagaacagttacaacaatcgcctaaacgagcgaataacctcccacttacccttgggaggcaaataattgtagtcgaaagcaaaggaacaagctttaattttgtaaaacactgaatgttgatttttgtactcagaaagtttttgatccttccgacacaggcacacagggcgggaaacgaacgttggattggatatttttgataggacagatacatttcacgaattcacgtttcaccacaacttgcagaacggaataagtaaaacgaaaacaatactaatcgataatcgaggcaggaattgtcgcactcttccataagataaacctaagtagaatgtagactgtttgttgcattgcaatttacaattatctatatttaatataatatgctatgaatacaaaccattattgaaccgtcttacacagtttggtccgttttatgataaatcaatgttaaactattaaacataaactcgagcatgatgctagattaaacatcattaactattacatatcgtgaaccattcattcgagaactttcctataaatactgagtaacatgcaactttaataacacatgcacaacatttaagctctttacattttcaatttattgttactactattatttaccattatagtagcttttcccctttatcgagatcaccattacattttgaagttcataaagtcagacatctaatatttcaggtttcttgtaggattcattcatttattcagttaacatctaaatgaataacactaaatcaacaatttaacaccacaatactcggttcttggccgcatctctccatcctcggttctgttccatgctc

SEQ ID NO: 1325 - DNA, 1321 bp, Aedes aegypti
atgaaactagtctgcgaaacgtgcgtcgtgaaccggaccgtcccgttcggtaagaaacccttccagaaaaccatcctagccatcggtaagaacagcgagaagaaatccgaagatgaagcggtcatcatgctgataacgaatgccaacaagggaggaaccaaatacgctttgcggaaaaacatcagcaagatattcacccggttcatctccgaggggaaagctaccatttcgtttaacatcccggagcacgatttgcaaatcaagtccgaggtgatccagctgacgggtttcctgaaggtgttgaaatcaattctcactggagaagcggttcctggtgggtatggttccatggccaccattcccctcaagctgccctgcctaagtgtggccaacaagaaatcgtcactattgtcgtccacaagcaaagtgctctctacaaaatgtgtggtcagaagccgcgccgattatccgctcaaagggttcaaccgcaatctgaccctgctgcaaatatccgacataaaactggtacgattcgacccgcagatcctgctgctgaagaaccttcgcagcttgaacctctcaaacaactgcttggaaaagatccccaaggatttaggacagcttcgcctgaacgagatagacctttccggcaatgccctacacaatcacgactgggagtggctacgaggacccgcgctccagtcaagtctacagagtctcaacatctccaacaacagcctcagctacttcccaatcgctctcatctacacgaagcagctagtccgattggacatgcgtcagaaccacgtcctcaagctcccgttcgctttgtggaaaatggcacgacttcgattcctgaacctggccagcaatcagctcggctccctgccggaatccatgacccgcatgaagctagacgaactggatctctccgaaaaccgcttagatcacacggtatccacagttccggatcttcgcacaccgacacaggtcggtcacgtgcccgccctctgggaactggcagcgcgggtcgtcgtcgctcggaaggtgttctactcggtgggaacgattccgttcttgctggtcgagctgctgcaccggaccccgatctgtggctgtggactgctctgctttacggccaagatccacgaacgggccaaagtgatacggctgaactgtcagcacctgatcctgaacagcaatcagcacctttacgccgatgctgtgttttgcagtcaacggtgcagcgccaaactgtaagttaggtttaagtttctggattatatttattaacttttaaatgtgtgattcattgcatccg

SEQ ID NO: 1326 - DNA, 4979 bp, Aedes aegypti
cattcaatcccgcctcctttcgacaaccgtttacatcccgaatgcgaccctgtaatgttttgctgtcatctcgtgcgggagaacgtttgaaaaaaagctaaacttcacatgtgcgcacgtttctgtttatcctcattttaatttgattgaatttttcgtaaaatccggtgaattctttgtgtaaaattggcataacttaatcggatagtgacggtgaaacgcaagaagatagtgattctattttaaaggttgagtatctgcagaaaaatcacaagcgatggtttacgttgagccatcatttccacgcgggcgaaaggtcgaaaccgacgacgaccacaaaccgcgtaaaaagttgaagaaatcggtggagtatggagcttcgacggcaaaggatgaaaaggctcacaagcaccgtcccaaggagcgccagcaagctctcctggaacagatggagcaagataaggaagagctagaacagagcgtcagcgcggctccactgcagttccgaacggcccaggaaggaatgctgctgatgggatgcgtgtataagatcaccaaaatggatattaaggtttctttgccgggaaggttgtacggaacggttccgatcatggccatttccgaagcttacaacaacagactgcacagtttagtgcagaaaagcctgggagggcccgaggagcaatgtccgggattggaggaactttatcatgagggagatctggtgtacgtcaagattaagagcaaacacagcgaaaagaaccacttcgggctgacgttggatccgcaggatttgcacagcgagttaacgtgcaaacatttggtggagggattggtcctgagtgccactgtggaagaagaggaggatcacggttaccagatgaatgtggggattagaaatgtgagggcgtttcttccgacgcacaatgtgcgcaacaacaagatgatcgtgggcaggaatctgttctgttcggtggagaaggtcacacatgggaacggttcggcgaccgttgttctgagagcattcaaaccaacggaaccccggaagttggaagtggctcagcccaatgtggattcgttggtgccgggatccgtggtaacgttcactgttgaatcagtgctgcaaaacggtttgcagggatcgctttttgatgacacagttccggcgtttgtgaacgagaacatgttggagaaaccgttgtccagcctcaagcaatacgaactgttcaaggagattccagcccgagttctatacgtgatgccactgacgaagcatgtgtttgtcacgctggcgcacttcgatggtaaccgggcgtccgtggcggatccggtgaccccggggaagatcattcaagacgcaaagatcattcacaagagcttgaacggggtttggttccaaatcggcaagaaacataaagctctactgccaaaatacatcctaaagagcaagtacaaccagaactacgacgagcagatcgttatggccaagtaccaggtcggttccgtgcacacggttcgggtgatgcgattcgaggccttcgatcgaaccataatcgtaacggacgatgaggaaaagatcgaaaccaagtacttcactctgaacgatctcaaagttggagatatctataactgtcgcatcacgaaggtgttggacaaaaaacgaggcttcttggtatcgctggacaacctcaaagggattgttacggcgtacaactttgagccctcgaaaacgtacgccgctaatcagatggcgaagctgcgtttgattggcatcgacgaagacaggaaaatggctcaattcacgaaccatcccgaatatctgaagaaatccgccaagctgctcacctcccgggaggatgtgaagcaaggccaacgattcctagggacggtcatctccgagcaggaaaagttcttcattgtagcgttctgcaacaagatcaccgccatttgcttcaagttctgtcgagccgtgacccaggatcagaaccgcatatcgcgcctcaaacccggcgtcgtcgatcgattcaccgttaacgaagtgtccgaagatggctctcggttcaccgttgtcattccactggacgccgagagcgaaaacctgggccacatagtgagcggaacaatcaccggtatctacgccaccggagccgatatctatctggtgaaggagaacgcaaccggaaccgtcccgccggaactgttctccgacttccccccgcacaatgctctgtacgccagcgtgctcaaggaaggcgagcagctccgggtggtcaacgtgaaggagaacgtctacagctgtcgggatgtggaatacttccgacgcaaaccaacggagatcaaaaacgtcaaactggggcaggtgttgcgagcatactgcgtcggaatggtaccgaacgagaagaaaatttgcttccgactggccttaaaagattaccaccgaaatgtggtgctgaagatgagcgaattcgcagattcaaaagaaggggtgtcggccgaagtgggacaggtgattctggtgaaggtggtgaaaaaggtgaacaaagaggacggtgtgctgctggtggtgtcgcccaagctggaggatgtgtgcacaaacggcgtggaggatcccattcgctacctgcagacgtacctttgcgacgtgaaggagctggtgaaaagattcaaatcccacgataaagccttcgctcagtacagcgtcggacaaagtgtgacctgtgtggtggaaagcttcatccccgacagtgaccaaatggtggttcgccttggggatgtagaagacactaccggggctaagggaatcgcaaccaaggacccgaaacgggacgccgagagttactcgcccggcgatttgctcgagggccgtgtcgtttgggtcgacgtcgaaaagaagctggttcgagtgtgcgtcgtgaagaagtacttgaagcatctggtgaacgccgatgacgaaaacgtttccaaagagttactgggaacggaagaatcacgggaattcgtgacgttgttccagaacgggcacattgcagtgggttgtctgccgaaggtggattcccccttggtcattgtgcctgttcggtgccattacaacgatcttggaccagtgaaagcggttcagggaaaagttcaggttcatcttgtccgaatctctgacgggctgatcctaggactcaccgaagaactacacgaaaaattcaagaatttcaactgggcacccgccgagaggaaggacaaatccggtaaagcgtgttggctgccggatgactatgaggaaccacttttggaggatccgaaagaatcgtctgatgaagagggtgccgataaggaggatgctgacgctcacagcaattccgatggtgatcaagatgaggaagtagcgaaaccggaatcgaccgttcaggagtccaataagaaatcaaagaaaaagcaaaagaagaagaacaagaaagcaacaccagcagcttccggaacccttctcaaagttaagaaaaccaatgccgtcgaatcaccggccaaagcgctgaaaggcaaaaaggagaaaaagaaagcggccgcgaaaaagttgaaagccggcaagccgtttgtcatcagccaattggacggagcggatgacctgccgatgatgaaacagaagaagcaaggcggcaagaagaacaagaagcattttttatccgaacgcccggctgccaacgccccacctaacctgaaggtcaagcagtcgggctccgagaaggctcaacttgaaaagaaggataaactgcatcagttggcgcagcagaccaagttcaagaaaaagaagaacaagaagaacaaagttagtcaggtcagggaacctattacagaaatagctaaacccgtgaaaactcctaagacggtcgccaaaacaggaactctacccggagcggacggattctggagtaccaacacttcgctcgggaaacaagattccgattccagtgatgacgatgagcaaccgatagtgcaaaccaagaagcgcctcaatgcgaaggagcgtttcgaggcgatgaaacaagaagaacagcgaattcgtcaaatcgaagacgaactggccgatgcttcggtggatcctcacactcccgaccagttcgatcgccaagtcctgtcacaaccgaatagtagtctgctgtggatccgctacatggtgttccacatggagtcggccgaagtggagaaggccagggccgttgcccggcgggcactgaaaaccatcaacttccgggaggaaggcgaacggctcaacgtgtggattgcgttgctcaatctcgaactgcggtacgaaaccgtcgaaacgttcaaagaggtcctacaggaagccattcagtataacgatgcattcaaggtgtactcgagggtgatcgaaatcgtgattgattgcggcaagaccgcggaggcactggacataatcgatattctgcagaaacggttccggaagcagccggaaatgtggctcttggtgggtagttcttactataaactgggacaggccgccaaggttaagccgctgctcagtaaagcactgaaatcgttggagacaaaagagcacatcccgctaattgtaaaattcgccttcctacacaaccgcaacggcgaacgtgacgaagctcacattctgttcgaacagattctgacgtcctacccgaagcgaacggacatctggtcgcagtacgtggacatgttggtcaaggacggcctggtcgatgtggcgcggcaaacgttggaccgggccatcgcccagcggttaccgatgaagaacatgaaaaccctgtacaccaagtatgtggcgttcgaggagaagcacggcgatcgggaagcggtgaaacggatcaaacaagccgcggcgaactacgtcgagaaacagctgagctcgagtggggtcacggtgtagagtttacattgtgttaatgctaggtaagatcattggtaccttacaaatgattaaagtatatttcgcctttaaa

SEQ ID NO: 1327 - DNA, 3717 bp, Aedes aegypti
atgcctttagagcagctgaagcagcaactacagacgcagctcgattactatttctcgagagaaaatctagccaacgacacatatctgatatcccagatggacaacgatcagtacgtgccgatctggacggtagctaacttcaacctggtgaaaaagctcaccaaggatatcaagctcatcacagaggtgctgcgcgattcgcccaacgtgcaggtagacgaagagggcctcaaggtgcgaccgaatcacaagcgttgcatcgttatcctgcgagagataccggacaatacaccgatagaagaggttaagaacattttccaaggtgaaaactgtccacgatttatctcgtgtgaatttgctcacaacaattcctggtacatcacgttcgaatcggacgaagatgcccaacgagcgttccggtatctgagagaagaaatcaaagaatttcagccattccagcagcagttttatcccggcataatgcaaccttggccaactgccccaccgccagctcaaaattactacgatttgagtacgtttgttgcgagcaatgggcttcaagttcccttcaccaccggcggaggaaagcaacaaaatggtcgatttagcatgcagggtaacattggtggaccccatcgaggtaacatccgcagtaaacgacagccgaacccatcgataccaactggcagcaacgagcatcgttccggtggtgctaacacgggcggtggcgggggaggaacgaatgttgcaggccaaaacaacgcagcaggatcagtgacaaacgaaagccaaccgaatcatcgagtttccaatcaaccatctcactaccatcaacagcaacaacaggcatctcaacagtcacaacaatcccagcagcaaccgcaacagcctcaacaacaacagcaaacgcactaccagcagcaatctggcgctgggaagaactcctctctcttaggacatggaggaaagacctatcataaagatccatctattgtgccacattaccagcattatcaaccgcagcaacagcattatggcaatcatccccagtcccatcaccatcatcaacagcagcaacaaggtgatgatacgaacagttctaccggtatgcgatcgggcaaccaaaccggaagcagtgcagaccactatcaatcgaacgacgatagcagtggatacagcagcttaccgtacaacagtggtcgaaataagaatcttgatagtcaacagtcgcagtccggtccgtgggcatcgaatcaatctcgacgacatactcgacgaagaaaagatgatatggacggaagcggcggagcgatgtacagtactggaggcggaagtattcggtctaatatgagctacagtagtaatagtaatagtcttagcagtagtatgaacaacggtgcaaattccaatgtgaaggttatgaacacaactagtctgaatcaattgatcccttcgtcgtcgggtggacctccgcatgggcgtggtcctcgtggcggtggaaatcaggataaccaggttcacaatccaacggtttcgggaaacgtgattgcgtcgatgggtggcgaagctggcggcggtggtagtcatcatcatcatcaccacagtgctggtggtggcggtgggggctatcatcctcatcatcatcatcggggcgcggttgctactgggtttcaccagcaacatccgcaccatcaccaccaacagcagcagcatcaacagcaacagcagcagcagtcgcacttgcagcaatcgtccaacagcagcaatgcacagcagcagcagcagaatgccgccagcaccccccaatcgacgcaattcgaccttgaaccagctgcatttccacccctcccaggtcatgatgacaacaccaccagcaattccgccggaagcggtggtggacggaacaaacaccatcaatcccgcgaacagcatcatcatcaccagcagaatcatccgaacagccaatcatcgaacgcagcctcctctggtggtgccgtttccggtggtggcaaccatggttcctctagtgatcactcatcctcctatggcggcgggagtggcaccaccgatggttccacacatcccgtggcaaccgcctggggcgaaagtcgactagccgatgttgtcaaaggtactgccgcactctcaacgaatgcctcatcgaaagtagcagtaggagcaaagagtacgacttccccaccgccacaacagccatcccaaagtagcaccaacaacaatagtgagcttagtcaaaaaaactccctagcttcggcagctgccacttcagaagtgagcgcagccgccggacgtgaccatcagccttcagcagcagcaacagcaaacacaccgaacgtttccttacatggcaacagtggcaacagcaacgactctgcctctacggcctacagcagcagcagtaatagcggcagcaacaataacagtagcaaagtaactaataatcctcttcctgtgataaaatgtacaaccacaagtacatctgcaagcaccactgctgacaaatctactaagactgacgagtcattactactgcaagttaatggcttagattcaacggtagctgcaagcccggtatctacatttcgcaaggctccggctgatccagtaagttgtcccacgacaaccaatgctgctacaatgacttcgactgagtacgttattgctgcctcatctagcagcagttcttccggctccaacaagcatcatacgacgtcatccacattactttcggttacttctaatactagtacatcaaactccgtggctgtgacttccgcatcaacaatgaccgtaccggtatcggctaccaaagcgaatagttccaatgccaaacagggcggcactggtggcggtcataagaatcctaaatcgccaaccacgccgacggcagctaccgttgccgctgcggtcgttgctgcatcgtcttcttcgactagttcgtcacatgtttccgctccgccacctttctccttacaaaaccatccccctttaggaggcgttcaggtcattgttcccgaaccgcctcagccaactactcaggtacgccttagctatgctcaggttgctcagcatttgaaggagcagcagatgaaggaaaaagaacaacaccaagacggtaacgctaaagttgtggaaaaggaaaattctaatcatcagcagcagcagcagcatatcgtcggggttagcagtagtagcaccaataatgggcaaaccagcggtagtggtgccagcagcaagaagaaggatgcaccgcctagctcaagactgtcaacatcctcgtcgcaatcgcaacataacaacgacggattcagggaacagagagaaactcgcttcaacaatgtcagcagcgccagcaactctgccaattctcgccagaacgccaaagatttccgctcctcgacgggtggccccagtagcaacagtaacagcggtggtgctaccaatgcaatctcgtctcaaaccgccaacgccggcactggtagcagcactgctgggaatgtaaccacagcgacctccggaggtgccggtcatcgaggagaagccaacagcaactccgtcgccgctggtgccacctccaacagcaacggcaatagcttgaaggcgtctagcaacagtgcaggtggtagaacggcccgcccgcaccagctgaaggattatgtccaaccgcagcaccagcagggaccccgaagtcccaaatga

SEQ ID NO: 1328 - DNA, 1534 bp, Aedes aegypti
ttttcggtgctacagtggaaatccatccggaaattatcgttgcttttagaaatctcaattaaaaatgtccagaagtacccgtcgcagcgtccgggtgagtgaagtactcgaagaatccaaagaaaataccacccccaaacggcggggacgtcctccacgcagcaagagcgacaccctagaggaagaggaggaagtctcgccaccgaagcgagcaagaggacggaatgcggcaccgaaagaatccccaacggtcgggcaggaagaagtgagcgtaaccgcaatcgggtgcctcccggagcgggagcgggaaacggaaaacctagcccggcacatcgaaggcattctgaccagcaatggatcgggaagtatttacatcagtggccctcccggaacgggaaaaacggccaccctgacaagaatcatcagcgaccccaaactggcggagaagctcaaaatggtttacgtgaactgcacatcaattagtactgcgggaggaatttacaaaaaaatatgcgagggactgaagatatcatccagtggatctacggagaagagcttcctaacggccatcgaggcgtacctcaagaagaagcacaaaacggtcatgctggtgctggatgaaattgaccaactggcgagcagtaagcaaaccgtcttgtacaacatcttcgagtggcccgccaagcagggatccaatctcatcctgatcggcatagcgaacgccttggatctcacggaccgattgctgtcccggttgcaagccaagtgcgaactgaagccacatctgatccagttcatgccgtactccaaacaacaactggtgaacatcctgaagaacaacctccgacagaaccagaaggccgaaatgttcaatgacgccgccctgcagctgctggcggccaaagtcgcgtccacttccggtgatgcccgaagggccctcctgctgacacggaccctggtcgagtccaccgataacgaacaccgtcaagagaagaagaccaaacccaaggaagtggcgacatccccgccgaaggccgtccaaatccgatcggtcatcagcacgctcaaccaggtttacggaaccactcaaaccatgaccgatgacgaggccttcccgctgcaacagaagctcctggtttgtgccctgctgttgatcctcaaggctagcaaaaacaaagacatcaccgtgggaaagctgcaccaggtctacaaggcggtttgtgccaaacggaatctcctctcggtggaccaaaccgagttcagcaatctctgctccctggtcgaaacgagaggaattctgcggctgcagggtaagaaagaacctcgactgaaccgtgtccagctacagtgggacgaagaggaagtgcacaacgcgctcaacgacaaacagctaattgccagtgtcctcagcgatacgtcctgcgtgggcaagtaagctagctttgtcgaattactttaacgaattgttttcttttaacttattttgaccctttttttaaatcctaagactagacaataaactattaagcattgg

SEQ ID NO: 1329 - DNA, 2638 bp, Aedes aegypti
gatttcgcggaaatgaattcggttctgaacttcttcgggcgccaatacggaaatgggtttacagcttcgtacgatccggcgatgatgcgattggctgtccacgagcaggacagttggaagggtatcactccatcgctgttaacgtcggactttaatccggctccgccgattttggcggcaaagtttgccaaatgcgagggacaggaacatatcctggccattgccaatgaagatggtaagattgccctccaggatacgaatctgaggaatgaggaaccgggtggagagcgggccctggaggggaaacagtgtcatatgaatgcggtcttcgatatcgagtggatgccgggaaatatgagtttggtgtcggcttccggagatcacacggcgcgattgttcaccgtgacggaatcgagtctggaatgcatgcggatattcaacggtcattcgagatcggtgaagactgcggctttccggcggacggatccggctgtgtttgccaccggaggaagggatggagtgatagtgctgtgggattcgagggcttactttggatcgaacatggcaccgagggcggataactgtatagtcagcggacacgctggaggaccaggaacgccttctgggtataggaagcgaacgagagcgacgccaaagattccaccgaacgtttgcagcagtagcataaccggtcttgcgttccaggacgacaatacgttgatttcctgcggggccggagatggaatagtgaaggtgtgggatgttcgacgacattactccagtcataaccgtgatccgttaccaaagtatagttttccttatgctggcaccacgacgttgaaaggattcacgaatctgttgattgaccacactcgaatgcggttgtatgtaaattgtatggacaatcatatctactgttacaatatttcaacttatgcggctgagccgatccaaaagtacagcggattgaagaatgatacgttctacatcaagtcatatctgagtccggatggacagtacctgataagcgggtctagtgacgaaaagagttacatttggaatgtggacaaccctaaaccattggtccgattgtgtggccacacagtggaagtcacgagcgtagcttggatgcaaactcaccaggacatccggattgtgacctgcagcgacgacgctagacacaaaatttggagggttagcccagaggagatcgatgaggacaccaaagtgcaatacagaggacattctgagtattgtgatagctataggcaggaattagctaaggttcgtctgaaatcgctggagtttactcctcgttccatacgaaggctcgtggaagagaacgaaaagaccccgaacaccatcgaaaagaaaccaacggccaagaggacgttttcggagatgaacggacacagttcggaagatccttcaacgtcctacgtggaaatcaaacgtcccaacatcgaaacacgcggccgacgtctgttcagccctgccaatcaaaactcaaggtcatcgggaattgctgccctcgaaatcgcctcctcatcagcttcttcacgtagtttgactacggtcctcgaagaaagcgaagagccatcgccaacgcactgcaagtctcccctcgccatgtcggatctcaatctcaaatctccggaaccggacgaacccagcaccagcaaactccccaacggcctatcctcacccaccatcaaccttccgaacttcgtcctcgatggagacgccccacatttggtcaacgtgaacaagcgcaaactaaaagagaacgtggactggcttacgaaaatccgcaagcaaaaactactccaagcctcgaaaaccttcgattctacctcctccagcaacaatggcctaggactgtcagcaaaccattcggaagacgtgtccctgctgctctcgccacgattgcagctcctgaaaacctccgaagatcaacaccacccgctttcctccagtccaagcactccccggcggagaatgtcccggtgtggttccgttgatggacagccccgaacgcccagcagtcgagcgccgagcaggccaagcactccggagacctctattttaagattttttaccgttaagaccccgactagttccgccggaagcggagccagtgggagcaatgcgtgaatttcgatccccatttcctctagttaacaagtgttctgtatgatttgaccattaatatgcactgggatttgcttttctttttttatgttttaattttcaaattacacaaaaatctacacatttgacgaatgaatcattgttcctcttcgattgctttttagtgtctgaaggttttctattactttctagtatttcctcacttagttagaaaacacgcctcaagattgttactaacctgcctcaactgcctaattatacttaccgtaacacaacgtattcttatagtttttctaaatgagatataacgactgagaagcgtattagacaataggtacgtgaatttgtgaaacagatttctaacgccaattttatgccattgtttagagcatacttcctattagggttaaagatggtaatgcctgtaaatattttattagatgtatttttaccaaaaaagagaggtcggaaagagaaatataattgg

SEQ ID NO: 1330 - DNA, 1743 bp, Aedes aegypti
atgaccaacaacgatcaggattacgagatgtgcttccgagcggagaatgtggtgctgccgaagaccggttacttcggagtgtccgctgcgaccggtggattggcggacgatcacgatgtgttccacttcctgaccacgtcgctgcatgtgcccggacagatcaaggaggaagtcccccatgatcaggatcaggccaagctgacccaggagtaccaggattaccagaagaagctggaacagcagaaggaagactaccagaaggagcaccccgagctgcagaaggatgatttggagaactggttcgaagattacaatgcccgggaactgcggcagatttgggaagcgcagacggccactcatgaccagctgcggacactcaataccaagttggatgaggtgattggtcgccaggaacgaaccctaggattgctgtcggtgcagggcggaggtggcgctcccccgccacatatttcccagcagcagccaccacaggcgggaggcgctccgcagattgctgccggtagtgtcatccagcgtcacgaagtcgatgctctgctgcgcaatcagaacttgatggtccaaacggttaccgagatccggtcgatcattggggaagtgcacgcccgggcggattccatcctgaacaatcaggcacgagctccgaccgctcagattcagggcggtggctacgacatgcagagtttgatccacgagatgcgggacggtatgaaccaggtcaagcagggcatggccggggtttcgcagcgacttcagcaaccgaacgcgcaagccaatgtgcaatgcccaacgcagaattgcgtcggaatgactgccttcctggtgacgatagttgtccacctgttagtgatagtaggatacaacatgtacagagacagcagggacgcccaagcgaaaaagttctactagaagaggctgctatgagagggccgccatcggtcaagtcctgctggtagtcaatgcaagttgctgtagaatgtgcgtgagcgagagcgagagggagagagattatccatccaaccatccagcaaaaaacaaaaccagcaaaatcaaccaaccagccgtacactagcgtcagtatgatgtaaaatttaggctaaacaattaaagaattataattagtgtggagaagcaaacctgataatgcgcgagtagctgcatttgtattgaataccgacccgaaacagaaacgcaaatcgattcagtagagtcagtcaactatactagtgttagagagccagattagcgtggtacaatttgccagatgaagaacgttagaaaggggctatgatttccgatagaattttgatcgagaggggcgaactggaatgcatgcattacttaaatccgtgacaaaccgactcccgtttgagtggagtttgatttatggagatcttaaagctactaaatttccctttagatttcttgtctatttctgttacgtgatatgtatcagtagaagtaaatgttttaagttcagttttgagtcaaacgtgggacgaaataatttcttgcatttgctgggctcgcataactgcctccactgattttagtttttgcctcattcacacttcactccgcattctggagtttcaaacgggaatatatgtttttttcttttcaagaactgctgaaaactatcgtcgttgtaaatgtgtattatgtttgtgcaactgtttcaaccgtgcgagaattatttaaagtaaaataaacaaagtttattac

SEQ ID NO: 1331 - DNA, 5238 bp, Aedes aegypti
gtctatcgtccgattcagacgaatcattcgtctccgccccgcgcattatggatctattttgttttgatcaagttcgcgcgcgcttcgacccgaaccatcttccaaattttaccgttcgttcttcgcaccttcccacgggatgcatttttctctatcttcctagctagttcagttcagttccagctgattacactgcaatgagataaaggtgctgggtggcatgttcactgtccagcagagagatcatggaagatccggtgtttcgcatcaagtatcagaagtacaagtgcatcgtaaagaaatgggaacgaaagttccgtaaggagaatggccggatcccgtctaagtacgacattcgggattccagcgtggacgtccggaatgcttacaagatgtactacaagctgaagacgtcgcttctggagaataccttgcaggatgccctcttggacgatgacgatttcgacagctcgttgatatcgcagatggagggcagtttgtcccaggattgttccatggggggattctccaacttgagtgatctgtccacggccaatgtctcgattagtgccctgctgacggatcagatcgatgggcgggtaacggaattcgaagcggaacaactatccgaacagaatgccaatgcatggaatctaccccgaaggaaggcccctgtgattcctgagaagcctaaggagcaaccggtgaacaaacagaaagcgaaagctccgccgaaactcatgcttgaaacttccacgctgatacctaagcgaaatcctcgcaaatctctctcaagtttgaggatgtcccagtcgggagccgtgtccagttccccatccatgaacagttggaaagattccttacccgatctggaaacccttctgtatgagaaatcgaaacaatctgttgagatatcgccatctcaaacgagtgcctccaataaggaagtccaggcagattctaatgccctggtgaacgaactggacgaaagatggctcaatcgacagggcgtagatgccggggctctcactcctgtgagcagtgcaggtgcccaagcgaaaaagtttggcctgaggaacatcagttctgtttccatctcggacatctccactccggtggacacttccagcagctttggaatatcgtccctcagtatgaactcgtttgcaagcgaagcaccaggagcaccggatcagatttgcttcgcccagaacactgcttacgatcgggcggttcagtccgattctgacggagtggtagagaacagtgaagacgaaggtggccgcgccagcgccaacagttctttcaactccggcgtgatccggcacgtgaccaagaaacggaaggttttcactagcgtcaatctaaaggcggaaaggaaggccgtcagtcaggtgatggtggccgacgagttgaagaaggaagttccgaaagaggctccatcagaggaagttctaggaaatggagtggagaacaaggacccggacgcgaaggatcagctggttgaagaagatgggccgaagactaaacgcgcgcggaagaaggttcccgtcaaagccaaggcgaagaaggcggttcaagccaagaaggttccagttcgccgcaccacccgagggtgcaaacccatccaatacaatcaaccgaatgaaagcgaggaagaagggggtgatttcgatccggatgatgacgacaaagatcccgatttcaaggaaactgccggggaccattctttgcatgacgaggagccgacagaagaagttactgaaccaattgaggcagaggtgtcgccccaagccaaacctgctagaaagtccgtagcgcgtaaatccagggctaaacagccctcttcgactggtgaacgaaaacggcgttctggcagcgctaagaaaagcccatcagcgccgagaattggtgggaatactgggaaaggcaagaaacgagttgcaaggaaaccggccgtcaaggttcctgtgtcggatgaagaacctgacaaggaagatggcttcaatgattacgtactggaattcggcatcgagagtttgaacaacgctcctagggtagatattggggagctgattaaaagcacccaagtggttgagagcttcattcaaggcgtcccggttaagaaagccaaggtcaaagccaagaaatcggatgacgaggaagttctaactccgaaagaagctgccttgaggtctaaagctgcggcaggaaagctgaatgagaatttcgttcgcgtggatcttcgaaaaaaggtctttgtccgtggcaagaagacggtaaactacagcaagtataagaaaagcttgtggaagaagaagaaagctgcggcgctcagcggcccggatatggacatgggcggttgcgatggaggtgtgctgacttgcttccagtgtggaggagttggtcacatggcaagaagttgtaaggtcaaaggagaacaactgctgccgttggaagcggatgatacggaagaatcgccgttcccaacgctggaagaagccgaatctatggccaatgcacagtccttagctgttcattctaacaagatcgagaaacttccagctgctagcaatccgctttggaagctggatgaaactgatacacctgaagacaacgaatatgaatatcttccagaagaaccatcccctccagctgaaacgaaacctaattatattggccacgttatcccaacggactttttgaagaagtccggcattttggagcttaccgttatgaacaaggacaaggttggctccctctaccagttgaacccggatggatctctcccggagacaccgaaagcagtgttcgatgcactcaagatgttcggccatcagcagttccgctccggacaggagcgtgccgttatgagagtcctctgcgggatgtccacccttgttaccctgagcactggatcgggcaaatcgctttgctatcagctgccggcctacctctaccggaagcatcggaaatgtatcacgctggtcatttcacccctggtgtcgttgatggaggaccaggtgcacggggttccgggtttcctgaacgcacaatgccttcacatgaaccagtcgcccaaggtgcgtgccaggacgatggatgccataacaaacggagagttggatgtgctgctcatttcgccggaagcggtcgtgtccggtgagaagtcgaccggatttggatcgttgttacgccagttgccaccgattgcgttcgcttgtatcgatgaagcccattgcgtttcccagtggagccataatttccgaccgagttacctaatgatttgtcgggttctcaaggaaaagctaggagttcaaaccatccttggcctgacagctacggcgaccgttcaaaccagactaagcatcgtggaacatctggccgttccggacgggatcaacggtatcatcagtgacatccccctcccagacaacctgatcctgacggtttctaaggacgccaaccgggatgcggctctgttgaacctgctgcgttccgatcgctttacagatcttcactcgaacatcgtctattgcaccagacgagacgaatgtgaacgaattgcatccttcctgcggacctgtttccaagatgctcaacgagcggcagaatccgaagcatctgcatcggcgccaacgtctcgcaagaggaaaaagttgaactactttgccgaaccgtaccacgccgggttgtcttcggcccggagaaggacaatccagaatgcgttcatgagtggagagctgcgaatcgtggtggcgaccattgccttcggaatgggcattaacaaggcggacattcgggccatcatccactacaacatgccgaagaatttcgagagctacgtgcaggaagtgggtcgtgccggtcgcgatggcggggtgtcccactgtcacctgttcctggataaccgcggcaaggacaggaacgaactgcggcggcacatctacgccaattcaatcgacaggcacgtgatccggaaactgttgcagaaaattttcgtaccgtgtgcatgtgtgaagaattttaaggacgactctacgtcaccggttaggattaaacgggtctgtccagggcacgaagcgtgtttctctgtcgaatcgaccgtccaacagctagatattccggcggagaacatagagacgctactatgctatttggagcttcacgaagagcgctacatcaatgtgctgagtaaggcttacgtgatgtgcaaggtgatgtcatatgctggtccgaaggcgctgcggaatgctgccaagaattgtccacccttggcgatggcaatcgctcttgagttgaagaaaggcaatgccgaaacgagttccactttcatcgagtttccggtgattgatgtggcttctgccatcggttgggacagtggtgtggttaaattccagctgaagaatctcgagtggacgattgaaaacaacgttcgaacccgcactcccatcagcgtaaacttcttcgatctgggtttccggattcgagctcccggagatctcaccgatgacgagttggacaaaactctggacacgctgtacgaacgagtgtctgggcaggaaagggctcaactggttcagctccagtgcgtatcgaatgcgctttcatcggtagcctttccaacgtatttccccgtcagtgggaccgattgtcctgagggaccttcccaaaaacttaaaaccatcgttcgcgagtacttccagaccgacattagcaacgaggaaattgagctggtgccagagttggacgatacccccgataaccagttgctgaacgacatacgaacgttgatccatcgctacccggagaataacttcagcggccgggcggtggcgcggattttccacggggttcagagccccaactatccggccgtcatctggtttaggtgccaattttggcgagcctacaccagtgtcgatttcaatcggatcgtacgcatggccaatgccgaaattgtgcgcatgcgaacgtaagccaatggggcccaagcgtgtgattgttgctgtttattgtgatttattgttttatgactatccgctatcatttggaatgatgattttggtaaaactagatggattaagttattaatagtttcgtttgtagctttgtatatttaaccatttcactgaaaccatttactgcgattgttaaaaatagactgctcttatcgttctaggtcaattattagtttgaaagttttgcgccgatactccattacactaacttttatac

SEQ ID NO: 1332 - DNA, 951 bp, Aedes aegypti
atggcgcctcgacgaggaaccgtaggcccggcgacggacctgtttgggactcttggtggcgattccgaccacggattcgagagctcccagtcaatagacgggtccggcagcgaaggtgcccacatgacccgctgttgcgttcccattggagactgcttcaaatcttccccggtcgattacggttccatcaacttggaagatctaagagattgcgttcgcgttatctgcaacaatgataattgcaccgcaggtcagtacatgcatcgcgagtgcttcgaccattgggaagaaggtgtcctcaactacctcaaatcgattggccgagctcgatcttggtccgataagcaacggcagcagaacctttggaccaagaaaggctacgacttggtgttcaaagcttgctcctgcaagtgcggacgtggtcatctccgcaaggatttggactggatcccaccaacctcactgttccagtcccgactggatgacgaatccgcaaagaagaagaaaaagaagaaccgacagaatcagaaaccgaccctggccatctctaccagtccatcgagccattcaagcagctcctctaatagtcccaatgccggaaccggcggaaccaactcagcatccgctctgttgaacaccctcaaactggccgatcactttgctacctcactgatgttgaataccagcggtggaaacggacacgccacaggacacggacacggtgccggtcgacaacggaccaattcgctatcgtcgtctagcaatggttccagcactcctccggccagttctacgacttccggcggaggcagcgagtgccaaagcatttcaccggtccacagcggcctagggctgagtggatgctcggtggcggccacggcagcagcactggccaagttgcctttaacaccgaaaaccaaggtggaaatctactcggaacgagtgaggtga

SEQ ID NO: 1333 - DNA, 1482 bp, Aedes aegypti
atgaaatttttccttcgcgctattgaggacgaaggcaaccacggaaacgacgagacccgtctgtttatcctgtcttcgctggccgcccaacacaagagccgggtggcgtgtgtcctgtgcgaggaaccgatgctagtctttgatcgctatccgctcgtcgacgggacgttcttcctcagtccgaaacagcacgccaagggctgcatcgaggtgaaatacgagaatcgagtccaatacttgacgtcggtttgcatggcgtgtctggatggcgtcgaacagagtcgagttgtacgatgcagattctgcgcccagaaatgggacggctcgtcattggttctcggaaccatgtattcgtacgacatttttgctgcgatgccatgctgcactgaacgattgaagtgcaacaactgtttcaagctgctgctgcatccgcaccagcggctgaacttctacagcgactacagccacagcgtttcgtgtccgtactgtcacgcccaggacacgcacttcgtgaagccgttggcctactgctacaccaaacagccgatgcagctgttccagcacatcgcaacctgtagccgaagcaatagcacctcgtcagccgcagcatcgcccccgttgacgtccaccggagtggactcaatggcagcgatgaactcgtttatccgggagctgcgcaacctcaacagctccaccagcagtagtgctatgagtaacagtagcttcgattccgggttttccgcttcgtttgccggggattccaacggcagtagtggccgggccactgccatcgccgcgcaacctcttcaaccacagtcatctaacatcgtttggggcaacaagtcgctctggggtgttccaccgccgagcccatcaccaggagcgatcaagtcatcaacagtggatttgtcatccacgtttactaacactagcagtaacagtatgtacgttagtagcaaagattcctctagtacttcttccggtggctctatatgggcctcgtcaatgacggccaatccgtcaacagtcccctcccagtcccgatcctcgaacttttccgccaatatctgggaaaattcaggtacgaaagcaaatccggaaccactcggttcgatctggatgattccggaaaccggccgcggtaatgtatggggtaccagctctcagttactgcgacctaccgaaataggctccgcaaccgggacagggaatgacgagagcaaactgagctcattgtggggcacttctggtgcgtcgtcatcgtcgtcgacgtcatcctcagggaatgtattgaactcgctccggctggcgggtacggtcggtgccggaggtgttggcccaggttctagcttcgggggcctcggtggactcattaccagtccatcagttacgggcaatacggcgactatgccggcagccactgcatcaaccatgcagctattttcggacgattttctcagttatctcaatatcaacaattag

SEQ ID NO: 1334 - DNA, 3054 bp, Aedes aegypti
atgagtaagtgggaatgttccaacgttccaacgcatccggcgggaaccgaaaagccagaactggttggttcgaagaagcgcaacaccaagaaatatctactcataggcggagcagtagcgattgtgctagctgttgtgatcaccctggtcgtagtgctcaccggagacgattcaagcgacaatggtgataagagcccaatcgtgtccggtggagatccaatcacactggaggatttcctcaccggtaaactgtcggcacgtggtttcaacggtgcatggtcaccgagcggtaaagtgatttctcgggacgatgttggacgcgttctggcttacgatccggccacgaatgaaactaaaacactactcgatgagaaacatgaagatctgctgcagggattcaagttcgatctttcggccgatgaacggtatctgttggtagctagagggtacagcaagatcttccgtcacagttttctggccgtgtacgacattgtggatctgcagaacaaccgcgtcattccgatcaacgtcaatggcgagaggagagcgctcaatgtggtagaatggggtcccgtgggaagtgcgttcatattcgtttttctcaacaatttgtactacaagccgtcacccgatgctcaggagattcagattacgactgatggagaggctagcatctacaacggcatcccggattgggtctacgaggaagaagtattctcgaccaacatagcaacgtggttctctacggatggtcaaaagcttgcatttattaggtttaacgacactactactcgactgatgaaaatcccaatctacggacctcctggtcatccggaattccaatatccccatgaacttgctctgcactatccgaaggctggaactcctaatccctctgtgaacctctaccaggtgaatcttatgaacccgtcggtaaagattgaaatcaagccaccatctgcgttggtaactccagaaaacgatcatatcataacatcagttggttgggctaacgagaaccgtttgattacaatctggaagaatcgagtacagaatcatgcgatcgtaacgacgtgtgatcaaaacaacagctgtggtgaaattcaagatatccgagccgatggaggatggttggaattgttcagcgctccggtgttcaataaggacggatcacagttcgtcattataaaatcgcaggatcagggcgccgcaggtggtttcaatcacattaccgtgatgtctagtcaaacgacaagtagtatggcatttacaagtggaaagtacgtggtgcaagagattttgatgtgggaaccggaaaccaacatgatattctacgccgccaataccgaggaagattcacacgtgctgcatatcttcgcggttcaaggtcattctggcgctaaaccaatgtgtttgacgtgtacagtaggatcgagccctaaacagagctatttcaatgctcagatgagcaagaagggaaaatacattgttctagaagcaaaaggaccgggcgtaccttggtcagagatgttcgaatggagttttgtcaataacgctgttaccctcaagcctgttaaaaccctggaaaccaatactgagctgcgagagcgcttggaaggcaaatctctgccgactgtacagtaccacgagatcgacttggataacggatttacttctaaagttatgcttctggttccacctggtattgatctaaatggcaagacgaaatatcccctacttgttgatgtctacggaggtccaaactcgtattcggtaaccagctcttggtcgatcggctggggtcatcatatgagctcgaatcgatcggtgatctacgctaagatcgatggtcgggggtcagggttgcgtggcgacaagctgttattccaaatctatcgcaagttgggaacattggaaattgaagatcagatcacaacggccaagaagctggccgaaaagctgcctttcgtagatccaaaccgcaccgctatttggggttggagttacggcggctacgcatctgctatggcgctagctaaggatacccaacacgtattcaaatgtgctgtttccgtggcaccagtcactgactggacattctatgattccatctataccgagcgttacatgggacttcccacggctacagacaacaagcaaggttatgagcagtctcggttgacagcaatgtacgaaaagttccgagatcggaagtacatgttggttcatggtactttcgatgacaacgttcactatcaacaggctatgcagctcgcacgagcactggaaacccatgacattatgttcaaacaagtgagctacccggacgaagaccacagcctcgccggagttcggccccatctgtaccacactctgggccggttcttcagcgagtgtttcgaccttcgggactgacatggtcttctagccgaagacggcgagcaccaaatgtacttcataccggacaatgattccttcgtccctaaagacttatccagccttctgcgggagttccacctgcaaaaagtcacaaatggcagcatgtccgtcttgtaaatagtttttaaaaacaattgtccattttgcgtacatcgcgctcctgtaaatagtggaccgactcttgaatcgattgggatgtaaatgttctctttaggctcctgtgtctgtaatgtatactgtgtacagttaatgctatccagaacaggtttgtgaaaccacaagaccatcaaccattattatagaaaacatatttctgcagcgccaagtaacaggaaccacatgatatgccaagttttacaaattataaaaatactagtcagtattcagaagaaggaatgtgtaaacaaacttttcacttttatgttatgtttgctacacatagatagttacgaccaatattttataaaaatcatttcgttttaaattcaaattttgatgttctttggagcggtgttctgaatgaatgttttacaactagtatgagctgtgttaaatggtaggtcacaaattgtaacttgttatttaaatgttaataaataaacaatttcatacgga

SEQ ID NO: 1335 - DNA, 2059 bp, Aedes aegypti
atgttggcagcgcgcgactgcgatgatgacgtttgcgctgcaagggatgtgcacgaagtctacacagcgtgtagggatggtctgcacgcgaacagatacaccctaaacatcgaagccgtcagctgcgacgagatgttcgtagacctgaccgatctcatcaacgatgtcggtgtcgacgtaatggactttgttggttatatacgggaccagatcagggaatccactgaatgtccatgttcggccggcgttggggccaatcgactacaggctcgcatggccaccaagaaggccaaaccgaacgggcagtactacttggcgccggagacggtacttgagtacatgcgagatattccgataagtgacttgcctggaattggtccgagcacaacgtaccgcctgaaacaactgtcgtggagcacgtgtggagatctgcaattcgtgccgatttctgttttgcagcgcgaattcggcaagaagtttggcgatacgatctatcatgcctgtcgtggagaggatgatcgtcccctggtttacgatcaggtacgaaagtcggtttccgtcgacgtgaactatgggattcgattcaaggaggaagccgaggtggaacgttttatgaagcaactgactgaggagattcacaaacgtctgatggagatcaagaagcgaggaaaagtcatcacggtcaaattgctcgtacgatccccggaagcacctgtcgagacggccaagttcatgggccacgggctctgtgacattattaccaagtctcacccatttaaggattacacttgtgatctagcggtgatcgagaaagcagtactgatgttaatgaagcagatcgcagcccctcctcacgaacttcgcggcatcggactgcaactttccaagtttgacgagaagaaatcttcagtggattcaaaaaattccttgaaaacaatgttcgaaaaggcagctgcgaaacaggaagctaccaaacctgatcaaccagtcctcacgccgacaaaagtacccccagctcccaaaacggaaattacaccaaagaagaaatcgctagcaacaactccaaagaaatctaggccaaccttaccaaaggcgggccgaggtcgtggacgacctcccaaaaccctatcgatgaacaactccaaacaaaacaacgacatgatgcgttttctgaaaaacgcgaaaggtggttccaaagagcttgaaattcccgacggaatggacccggaatttttggccgcccttcctgacgaaatccgcgctgaagtcatcaaagattacaaactgcaacaagccaaaaatcgtgaaccgttgctcgtccaaccgaagcccagggaactttcaccgcaaccgtctacttccgcgaccgtgcgtcccgttacaaaatcttccccaatttccgaggaaaagatcagtgtagatttgaaatttcttcaggccttaccaccggaactgcgtcaggaagtggaacggcaaatcgagctacagaaggacaccatggtcatcaccagcaacgaaccggagttccacgaacatctgcaggttacaccggagtcgagtccgatgaaggaacgtccggaagttggcgctacaactaccccgcagaaaccacctgcacctgaagtggaagaaaacatcttgctgcgctctgattggcgaactctcctatctgcatgggtcgagagtggggacgaaccggaggatgaggacgtgaccataattgcggggaacgcacgggacttggtcaatgggaagcgattgcatgagcttcacctggcgttgcggtttctgtttcggatcttggacgaacgtgaaaactgtcgatggcatcgggcctacgtccggatcgtggaagcagtgcaggttgtaatgttggaaatctaccgttgcaaaatggctgtgttagagaaattcggatgtggtaagccggaatgctgcaatagtttaaaatagaagaatattgttatgtttgcataaattttattacacaattcgtagatcaatttatttcgtagatccattatttatacccctatttaatacaatacgttttaaaagt

SEQ ID NO: 1336 - DNA, 1327 bp, Aedes aegypti
gagtctctgttctagtgagggtacgtattggatttgtagctactgtggtgaatgcacaaattactaccaactagtaaggtgaggatgctgcagtgctcgaggagcttagtacagtgctgttaaagttggatgccccgatcaggtgcatcggttgcaattcgttttagtcagtgtaagatcgcatgcgtctctacatcaccggccgcgaacagttgaatccaccaacgatcaaaatgcgatcgcttagatccagcccgattatactgttactgctgattcatctcttcgatcatgtggtaatagctgatattgagccgattgttttagtgcacggaggggcagggaccatcagcgaggatagaattcctggcaaatatcgcggttcgaagctagctgcacgtgtcggttatcaggtgttgatgaacaacggaactgtgctggatgctgtcgaggaagcagttcggatcttggaaagcgatagcaacttcaacgccggatacggttcagtgctgaactacgatggcgacgtggaaatggacgcaagcatcatggatggggccactttgaaggccggatgtgttgctggtgtccgggatgttctacaccccattacgttggccagacgggtgatggataaaaccagacacaacttccttgctgggcagggattggtggacttcattgaggaagagggaatcgaaataatgtatccgcccggtcaactagtcacacagttttccaaagattctctggacaaatggaagcaaaacaacgagaaaccaagcaccggcgaaggaggaactgtgggagcggtagcaatcgacaagtttggcaacattgcagcagctacgtcaacgggcggtctaacggggaaattgcccggtagagtcggagatacgcccattatcggtgccggtacctatgcagacaatctaatcggtggaatttctgcaaccggtgacggagataccattatgaaggtgtcgctggtttatgacattctgaagcgtatggaatatctgggagatgacatgagcaaagcatccgaagatgcgctggcagccatgtcggaacgcttggacggtacagccggtatcattgggctggatacgaacggaaacgtggccatcgtgtgcaacacggatcaaatctcttgggcgtatcagcgtgggcagacagttgcgtatggcgtgcggaagggagagcaccttgaggaacaattgtccgaggaagagatgatgctagatatgtggtcagtttcggaagagttgtttgcaaaatataattgaacaattgaagaataattaaaaagataaagaagcacaaa

SEQ ID NO: 1337 - DNA, 2051 bp, Aedes aegypti
tgcgggtgtcagttcgctataacggctgcgggcgtacgaccaccgccggactctaaaaatcataacatgatcaataaggaatgttgagatatacagccgtgtgcattacgaatcattcagtttatggtgggagattttgttcagtgttcacccttatgccagtttagcgtcgacgttatgttagcccctccactcaaatttcaaccaaactgaccccaatctccgctatgattgcgctgtcaaacagtcttcgcaaagacgatgaaaattgcaaaacattacggtgaaaataagtaaaaattaatgttaattagtttccctacgattaaacgacacctatattcaaatgtaccagcaatatctaaaccaagcagtgcggacactgcaaaaccttagctccgacgaactcaaagatctgctaaacgatgacgataagctagatgaacgagttaatttggccgtggaggcattagaatccgaaaaagaagtggttttgagcgaaaatcgcagtttggccgaaagcaacctggaaaaggagcctaaattgattgaactgcgagctaaagtaaatgaactctctgaacagggcaaaacgctagcaaattcggtgaaggagaaatccgaagaattgaagtccaaatctagcagcacaaatccggatactgttctagcactactgcaggcagctgccgcagaaagtgaggaagaatcggaaaagattgtcaagcaatttctggacggagaactagcaattgatgcctatctggaacaatttatgaccccacggaaagccatgcacagccggaagctgaaagcggagaaaatggtggagttactacgaaacagcacaaatcaacaacgatctgctcctttgccaccattgcacggttccccggccccgggagtggttccttatccctctcacgtcagtggattttatccgccgcccccacaaccatctgccggaagtattccgtatccgcttgggcctatttcaatgcctatgccaggcatgtttcgaccgccatattaaaatgaaaaatgcccataatctttcaatgagcctgctacattgatcgttgataagaatctactctactttgatcatttactgaatatgttgcgttattttgcattagctttaaactctaatagacgacatgagacaaatgagttactgcttgtaaagttaggatacaaaaatatgaaaatacatggatacatcatttattacttcgtttaaagttttaccgattgtacaaatcttaattagaaaaatcttcatcactgaagtcttcataatcatcatcatcatcatccgaaaacagatcatctccatcttcattttcagccatttttagctgttcaaacttttccatcagctcttccctggtacggggcatgttttcaacctttttcttccctttggggccatcgtcttcataatccgaatcgccatcctgggatttctccttcttcttgcctttgttcatatacctcaagaaagtcctcctcttacgttccggcaacgatttgatgagctggtccatttctaccttcagcttgattttctcttcgatagtcggttccggcggaacaatgctgacttcttcggatgacttcaaacatttggcgcaacatttgctggaaagggcgcaatctcggcataggacatgatacgctcgtttaactttccgttcgctgcatttgttgcacttcccgggctgcgtcagcggtttgtatttccgatatttaatcttccattcgatctgctccttacaccgctcgcaaacttcgcaaacgttcaagtttgtgatcagcttgattagcggagtgtgtttgtcgtgcagatcgtttttgaaggcgaatgtgttctgatgcttctggggtcgggatcgacggccaccatcaccacgtcttgtgctcattttgcaactttgagctagcaaatttcaatagttttaatttattgaaaaatttctattttgtacttgtttttcacgtgttgaaagcagaaacggacagtaaacaaaagatctggcaaaataatt

SEQ ID NO: 1338 - DNA, 10695 bp, Aedes aegypti
atgggcgagggacgaggccgtggaagaatcaacaacatcaatcgacgtttgacggcacttgagcggaaggtaggaaatttaatgacgaagctgaaggagaacaactgtaaaacaagtccttgccaaaatggaggaacatgcatcaatttgtacgattctttcatttgcctttgtccgaggaactgggagggaccaacttgtgccaccgatgtcaacgaatgctctgagtttgtgggaaccgatctgggttgtcaaaatggtgcaacatgtaaaaatacgccaggtggttatagttgcatttgcgctagtggatggcagggaattcattgcaacagtaaaacgaaggactgcatgtcgtcaggcagcgaactgtgtggacatggaacgtgcgttcaaacgaaggaggaaccaggatataaatgcatctgtgatcagggatggaagaacaatggtgtaacgccggcatgttcagtggatgtagacgaatgtgcagagtttaaaccacactgttcaaaagatccggaagtcagctgtttaaatctaccggggtcatttgcatgcggaagttgcccagcaggatacaccgggaatgggttttattgtgtggatatcgatgagtgtcaaacgaataacggtgggtgcagtacatctccatctgtgccatgtatcaactcgaggggctcctacaaatgtggaaattgtcctctaggatacacaggagacggaaagacttgtacgctgagaggaaatcgttgcacgccaagcctttgccatcctatggcacgttgtatggattttgccagtagagtggtatcatgcatatgtccaccgggttatcaaggctctggatatggacccacgggatgcatcagaatgccaatgaacccatgtacattcaatccatgcaagaacggaggcacctgcactgcaaatggaaataactacacctgtgcttgcccgccaggtactgcactaccgaactgtgccaggctaatatctccatgcgctatcaatccctgtcaacacggaggaacctgtacgcctttcatcgatcgatacgtgtgcagctgtccgccaggttacacgggaatgcgctgccagagtgtacaacggtcttgcggaggtgttctggattccttaactggtgacttaacatacccggttggcaacggtacttacaatcataatgcaagatgtgcatggttaatattgaccaatcacaccaaggtgctgaacgttacgttcacgaagtttaacttggaaaaccctctgcagaatagggaatgcaaatacgattggcttcaaattcacgatggaaaaacatcagctgcgcataacatcggtagattctgtggtaacactttaccgaaaggaggaaatatcatgtctacccataacttcttgtatctctggttccgatcggataacagtacagctcatgatgggttttctttgcattgggatagcattgatcctatatgcggcggggagctgtcagtaaaaagtcacggagtaatagcgtctcctggttcacccgggaaatatccacctaatcgggattgcaagtggtatttgagtgcaccggctggcaaacgattacagttccatttcttcacgatgcagttggaagcccatgactcatgcgagtatgactttgtccaaatcagtgatggtttacaggaagaagcgcctgtgctgaagaagtattgcaatacctcacatccagaaccgttggtcacaccaggtaatgaagcaacggtgtatttccactctgatgaggatggcactgattccgggttccagataagcttttccgtcatcgaaggtattccgggatgtggcggtgttttcacaaagacagaaggcgaaatcagttcgccaaggcgttatgaggataacaagtacccaaataatttgatctgtgaatatctgatcaaccttccagagggaagccgcatcaatgttcagttcaacaggttccaattagagagcagcgaaacatgcaaattcgactacgtggaaatgtttgatgggagaactgtggatgatccatctcttggcaagtattgcggagagcgttcaccattacctttccgtactagttcaaataatttgttgataaaattccatacggattggtcacattcacaaggtggtttctcgctcaactataagctattgtgtgggggagtctatacagatccgagcgtcgagataactagcccagggtatccgaaaacgtatggcctgaatcaaagatgtgactacgtaatccaagccccgcttggaaaggcaatcatgttggatttccaggactttgatgttgagggaaattcttatccaaactgtgatttggatttcgttgagatatacgacggtattgaggctactaacacttccttcataggacgttactgtagtgctaaaatccccccaactgccatttcgtcattgaatgcgatgttgatgcggtttgtatcggacgcttctattggaggcaaaggattccgggccaacttcacgttcatcaacgtgacttgtggaggggtgattacttcggaggacgttacgataaggccgccgacattggcggatcaggagagctacataccggatgctgaatgtcggtgggtcattgttgctcctaagacgcatgccatccagttgacgtggaatagttttgagttggagaagagtagtaactgtgtgtatgactatgtggaaatttacgacaactcgtcagtctcgaagccgcttgtgggaaggtattgtggaatgacaaaaccaccagctctgacaagctcaggaaacattgttacgattattttcaagagtgatagctccagttcaaaggatgggttcagcttgtcgtttttattccgggatgtatcaaagttatgtgatggaaatttcttcacgtcaactggcgttatcaaatcgcccaattatccccaagattacccggccaacaagatatgtgaatgggtgatcacagtaccaattggtcagcaaattgagctgaatgtgaaaaattttaccatggagaagcatactgcatgtcgttttgacgggttagaaattcgtaacggaggaacatccagtgcaccattgataggaaagttttgcggaacagatgacttcaacggaacaatctctttcagcaacaggatgtacttgaagttttattcagacgcgtcacgtaattatggaggattttacattgagtgggatggtacatctacaggatgtggtggtgtgctcacttcaccaagaggatcgataatatctcctaactatcccgaatcctatggtaacaacgcacaatgtggttggcgaataacagtcagtgctggatctgcgattcatatagtattcatagacatcgacatggaaagtgtacccaactgtcggtatgatcatctggaagtattcgatggtcgagatgtagctggcaaaagtttgggcaaattctgtacagtcgacaccgatccgattcaactcaacaccgaggacaatcatgctttcataaaaatgagaagtgatgacactaatcaaggcagaggcttccacctgaaatacaacattctctgcaaacgaaatatcactggattcggcggagttattgagtctcccaatttccctgaaaaatacccgggcgggtcagagtgcctttggaccatatccgttccacttggaaataagatcgatattgaattctctcattttgaattggaaaatggcatgatcttcaacagtgataagactcacaatgttccgaaaaagtattgcaatcatatgcccgccaaaatgacatcaaaaggatcgactatccaaattggtttcaagtcggatactagcggcgagagctttgggttccggcttgaatggcaactgaatggttgcggaggtgctctgacaaagccttttggatcgtttaacactccaaattacccgaatgagtatcccattaacacgcattgtctctggacaatttctgtgtctccaggaagtgtgatagaactgacggtttctaattttaatatggaatcatcgagtaattgccgatacgatgggctatcgatttcaaatagcgaagatttcagtcaagtaattagtaccttctgtcacactcagaaagaaccggtcaaactaacaagtgcaggccacaaattgtatgttaagtttttcagtgaccaaacttacacatataaaggttttactgcttattacaaaactgttgcagctaaatgcggtggactcctgacagctcatcaagggttcttgtattctcccaactatccgaaaaactatcctggcaatcagtcctgcgaatggataattcaaaccgaaccagcttacacgctgcagttcaacctggaggacatcggtattgtgaaaagcccaaattgtacgcaggattatctgcaggtgtatgatggtatggctcgtgacgaaaaaaagcttctcatgaaggtttgcgatagtgagaccaatgttacgtccgtggtatctctaagtaataaactgctggtcacattcacatccgatgcagcattcgaagcgaaaggttttagagccaattactcgattgtaagttatatttttttcttagctttattcagtaacttacatttatttttaatatcagaactgtggaggcagattgaacatcaaccgatgagacacgttactctacaagtgatgcacatgaacatagttgaagtggaaggtgcttgtttggccaatttgacggtgcacgatggtgaagacatttatgcaccgataaggtacaccgggtgtggaagtaaaactccatcggccattgttagcaacggatacgctttgacagtgcacattacatcggaagacttcaatctgtacaatttgctggggatgcagtttgtcgcgacatgcggcggtgacctcacgtccttttccggtgaattcgcgtcgccccagtatcctaacatgtacccaatgaatgtcgaatgcatctggactgtgaaggcatccccgggaaatacggttcagttgtatttccgatcattggacttgttgcagtccgaggattgcaacgtagattacctggaaatccgggaagcttccggcagcggcaagctgatcggtgatttttgtggccaaaatcttccgatgaacctgacgtcgtccaatagcttctggattaagttccaaactggcaatcagggcatagcgaagggtttcctagccgagtactcgtacgacatgtttagtgaactaagcggaagcagcggagttgttacatctcccatgttccctcgagattatgccaggaatgaggtacatacatggagaattatggttgatatggggtctgttatctcgatgaagttcggcatttttgaaatcgatgccaaatttttggacacttgcgaaggccagttagagcccttgaaaggagaattatgtgggttgacacctccggaaccattcaagtcgtcatcaaacgtggttttcattcgtcttgatcattcggatgccagtggtccttcaaggttctcattgagttgggagcaaatcggaaaacaagacgaacctgtaacagtgaaggacgcagatgattatttctgtggaggcccacatgttgttgtgctgtccaaaaacgcttcatcgtttaatataacgtctcccggttatcccgtcggataccgaacgaatttgaactgtagttgggttttccagccagaattgtctacagaacacgcctttcttcagttgacctacgtggatttggaagaaacggatgcctgcctttcagattatttggaaatttccacatcctcggatatgttttcatggtctaagccggaaaggatttgcacttttggatatcgagttaaatccatgttccacgggaagcctttcctgaaagtagaattccgatcggattactatagtaatcggacaggatttactggaattgcatcgttgcggtgtggtggtgtcatgacggagtctaatggagtaattgaaatccaaccaacgcaaataaatgaaacaaccagaattattgattcgcaatgtatgtggaatataacggtgcgtccaggccgaacaattgaattccaatttgaatcgattaagcttcagaaaacagatgcatgtgactcttctgtatccattaaaaatggaatagatgaatattctcctctgttgggttcatattgtggcaacgaaatccccggaaaagtgaacacctctagcaacagagcgtttgttaagtacaactctggtcatataacaaccaatcaattcagactcacatatcgtgaagttggtatggaatgcggagggcgaattattttacgtaaaaataactcgccgctaacaatcaccacacccaacttcccggaaatgcctcatccgcacagtgagtgcacttggaccatcatggctccagctggcgagactatcaaatacgaattcaaaccgtttatgctaaaatactcacacaactgtgtgaatgaatacgttgaggttagagatggtggcactacaagttctagtgtactgttgaaggcttgcactcaggacacagtaccgtcaaggcttaccacttccaatatgttgcgagtgcggtacttcaccgacagttctgaccctggaaatggcttcaagttgaacctatcaatagcaaagtgtggtggatccatacatactcgaaaaggaactgtccaatctaaaaactaccctgtccttggtggataccctgccaaatcggtatgcgaatatctcatttatggaagtatgaacaccgtcttgaacttaaccttcgaggacataaacctgccgactgcagtgaactgttcaagtgataacttgaaaatctacaatgtcatacctggagagaatgtaactgagttactgatcggaacatattgtggatcgcagattccaacatcagtcctaacgtatggaaatcaagctaaactagtattcaccacatttgcaatgcagagcagttatcgtggcttcaaaatcgcattcaattccgtggatgatcagtgtggaggtgaaatcaatgcggcctctggggatgtgaccagccctgggtatccagatgcaggaggactgagattcagacgattctgtgagtggagaatcaccgttccagaaggtcgtcgagtcaaagtagaatttgtagacttggatctgtcgacggttagtgccagttacatgcagcgcatagggttctaccacggatttgactattcggcacggatacggttcgtcacgggcggatcgtataacaataaaccgatacactccagtaacaataagatgatgataaacttctggtcgaggatttcctccgataacagagggttcaagttacacttcagcagtgacgagccgtctatgtgtgttggaaatttagatggaaacgaaggaattatcgccactccgatcaaccagacaagctttatgtgcgagtatagacgttcaacgggagtattctcagtgggagaaaatggcaggaaaaccggtacaatggccctgtacttcaacgaaatgaaggccggactgtacaacaatgcatgcgcattgagcaccaggggtatatttatcttaaggaacacagtaggagacggccaaccaggagttttgaaaaagtattgcggaaatggaactagcagcgatttgattagatccccattcccggatatgtacatcttagcacgtcaaggtttattcttgggcgaagtgcagttcaagttgcgctatcaaatccacgaatgtggcggaatgtttggaagtgaattgaagaatatctcaagtactaccttggcaaggagtaatggcccgctggactgtgcgtggtatatcgattacccggataacacgttgatcagtatcgactttactagtttcagcttgaatgattcctgcgagaatgagtacctttccatttacaacggtcccaacaccaatagtccactgttgggaaaattctgcaaaggaattggtgttgaatcgatcatcacacagggccattacgcattcatagaataccactcggagaaagccaatgctaggggtgattttgaactgaagcttgctgaaatgacttccgggtgcggtggaactctacataagaactcagacacgttcggttcaccgaacgtaggaggtaaatatgcaccaaacatggaatgcatatggacgattagagcggacgctgggtatcacgtaggaataagtttcattaaccgattcaatctggaaaagagtgaaaactgctctaaggattacatcgagttctttgatcgcataaacgacagttggactagcttgggacgcgtttgtggaaagaatacgccaaaaggtttcaattctacaggatcactgatgagagtgaaattcaggtcagattccagtgtggaagccgacgggttcacccttaagtgggagcaaaattgtggtggaatttataacgtggatgaaaatacgggcgtcatgatgagtccaaactatccgatgaattatgatcgaatggtaacttgtaactatacgtttgtagctaacgatccgaactcatacgtcaacttgaacttcctggacttcgctctcgaggacggaccacaaacatcgatttgcatttatgataacataaccttgtataagccaatggaataccaggttccaattcaatgggaaaaagtcggaacttactgtaagaaaaactctcctggtcggatgaggttcaagaacagagttgctgtcatattccgatcggataggtggctggaatcgagaggattcaaatttgagtacaaacttgacagttgcggaggcttaatcacacaatccactcgaatagaaagtcctgatactagtgcaaaggttaatggctatggaaacagcttatactgtacatggaatataacaattcccgatgggaagaaggtcattgtacgatttgaagacgttgagcttgaacactccgatggatgctatttcgaaagcattgaagtttataaaggtcttgaaaagaaatccgatcaaaaactagcgacactttgtgggaatctgacggcgcatgccccggcaataagcatcaagggaaatcacggtgttgtctactacaagtctgagcaatttgcttcaagcaatcatcatttttcagctttggttttgtttgtaaatgactgtgacctacaggtaaatcttgaaagaaattcgcaaccttataacctcaacattctgaacaacgatccaacaatgcgggactgtcagtacacgatcaaagctccgacaggatatggtttgcagctatccttcaagaaattccttctgggctcctcccggaatactacggattgttcgggtaactttttggaggcccgtgatggatcgggtccatttgccgatctaattggaaggtactgtggctatgtgctaccagcgcctgcaacgacatacagtgagtcattattcatgcgattggcgaccgattcaacaggacaaggttctggtttcaatgcaaccgtatctctcgtggaatctccttgcggtcgaagttattacaatctatctgatggtcaagtggaagttttgaagagtccaaactatggtaaaggaaactatccaccaaacaccaagtgtctgtggcttctggaggttccagctggaaaaacgatcaatatcgaattcaatgatttcaagctgcaaaattacagtgatgatttggaagtgtgtcgggataaactggagctttttgacgcaagcgtgaaagcgttcatttatgagggattaggagaagatgtggtgttccgaggaaaatcgtcacatgcacagaaaagtccaaactctcatcacatctactgtggatctggaagcctcccggccacctatcattctcactcgagcaaactctacgttaagtttgagagcaacgaacgcatagaagataaaggatttcagttgtccgttcagcagaacaattactgtgctcagaactatactcgactgcaaggacgcatcaatagcaattatgtagtgaggaaagagcactgcactgtcacgatccaggttccggagaactataccatagcgttgtattttgcgatattctacactcatgctccggactgtgaaaaggagggcattcggatctacgatggcctgggaacggacaaacagctggaacttctgtgcagttatgcgacgccgaatcctgtgttctcggaaagtaatgcgttgaggatagaaattccggcttcacagggagagcacgtttccactatgattgatgcttcgtatgtggccacggaccaaggacggggatgtggaggagagatgttcaactatggaggaacattcagtagtccgttgtacccgaacaataatcgcacccggaaggaatgtgtttggacagtgacggtgccctttaatatgcgtattgcattgaagttcgatgctttcgaaatgggtagtattactacatgtggcacagattacgttcaattcatagaagtcaaaggtgaagagaaaagggttgttcggaagcattgtggaggagaaaaaccatcgacttatattagtgaaaataatgtgatgcaagtactttacaagcagactcagaattttggaggtacaggatggctagcaaaatatatggcagttgaaaagggtgctctagtgaatgactggtag

SEQ ID NO: 1339 - DNA, 783 bp, Aedes aegypti
atgtcccgccgattggctaaattgaatccgtacgagctgcacaagcacctgatcaacgagtacatccttacgaaacctggtgccaccaagctgctgcaacgggacacgtcccgggacaaaaccgatcgtgatgtgctgagagaacatcatcgcttcctgtgggaggacggcgacacagtggactcgtgggagaaacagctggccaaaaaatactacgacaaactattccgagagtattgcattgcggatctcagccgataccgggataacaaggtggcgatgcgatggcgaatcgaaaaagaagtggttgtcggcaaagggcagttcatttgcggtggtcgatcctgtgaggaacgcgaatccctacgcagttgggaagttaactttgcctatctggaacaaggcgccaaaaagaatgctctggttaagttgcgattatgtccctcgtgttccgataagttgaattaccattccaagaagcgagaaatcaagcgcctgaagaagcgcgagcggaaggaaaaggtttctcggaaggataaaattgtggagcaagatatcgaggtgccaagtctaaatgatcagtctagaacggaagaacaacacaccagtgacagagtagctgaagatacagacaactttgccgaaacaccagcaacgcgcgatagggaacatcctagcacttcagcaactacaacggatggttgttggactaaaggtccagaaatagaggaaaaaacccgagaggaagaatttgatgaatatttggaagatttgcttttgtaa

SEQ ID NO: 1340 - DNA, 5398 bp, Aedes aegypti
accgcgagaagctcgcgtttgttttcgcatcagcgattattattttggcaaattccccctgaaaatcggtaaaatttcgcggaaaacgacgataatgtgaaccgcaattgtcggaggattgtgaggagcgtaaaaattgccgctgcagctaccaaatagtgagacaatggagattattcccaactcgtacattgctcgcgtcgttttggcctatctatacgaggagaagttgaatcaggcggcgatcgagttttgcaaggctagtccttatctgcgggaggaacgagatttcgtaaaacgaggatttcgtccggccacttgtatcagcttgaagctgacggcgcttttccgggagtatggcgagattcagcaaaaagtggacagcttcgtggagaagcacggcgtggagttggacatccagcaggacctgccgctggtgaagaaggtggacgtggttttggcccttttgaagcagttacgcttccgaaggaaaagcgttgatgatgtgggagtgagtgttacaaagaaggaagttaggaaatcggcagtgggttgtaagcggaaaagggcagcgccttcgcctcatccgtcgatgtccagcagcaccccggaggtgggcgaaccccagaagaagcgagtttgtaccaatccggcttcgttcatagtgttgaatgatagcgggaggaatttatcgaatttgtcgcatatttctccgatcggagacgacagtacgcaggaatcgtgccgggaagactatgaaggggtgaacgaaggccaaggaaaggggacggaggaagatgatgaaccgctggacgtgaggaaatttccttcgattgatttgttctctcagacactgctggagaatgagaattatccggaaaagatagcggatttgattaacaaggggctggagtcatcgatgagtacccaaactgacccgaaggaaggtcccagtgggatacgagaggaaacaatcaaagaagtggtgacggaaagcgagcccaaggctcaagattgtcaatcgtttaattttaactttgacgagttgatctcgaatatagtgaaaagtgccgttaaggatccagtcttcgatgatattctggacgatatcagcagtaaggcagtcaaaacccagaatggtaatgaggagtacgaaacgacgacgacgcctccaccggaaacgccgttgaaggataggttaagaaagaccgatcggaagaactacaacccgacatcggttaagcgatctacgaagaaagttaaggtcatttcggatgttccgtactatggaggaatcccggaagggatcgacgttgagaaatctcagccggctgcgataaccgttgtgaaaatggaaccatctgcgccagtttcggaaagtttgaatatactgccggaagggactgttgttccttcggctgtcttgccaactcccacagctgatcaaccggtccctgtatctacaacccagttttatgtgattcaaccagacaacactacaaagctagtagacatcaatcaacttcagtttcccacccagcaatcagcaattaatttagcggatccttacggtacggcgccaccatcaagtactttggttcccatcaccggagcgggcattccggataatacctacttcattaatgtcccgaattgttgtctagaggcgaataaccagcttccggtatattacaacacttaccctccttcgggacttgaacaatccgtgagtaatgcggccatcactgttatacccgaacctagtccagacaagttccttattttcccatcctcgacctctggcacctcaaccatcagtactacggctaatgctttcgccaccacatccgtcgtgagtagttcctgtacgccaaccgtatctgccgccgccatcaaccgaatctgttcgcaattcgtccctctggttcccaaatcggaagtcaaatctaccactcttcagagcgctgttacagaggaaatccccaaagtggaaatcaggtttaccccacaagacgctgtcgagatggttcccaaagaagaagtcaaatccacgccgcagaacttcattctgaacactaaagtgcgcagcaactcaactcccagccgcaaagcgtcgcacatccgaattctcaactttcacacaccggcaaagcagtcccccttagcagcgggcacttccgacaggatacaaactccaggctccgccccaccgtctgtcgatccgaggcccagtcgtatccccacgctggtcgaacggatggaacctatcatggagaccagcatcaaacaggaaccatccaagacccccgagaagcttaccgacgaaatcgtacccatttccggtcccgccctaaatccgaactccgtctccaacacgccccgagtcgctaaagatccccgcacttgcgtccgtgtgctgtcccgatcgaccagcgaggaagccgtcgtcgagccccagaaaccgatggtcgaaatccctgccaaagccatcgtcgaagccccaaaacctatggtagaaatccccgccaaagccgtcgaggaggtccagaagaagatccccccgccaaggatcctgatcaacgattccgaaatggaagaatggcgtcggatccgatcggtgtccaagtccaacttcgaccagcacctgcgactcatggaggaacaacgactcaagaccaccgcccggacaccgatgctcaagaagcgcaaaaaactcaacaagaaggcagctaaacggaagacaccctctgtggccgcttccccggaagatccgatcgaaactccgatcaaggcggacgattcgctggagtcgatggacaggacagacaacagcattaccgacgttcacgccaaaatgctggaggatgctttggcctcggcgaagaaaccggaaagcgagaaatcatcaggaaaaactccgcccaaagccaaaactccggccaaggagccggaaccggaaccagaagaagaacaggcgagtaaaatctacgtaaaaatcgctacccctcgaaagaagaccccgttgaaggcgagtccgaaacggaggctatccaaaggcgacaaatcggtgaagaaacggcgcaccagtagtccccggaagcgggaggtggttcagaaggtggtccaggaagtccaacaaacggaagtggtgaccgtggtggagcagaacgaggtggtggttgaagtcgttcaaaaaaccacggtagaggtgaagcaaagcgaggtggctgtggtcgcgcccgaaccggaaccggaaacaccagttaaggtggaagaaagttcgttatcgcaggtggaagagacgcctcctgaaccgccaaagccagtgaaggatcacccaaaactgttagccaagaaatcgagcgcggaatatgtccgcaaggagcaagaggaatcagcatctgcggccaacacaagttcctgcagtcaggaaactccaccagaaaaacccccctccgttccgatcgattgctcgtttggaacttccctgttcctcgaaaccccgttcaaatcggatttgggaagcattcccatcacgcctcgttttctgatgccgaatcagatcgagaacacgcccatgttgaagttaatccgggagggcatcgaggcgaattcctcgatgaaaaagtccggggacatccatacgcccaatttcccgatcaccccggggctggtcagcacacccaaatcgatcaattcggtaagtccgcacagcgcgggtggaaccgggggcttcaactctcgtcgaacggattactcctccggaagttcttactacaaaccggatgaatccgaagatctggataagaatcttgaggccatgctgcttggcgaacgaacgaagcgaaaggtggaaccaaccggtgatctctcgctggaaaaggaaacagtcgatgagccacttccgccaccggaagtcaatcccatcctcgagacgagcccgcaaaaaccggaagagtatcgggggaatatcagtgcttcttcgtccgattcctccagcacttccgggtcgtcatcctccggttcctccagctccagtgacgcaagctctccggaaaacactccgaccaaaggacagcaggaacatcctttgcctagtccaataaaaccgtccacgttgtacatcaacgccttggaagctcggcgccagcagcaggcggaactagaagccaaaaagcagcgaacaatcgcccgtatgaagaacgcaaaacctgctcccttgaaaaagacggaacggaagttcatcgctccacccggtttcaagtcccggaaggtggtcgtcgctcggaaggatccccctccgaaggcagctccacctccgataccaacgactcgcgtagccccatccgcttcctccaagcgcaagaatcccaccccccgcaaagtggtcctcttggaaaagatcctcccggtaatctccaaaaagcactctcccaaacggagatcacaagaagcaaaccggaagtcgccccgttcgtcgcttccaatcaccgagcaggacgtcaaacggatcctgacccctcggaaagatcaaatcatcgagggaacttacgaaaatgagaacctggcccatcttcgatgcactccggacattccggatctggagaccgacaagaaacccgtgtacgccttccagagcccggaacgggtcgtcgtcgaaccggaccagtccaagggaacacccgactccaacaaggagaaccaatctctggaagaaccaaaagcacccacctccaaaccggaagtaacggttgagagcagcgaggaggacgaagacttcgcttacaacgagtgttcgttaggttcctgcttcgatgacagcgcgtgcaaatcgtacatccggttggttcacaacgagaagaagcccactgccgtcggtgtgcgttccgcggaaatcccacccatcaaacggatgaacattgtgatggatggatacaaaatctgcctcgaatcgcaggacccagttgtgctgtttgaaaaatcacccaagaagctcccagcttcgaccgtcactccccacaaaaaggatggccccagtaaggccaaccgaggaggcccaacgaaaaaatcatccaaaccagtggcgaaaccatcaaacccggtcccggttccgaccggaagctcgacatcttccataaaggcgaaaatcacgttggtatcggccgtgcgggaatcgtccctaccgaaaagcaagttaaagacggcagaacggctccaggccgcaaaacagcaacgtcgccagcaggaagtgctggcagctgcttcgaagaagcagaaacctgatccgcttgcggcggataaggccaggacaaagcagcctccggcaccggtggaggatcttagcgttgcttccagcaaagaactaccttccagtgaactttatcggagcttgcaatga

SEQ ID NO: 1341 - DNA, 2304 bp, Aedes aegypti
cgcgaaccaccgtgtgcatttagcgagaaaacaaaacaaactgtttgttttgttgcattctgtccgctcttgcttggtggcgtagttttttttatcggagaaaattgtgatttattccgttattcatatcactgcggacaaaaagatgaatttcgaagtgtcatctcgctttgagcaggaggacttctgccggttgtgcatgtgcagcgtttacgagctgcacgcgcttttcccgacagaagctcctgaggacaattcgatgctcctcaccaagatctgtttgctggcggaaatcattattgtcccaatggaagagctgaactcccacatttgctcccggtgcctacatcagctggaagactttgattccttccgacagcgttgcaaagatagcgacgaacagattcggcagattcgagcttcccgccaaaatcaagcgtaccaatcggcgggaatcgttcaagtgactgaggattcttgccttgatgtccaagatgaaatctagccgttccgggggagtatcgattgctattcgatggatgcgtttatagaagggaaagtttactggtatggcgatgtgaagtggccttctgtccgtgtcagctgctagtgcagcaggactacggcaagttctggatctacgacacgcataatcatgaccaaatacctctcaatagagaagatcggaaatttgaaaaaatgaatcgaagcatttatgattttttgaccaaattacgtgatcaagttgtacgaacaaatgagcaaggatcggcagtatggggatcgtcaaacggacaacagctggatgcagccaacattctatattacactgaacgagatcgacctataattcttatgaatggtcaatggtactacaaggaagcaactacgaacatatccaagccatcacaaatccactggcggtgcagcgagaaaaactgtctgggattggttacaactgcgagtgatctccgcggttccaggatgctcaagagccataaccatgcactgaaatcggatcgcaacttcgtgcgagtagctgatttggctttgatgagccggattccggattccgtctctacggcgctaaaacctattatcatagcagatatgcaagagcccaaacctccacagctatctgtcgctccgaataattctacgttgcaacagaagactggactaaattggatggattcaaagggatcctgtccaactcaaccaccaccaattttacacaaagctttgttgaaccttcaatccactccaacatgtgattctccacaagacgacgcttcatcgatggtaacatctaccaaaagtgctaaacaaccgaagaaagaatcaagaaaacataaggccaaaccgctcaaagcaaacaacaagaaaccgaaaatgactgctacaatatcggtcaatccgacaccgtcttccagtgcaaaggcttcgtccagttctgccatggttttctacagcaaccataccgatacctactatatgcgataccgacaacgtttctacttcaaagacgtttcccgaactgaaaacacgcctggattgggcgtcctttggcgatgcattatcaagagttgtcccgcaacaataacggttttcgctaacaaggcacattcttccggttcgagccacaaccatgatctagtcagaggcaatgtggaacgcctcacactggtaacgtcatcggaagcattgcagaaccttcccgtcgttccggacattgagttctatcggtgtcccacgacctatggcctttgtctactgtacaacaaattctcctacagtttacatctgagacatttaccctctgccttctttatttggcagtgtaagactgccaactgttccggttgtatccatagtggtattgaattagagtatctggtatcaaaagccatacacaaccatgacgcaccttcggagcaaaccgttgatgctgagcatcgcataacggtccaggatgcccttcagatactgagtgatctccaaaataggtctcaaaactcctctattgcattgctgagcgacaatgcttcgtcaagtgtagcgactgagacctaacgagctcccgaagcaaacttctcgcccttgtcgatttgttagtccattggaatcacatttcatcgtcatcgataaggttctattaactatgatcagtaagaagccttgacaagttcagttgaattatctttaagttcatatattaaagttataaaatatttattctaagacaaaggagctttcaataaactacgttatctcttgaaagataaaattgacaatgcaaacata

SEQ ID NO: 1342 - DNA, 1723 bp, Aedes aegypti
cccatttcggccgtaaaacgcaatacgaagtactgaaaaatgaacaacagaaaattagttccattattcgtcgagtgaaagccgagacgattgtaataagtgaacagaaaaattggaaatcaataatgaagaaataatgaagattctagtgaagtgttcgatcttggcgatctgtctgggcagctcagtaggagccgtcgataaggaagtcattagaaacagtacatgggacgaaaaatataattctaatgcttacaatggcaagcgaacgtccaacaagaaaccaaaccccctgtgcagcgtgtgcacctgcaacgcccaggagcgaaccttcgactgctcctcgaagaagctcaacaaactgttcaacatgagtggctggaccacattgaacgacagcggagtcaccatcgaaacgatgatcctcagcagaaacggaatcccagaagtgcctcagttccccaagttcaacttcagagtgttgaatctgagcttcaacgacatcagcgtcatcgctaggaaggccttctactacctggacgatatggaggtactcgacctatcgcacaacatgctgaatctcaagacactcagaacggagatcttcgaggggagctacacttcggacgagtacctaccgatgaaaaaactacgagtactactcttgggcaacaacaacttgaactcgctgaatccgaatatgttcgagcatttgcccgttctagaagagttgagcctcaaggataatatgttcaaaataatcgatcagatgacggagttcgccattgggcacatcatgaccctgcgggtattggatttgagctgcatggaactgttagagattccgaagtttatgttctactccctgttaaagttgcagtatttgaacctggcgggaaatttgctgacgagtgttcctggggcgttggactacgcgatcaatctgaagtggctcagtttggacgagaacccgattgagagtgttcagggcgaaagcgtgttcccggcgatcaagactttggagtacctcagcgtttcctacattacgacattgaaggtgattggacgcggggcattcagcaagttggaaggtctcaaggagatacacgtttgctacaacccaggactgacacatcttcatgaggaagcgttcagtcgggtcgatgcgtacaatcaaaatcagacggagtggcctccgatgaagcagctctacataaatagcaacaatctgagtaaactggacacgcagttgttggctcgatgggacgacatggaagtgatcgacattcggtataatccgtggtcatgtgactgtgatagccagtggatggtggagaccttgttggcgatcgtcgaagaaacttcgcctagaatcaagaacaacattgtatgcgccgcccccgatcagatgaagggcctttcgatggttgacctgaagcgcaagcacagcttcgtgcactgcctggacaatctaccggagaatgatgatgctctgttgattggctggttgatcggcatcctggtgggtattttccttgcggcgacggccatcttgatctaccgtcggggcagcttcggtctggttcgccgtggcccgcaggctctctacgtacgggtgtagatgaagatgtttaacgcccaaggtatcgcacaattgtactcaggttctgaaattgttatcaatagttattttaacatgaaataaacacagtttttgcaatac

SEQ ID NO: 1343 - DNA, 2520 bp, Aedes aegypti
atggctggatacaagtgtgtgaattttggggatttgtgccgcctgtgtgccagcagtaatggaggacgaatcgggatcttttcggatgaagggaaacggaagaacatacacgtcaaaatcaccgattgcctcaaaataaaggtttacgaaaaggatcgccttccgaaaagcgtttgtgcgaaatgtctgaagcaactggaagcgcatgtcgaattccgggagtcggttgtgaaggcccagggaatgttggaaagttgtctaaactccaccaagctgcggaacggcggtatggtctatatcaaggatgattcagtaaaagacgatcaatcgagcactcagacgaccagcagtacttcgaatccagttgcagccaccatcacccttccgaccattcaaactcagccacctccccaagccgctcctcaagtaaagctgcttccgacaattccggccagcagttccgccttacagcagcaaacggccaccattacgaccgctccggccatgactcccatcatcatcaatagcctacctaaaggtttcgcccaggcagcgagtactgggaacgcaggtgccatccagacggccacaatcatggcacccaatgcggatttcctcaacagtatcatgcaagccgtgggcatccagacgggggagacttcggtggccgcagcggccgttgctgccgcagcatccacccaggagagccatcagcaagcaacgggacaaaatcagcagcaacaaccactggctcagtacaccataacggtggatgggcagaccatcaaggccaatcagatccactacaagcttcaggatgggacgagtcaagctgtgctgacggcggctgcttccgtgggcgatggtgatcaacagcagcaacagcaacaaggcacctcctcgtaccaacaaatggacgagtttctcaggatgaagacaccggtgaaggtgataaaccggaaggagctggaaaagacgccggagctggtctcagcgaagaagcccaaaatcagtgtcttgattaaatcgcctacaactccgcaggctacgctggtaacgtccacacctcccaagcaaaccattctggcggcaacaactccgatggccactgtatcaagcagccctatcaccttaacgcccgtgtcgtcccataccagtatagctagcttttcgtccgctccgacagggacgatattcacgagttctccgcttattgccagctctgctggatcaacggctgtgaaatccactaccgccataccggtgctggatgccaaaatgatgcaaggcaacaaatgtgttgtcccaattatgttaaagtccgaaggcggcggagagcagattgccctggctccgattgcgaacgttggagagatgaataaaaccatggttccaaatgttcaatacgtacagatgaagctacaacctggtccggatggaatgttccgactggccccagctcagatgccacctgctctcacgttgacccctcaaggcctccaacagttcggcatcagtccgatggaaacgatccaaattcaaccccctcagcagcaccagcaaatacaaattcaaccccagcaaatccaagcccagctttccatgccaagcgtgcaagttcctctgtccaattatctcagtctagtcgaaaagtcatcccaggttcagaaccagtccgcaacggaagtgcagccccagcaagcaaacatagtcatcaccactcaacctgttcagcagcaaccccagcaacagaccccagttcaacaaacccaacagctacaagttgtccaaagacccccgatacaggttcaacaaccagcccagcaacctcctccgaaacctcccaaaccaaaccctcctcagccacccccagcaccacctccctccacaaccacccgcagagattcctcctcccaagaccagctcaacagctcatcggagtcgatgtccaacgtgaccaacgcgtccattgcggccacccaacagatgaaggccatctccgctctgtccctgctcaagcaggatacccacccagattcactgtcaggtaccagcacccaaggaaccaatgccaacgtctcctccaccgtgagcttcacttcctgtgatgtttgctccaagtcgttcaagcggaaggaacacctgatgcagcacctcaagtcgcacgtcggtctgcggccgttcaagtgcgacgaggcgggttgcagcaaatcgttcagccgcaaggagcacctcatgaggcacatcgtgtcccacaccgggaagaagctgttcgcgtgcccaatctgtcggaagtacttctcgcggaaggacaacctcaagaagcacaagaagacccatcaggagaatagcagctcggctccgtatcactgtacgatctgtagcaagcacttctacattaaggggcacttcttgaagcacaagcaaatgcatgacatagcgagcgaggcacagaaggtgagtagtttattattttacccagcacccacaacacgcctcagaccgtttgagcaacattag

SEQ ID NO: 1344 - DNA, 2148 bp, Aedes aegypti
atgaaggagaagagcaagaatgcggcccgctcccggcgcgagaaggaaaacgccgagttcctcgagttggccaaattgctgccgctgccgagtgccatcacgtcgcagctcgataaggcttccatcattagactaactacctcgtacctgaagatgcgccaggtgttcccagaaggcctgggggaagcctggggctcacagcacatcccgaccaatccccgtgacatggccatcaaagagctgggctcccatctgctccaaacgttggatgggttcatcttcgtggtggcccccgacggcaagataatgtacatctccgagacggcgtcggttcatttgggcctaagccaagtggagctgacgggcaactccatctacgagtacatccacaactacgatcaggacgagatgacatcggtgctatcgttgcaaccgaacatgtttgcaacccctccccagcatcacccccatcaccatcagcctactactcctcatcatcatcaccaccacccacaccatcatcaccatcaccatcatcatcatcatcccttcaaccagcagtcgcaaacaatcgagatcgagaggacgttcttcctgcggatgaagtgcgtgctggccaagcggaacgccggtctcaccacttccgggtacaaggtcatccactgctccgggtacctgaaggcccgcatctatcccggtgattcgacgtacggcgatgggcacagttgcatccaaaacctcgggctggtggcggtcggccactcgctgcccccgtccgccatcaccgaaatcaaactgcaccagaacatgtttatgtttcgcgccagcatggacctgaaactgatcttcctcgacgccaaggttgcccagctgactggatatgaaccgcaggatctgattgagaaaacactgtaccagtatattcatgcgtccgatatcctgcacatgcgatattcccaccaaatactgatgtacaaaggacaagtgacgacaaagtactatcgatttctgacgaagggcggcggatggacgtgggtgcagtcgtatgccaccgtggtgcacaacacgagatcgtctcggccgcactgcatcgtcagcgttaactacgtacttagcaaacaagaagcgcacgatctgctcctgaacgaaatccagggaccgatgattcccaaaccggaaatcaaaactcccctggccacgccggccagtgccggctccactccgatctccccaccatcgcagcatcacgtcccgatgcaaatgcaccaaccggcgcagcagtcgccctcccagcaacaacaacagcaccatcagcaacagtcagcacccattctgcagccccacaatccgttgctggtgaaagaaatgagcaactaccttcagctgcatcagttcgatcaggacgataacagcctgcatcagatggtggtgcagacgaacaacgtactccatccgagtggtcaagagttcgagcatcagtacaacagtcagggtagcttcatgatggattccaatcaatcgatgtctcagggaacgcccagcgagtacctggactcgtactacgacccggcattctaccagtcgtttgaccctcaagccgatggttcaaatgtgcttcgaccgttctctgccagttcgaatagttgcagcagttccgatggggaagcccatcttaatgcgacctacatccccaacacggcactgatccaacaccagcagccggggtacgatgaaataaatcaacacttcggtctgaactgtttcaacaataataataccagcaacggcaatggcgccattcctgccaacggtcatctaaatggtggtctcaacagtcacaccctacatcaccagcacagtgccaacagcaataacggaagcaacagtagcagcgccagtgctgccaacagtaataacaacaatcacgacaatggcttcatggatgagttcaaagtaagccaacagcatcaccatcatccccagcagcagcaacagcatgtcgtccctcagcagcaccatcatccgcaccaccaacaacatcaccaccacagtcacaacggggcagggggaggacctcagtacaccagcgtgattgtggaaccgcaaaactatcatctgccggtcacgcaaaacgaatttgtgcattag

SEQ ID NO: 1345 - DNA, 450 bp, Aedes aegypti
atgttgctctttatctgtatatcacctaatcaggatcacccaaagtatgccttcaactatggagtagcagaccacagcactggcgacgtcaaatcccaacacgaaacacgagatggtgatgttgttaaaggtcaatactcgctagtggaaccggacggttctgtgcgcaccgtagactacacagctgatccaatcaatggattcaatgctgttgtgtcgaaaaccgccccgctgatccatcaccacgccccggtagtgaagcacgttgctccaattgtgaagcacgtcgttcccgcgccactgccggcccacaaggtggtctacgctcatgagccagtggtacatgtaaccaaaacatcccactacgccgaacacgagcccacctatccccactacggagactaccacgatggatactacggccactacgacgatagccattactactaa

SEQ ID NO: 1346 - DNA, 1951 bp, Aedes aegypti
atgcagaacagcgaactgcttgaggaaatggcccccgccgaagaggaagtggacccgaatgagacgctcttcgaagagaactacaaaacaaacgacaagggtggccacatctgcgggatttgcgagcaggaatttacgtacaaaagtcagtgccggtcgcacatcattaccaaacacgacccagccaagccatttaaatgtgacgtgtgccattacactttgacgacggaactccgtcttataagacacaaagccataacccacggagtgggagtgttaaaacctgacgatcattccgaggaaatcgacgaagccggtgaaacgatctacacctgcaaaatttgtaccaaaacgttcaattctcttgtccgcttcaaaaagcacaaaagcgtccacgtggcatacaatcggccttttaagtgtgatatttgcttctatcggttcccaaaccggtcccaattaacccagcatgccaaagtacaccaggagaagtcggccgaggaccaggacaacgattggccttgtgagtattgcgaagagaaacttcctggaaagcgggcccacacgatgcacgttcgccggttccacccgcaggagttgcagaactcggaaaacaaagaccgaaacgagtacaaatgtatcatatgttcggaggcattcgcgcgggaaagtgtcctgaacacgcacatgaaaatgcacgaactgctggtatttgagaaggagcgcgagcaacgccaagagttggaactgctcatcaagaaagaatcccaagctcacttcggtggaggtggtgctagtggccagagcgaactcatgatggccgccagcagttacgatatgtcctcgattaacgtcaagaagaaaagcgatgccgacgtggcgttcgtttgcatgatctgcgagcaggagttcgaggagcgagagttactgcttcggcatcagcgaaaacttcacaaggagctagagttgaatatcgtttccggagcgcaggatgggcagcaacaggctcaatcggcagattcgacttccccgatgaatgacttcacggacagctcgttcgccgacgacgattcggtgatgatcgtagacctggacccagcgcagctcctcggcccgatggactccgagtctacccaaaagaatcgttctggtgcacccgtgcccaaatgtgatatctgccataagacattcatgtacaactctctgctgctgcagcacgtcaaaaacagccacagcgagtcgaaacccttcgagtgcaaggtttgccggatgcgcttcagctaccggggcctgctgcagaagcacgaacttacacattccgcacagaacatccggccgggcgagcacggatccatgatgttcaagtgcaaggtctgctcggcccagttcctggagatgaaatccctaacggcacatctgagaatccatcggccgggcgatggaatcgtcgtgtccaaaaaggtgaacatctttcagtgtaccacttgcccgcaggttttcaacgagaaagtcaaactggacgagcacgtggccaaggttcaccacaagcagcagctgcagcccgggggaactcacatgcgcatcaaaccggatttccgtagggttgccgagcggcagcaaccgatgagcgagaaggaacggttcttcgggagctttggaatcgtcaagctggaacagaagaaagatcgggtcggaatggaaacttcttgagatgggggagggtagaatggacggtttgtattggaaagacttattgttagtatttaggccagtagatgtatcagttgataagtattttccgactgggagacaaatagctatagaatttgattcgcatgtagtcagaatgcgttataactacgtggatatatgtggaaaactttataagtgtatgatatcattataatataaagagggactataataaaggaatattcattttttatgccat

SEQ ID NO: 1347 - DNA, 2343 bp, Aedes aegypti
ttatattctgcagtttctaataatcagctgaaagcagctcaggtactgttggattttgatgcgagtattgtgaatgaactaaatgaattcgagagtactgcactatttaccgcttgttactctgggcatgatgccttagctaaaatgttaattgagcgtggcgcagattatatacgtgaccaaagtggatttacacctctgattgcggcagtatctcacggagatacggaattagtcgatgctctgatacagaatggtgccaacgttgactactctaaggatagcgacggaaacactgctcttcatctggcaatcatcaacggtcaagccaatttcgttgagtatttcctagccaacgataagctttgggaagaaccgaataattgtggtgatatgcctcttatattggcattggaacatctcaatttgcctattttactacttattaaatccaaaccgaaatgtaaagaaactgttcgagaatttagaggagcggaaaacagatcacttcttcatatggctgttttgaaagggtccgccgatgtcttacaggtcttgttgagagaattcgacattgattgctgttggatggatcagtttggccacactgctctatactacgccgttctgaagaaaaattgcgaatttgtcaaactgataatggaagctggaggttctctcactggtccatgtcaatactccacgatgcccccttttgttgtagctgtactgtcgaatcagcttgacatagtgaagctgtacattgagaaggaaaaggatgcaattcaccatttaaaggagtacagtagcaatggtaggaacttgctggtttcgtcggtaatgcagaataattttgcaattgacgagagcggaattaatctgcttcactacgtagcttatacggggaaattgaactccgtcaagtttcttatcgatagagcgtttttcactagaacgagcacggacgcaaatggaaagacaattgggcactatgcggcctcgaataagcagcgcgatgttatcgagtttctcatatcatcgcaatttcctctggatcaattggacaacgacggtagatcagctttgatctatcgaatgcctaccagagatcaagaaacattacttcacgttactgcccgaaaaggttacttatctatgcttgcattattacttgaaaaaggcgttttcgatatcgatataggtgatgtggatcaaacaacagccttacaggacgcaactatgacaggacgaaaggaatgcataaatctcctgctacaacacggtgcaaacatcaactttgtggacttacaaaacactactgccctgacaagagcttgtgtaaactcacagaaagaaattgcagaattgctgttgaatcttggagctgatacagcaaacaccaaagctttccacgttgaaactagggaaggggcaactgccttgcatattgcaattctaggtgatttgagtttaatggaactcttggtaaaaagaataggaattaacatcaacactgtggacgcttgcgggcgaacagtattacacattgcttctcagataggatcaattcaagcagctgaagaatccttgaggttaggagcctgtgcagatttgatagatcagtatcggagaacagcatttgtgacagcactcgaatcaggtcatgaagaagtggcagaacgacttctcgtggcaacacaggataaagaatatcttcgtgactttcgaatggaagaaactttgaagtcggttcttcatattgctctggagaaaggatttgatcggatgatatcactgttattaaataattacggacttgactgtaattgcactgattttgaaggaaaatcgatcctccactatgctgtagcaggcgaacgaggattaacagaaatgcttacattgattctctccgaaatcgacgtcatgcacgttgataagcacggaatgactccactgcattacgctgctggatgcaatcaactggaaatgatagaattacttgtgaacgctggtgctgaagttgattgtttcgatgttcacaaaacaacaccgttgatgagagctatatccaaaaatcacctagaggcatatcacaagctagtttcgttaggggcaaacgttgatttggcgcgacaatttcgtaataacaattttgatggagaatcaatactgcatatagccgctgaaaaaaatcgaatcgaagcaatgaaatttctagtggaagaattgaaatgcgatgtagattgtattgataaaaatggaaacacccccctccattatgcgttacaaaagggatgtttcgaagtggtaaaatatttgcttggtaaaaacgcaaacctc

SEQ ID NO: 1348 - DNA, 2247 bp, Aedes aegypti
atgctgggaaagttaacagcgctcatatccacgttggtcgtggtccattcacaatttctggccttcgagcagcatggacaggagtgcgcactctacgtcagcggccccggcaaatcgtccgccttcgactacaacctgaatctgttccgaggcacgccatcaccgctgcacgcggagcaaacgtcttgcatcacatacgatgccatcaatcaagcctacttggatgctcgcaagcgcatccgcgtttcgcaacccaagggagactggaaaaccgaagatatcgccaccgtcggcgagctgctgttggacatctccatccaactcgccagaacatatggcctctcctacgaggagattgagaagggtctcccgtcgatcgacacctccaagactctgatccgcgaggtttgcccggctttcctggctggagtcgagtgccgtcccggcaagtaccgtcgcgtcgatggtctgtgtaacaacctgaaacaccccacgtggggagctgccatgactcctttccagcgtctgatcggcccactgtacgccgacggaatcaacgctcccaggatctccgtaactggacatgaactgccgttgtcccgtgtcgtatcgcgcaccatccatcctgatgagggctaccatgatcacgccggaaccgtattcgtcatcgcatggggacagttcatggatcacgatttcaccctgaccggaaccccactggaccccatcaaccgtaacgatccagaagaatgctgcaagcgtccacctcacctcaagcatccgtactgtaacgaaatccgcatcccagatgatgactacttctaccgcctgttcaacgtcaagtgtatcgacttcgttcgaggcttcccgtctcctcgcgccggatgccgcctgggatcgcgtcaacagttcaacactctcacctcagtcatcgacggaaacaccatctacggagtcaacgagaaattcacccgcaaattgcgtaccggctacaacggcctcctccgcatgaaccccgtcttcgccgagtacggcctcaaggacctcctcccactgaagttggacattccagatgagggctgcactcgtcccaacaagagcatgttctgctttgaagccggcgagatccgagtcaacgaacagctggtcctgacctgcatgcacacccttctggctcgtgaacacaatcgtatcgctacggagctgggacgcatcaacccgcactgggacgacgaaactctcttccaggaatctcgtcgcatcaacatcggtatcatccagcacatcacctacaacgagttcttgcccattctgctcggcaaagaagtgatggagaagttcggtctgctaccactgaaggaaggatactgggatggatacgatgagaacatcaacccggccatcatcgacgctttctccgccgctgccttccgatttggccactcgctgctgccgacggccatcgaacgttggtccaaggctcacaagttcatcgcctccaagcgattgtccgatctgattcgtcgcccgtacgatctgtaccgtgccggagtctacgacgagtacctgatgggtctgatgaaccaggttgcccaggctatggacgactcgatcacccaggaggtcaccaaccatctgttcaagaaggagggcgcccgtttcggtatggatctggtatcgttcaacatgcagcgcggtcgcgaattcggcgtccccggatacatggagttcagaaagttctgcggactgcccacggccgataccttccaagaactgttcggatcgatgccgaatgagaccgttcggcggtacgagagcatcttcgaacacccttcggacgtggatctgtggtcgggcggtgtgtccgaacgatctctgccaggatcgatgttgggaccgaccttcgcctgtatcattgcgacccagttcagctacgtccgccgtggcgatcggttctggtacgagctgccgaaccaaccgtcgtccttcacgcccgaacagctgcaggagatccgcaaggccaagctggcgcggctcatctgcgacaacaccgatctgatcgatacggtgcaaatctacccgatggtgttgcccgatcatgaaatcaatccaagagtgccatgcaagagtggaatccttccatcgatcgacttgaccaagtgggccgattacggtcacgaatctcactcacctcatcaatatcaattcctaaacgaattacctgagaacgtcggcttcaagaaataa

SEQ ID NO: 1349 - DNA, 2490 bp, Aedes aegypti
gtgtaaaaggcgggattaaatacttaagcaccctgaaagatctctactcagagcccgcgttaccctttttgttttcaatttcattacgagatgcaaccctggtacataccgcgccattttcgtcatgttggtagttcgttttcaaccaccaaccagttgccggtcagtttcttgtttgttcagatgttatgtgattttaacataaaaattttgttttaaagcgttaaacagttactttttgtgaaaagtgtacccgtgtaaatagtttaaatccgatttcgttttcgttgttggttcacataaatcgttttaccatgaattctccgccgctgtctccgttgatttatcccccatcttccgacacttactgtccgagtcccacgcagatgtcgcccatcaagtatgaatcggttccggaagaatcccaagtaagcccagaaaacagcccaaaacgtaattcaaaacgcaaactgtccaacttggacagcacctgcggggcgtgcaatctggatgtggaaaagcccaaattgtgttgcaactgcttcgaatacttctgtgagaaatgcatcaatttggagagaatttgttcaaaatgtgcggataaatcagcgcttccaaagatgcctccgaattgttccgggcatggcaaagaattggcctttttctgtttgacctgcgagacggagatctgctcggaatgcatccttgaagcaaccgaccacaaaagacacccattcgatcgtatggaagcggtttaccaagagaaaattggcgtaacagatgacaaaattgccaaaatcggtctacagatcgaagagattgagaaacacacggaaatggccaagaaaaatctgaacctgatcaaaaccgttggcgatgccatgctggccgaactgaaagccattcacgatgcggccaaaatggaagtacaggaaattgtggacgaaaaacgcgaagagctggaaaaacgaatcaatctcccggaagatcggagggcgctggtgaagcagatccaggatgagatcaaagcgttgggacattttggcttcatcaaacagcaggaccggttcaatgaacagtgcgacaaggttttggagcaatgtcggcagcttccggcggatttgattgatcattacgacattggatgtgaactgatcccggctacaaaaatgacgacctacaaagttgattgggtcgatggaaaacaggaaatgctgaacgtaatcatcgatgacagtaccggagaatcttggaaattgtccttgagcaaaggagatatactttgtctcaaagttgctccaaacgtaagcataccgcttattacaagccataaattcaaagtgactaccgaaatatcaaataacgatatttccaaatcgctccgaaaacggttcgttattcaacgaaagatgacacaattcgaactggcggatattgagctagtatcttcgggaggcttcttggaggataatgcaatggagttccgtgtcgctattgaaccgttgaatgttattgaagcccatgatcattacaaacaagaagttacaatgatgaaaaactccatggatcaaatgaaaaccttaatgaacgcgtcgagagaatcccttgacgcattgaaagcgaatacagatagtctgaagaacttctcagtcggatatttcgctctggaatacggcaacattcagaaacaacctaagagtggattcgtctctcctaatgttatcgatttcaatggtaatgaatggaagatggaaataaaatttgaacgcgatgagttcaataagatcctgctcagtgcttacatattcccggctcgtatcatcaacaccagtgaacatgctcgtcgttgcacatatttcatcgagcttatgcattccaatcccgacgagatcgttcgtggttatgcggagaacttgttcgaagttaacggattgggtcgtggctggaaaggattcatcgaacgtatgcgtgttctgaacgatgttgggttcgtgaggcatggaaaggtttggttccgctacggcgttcgtccatctgcttaatttgcacgacatcgatgatgtcgcttttaattgttttacgtaattgattaatgacccatgtgcggccatttacgatacatttgacttttttgttgttgcatctttgaatgcagtcagttgaattagaagaaaataaaatgataacatttttaaactaaacttattttctagctatattataaatcagagtctgacatcctcagcatacatttttctactgggctcgaacagtaatttacaaaaactagctaaatcctgcattttttgtagacaactaccaatgttcagtaatattcctatctagcgaattgggagcagtgagttcgcttcccaccgagaagacttgggaagttggtcgaatacgcaaaaatatacctatggatactgcgttatgcaaaaaattgaggaccttttcaaaatgctttattcatttattcactcattatgt

SEQ ID NO: 1350 - DNA, 2636 bp, Aedes aegypti
aaatcatacgaaaaaatgcgtcaaacgagatctactccgaagaccgcctcgaaaaagactccgtcttcgtcatcgaagttcccgtcttcctgctgtttcatttgcaagagccccgaaaatgacgaactctttctggggaagttccacaaaaagtggcgccttcaggtgcactatcattgcttgcttctgacctcgaatctggttcaaaatggggacgatgaggagggaattttcggattcatggaggaggacatcaggaatgaagaagcccggatccgaggccagaagtgctacatctgcaaggaacagtatgccaatatatcgtgctgcgccaagaagtgcttccgtacgtttcataccgtttgtggcctgaagaatggttgtctgtcccactatgtggacacgttccagtcctggtgtgataagcacatcgaactggttgacgcggagaaacattcggagacggaagcctgcgggatttgctacgatgaaatgggaccgtaccggaagctggagtcgattcgtgccccgtgctgtcataatggctggttccatcggcgatgcgtggcccaatttgcccaatcggccgggtatttcttcaagtgccctctgtgtaacaacaaggacgacttcagccagttgattcgacagcgtggggtgtacattccggaaaaggacgcctcatgggagctggaaccgaatgcattcgacgatcagttggaacgtccttcggagtgcgacgcggaggaatgccgttgtcgatacggtcgagattttgacgactgcaagcgatgggatcttataatgtgtgcaacatgtggctcaacttgtcgtcacgatcagtgcatggatgtgccctcgaaaaactacgtttgcaccttttgccggccgattgtgggtgacgagcctccagctggtgtgttggagttggcagaagcatccagaagggcggaagaagctagacgagcagcggcagaaaaagaaaacggttccggtgggagcagacgagacaattcacgaaactcgagaaacagagctcgagatggatctcaatcggactgctccgattcggacagttcagtggaagacacttcaacaaaacgcaagaagaccaaaagatgcattgaatcgtctgaatctagtgcttcctctccaatcattaccaataaaaaacgcaaatcccagaaaagactaaccgtacttgatagcgaagacagcgattcggacgtagtaccgaaacggagaaagtcaatcactcaaaggcgattgtcttcctcttcgtcctactcttcgctaatttcttctaacggagaagaaatcagtttgaaggagttggttcagaagattccccttccgcgaggggcatcggtcgagaaactaatcaacgcgaaaccagtcgtaaaagtggaaaagctgtcagaggaaaaaatcaaaaccctagcatcctccgagaacgaggacgaagaagtgtcatcgacgggttcgtcagccgtcttcgacttcaactaccgtgtcaagttgaacaggaagcaacggcacaaatcgatgatcgaaatgccggccatcaaggaagctatccgctccgacacggacacgctgaccgatgcctcagtcggtgggaaagaggctatatcccgtccgaaaacacccgccagccagaaaccgttcgccaagcagttcaagctgaaactgctgggctccaaatcggggccacggaagcgttctaccagcgaatcagatccggacgttattgcagcgaagaaaccatgttcaacaatggatctaccgcccagcaagtctcgcatatcgctgtttccctctcaagacgaggaaaatacctgccccaacagtcctaggaaggcctccatcgaaccaatcgccttcgaatctgcccaagagtcgcagaaaatcccagcaccttctccggtaaagatgaaactttccaaccacaaccagccatccatcgtgttcccgcccactcccccaacatccactggggaaagcactaaatcggcgtcgcatatttcccaccagcagaagacgctgaatgcattcttcaagataaactccccggtggaggatgcatccggtgatgtcgtcgttggcccggaagctgctgccgtaggacaatcatcccagagtagtgcaataggagggaccgcgaccgaaagaaattgtagcagcagcagcagcggcggaaacagcgcaaagattgggaagagtgtgaaaaaatcggccgcaaccaagacgccgaaaagtgcgccgcggaaaaagctgatccaaatggtaagcgtggcacgaaattgggcgtatgtgagaatttgtttggcccgacgaagcatgtttgaagcaaaggaatgatcgttgttggattggtttaaacattgaaaaatgttgatttgttacccttttaaaactgattatatgaacacattttggtacatggacttacattacgttggtgtataagaatcgttatttcgctattcacgttttgattctctcgttctgaaaatttcgaatttggttgagtatagacccctttagtttccctacagcgttacttaatttgtgtacgaaacgtatatgactgtattttgcttggtaactttttttttctaaaatattgaatcgtt

SEQ ID NO: 1351 - DNA, 658 bp, Aedes aegypti
gtgtgccacgcgcgcgattttccacattttgaaaccttattttttcggtgctgggaggagggccctcaatattgtagtgtgtacaagtgcaagggataatctatattcggtatgaattttcagagttaagtaagattcatccttcaagttagaactggcttcgaaaatttaagaaattacaacatgaattgaatacttctacctaaatacagagaaaaacataaatcttggtgaaagcaagtaaaattgttcagtgcacgaaattcgtaagtgatatcagtcgtacaaacctctgaccaccgcagttgtggccaaccatggaagtgatttaagaaaatagaagtgtttccgcaaccattgaaaggttcggttgggaaagtgaaattatccaatcatataaattaccgaagtgcttacggtgtgggggtgtgacaaataaattcgagtgggtatctagtgctggattaacctgtgagataacatgagtcgcaatcgtaccaaaggaggtacggccggttcctctagcaagaagcagcacgaaagtggcttctacgaggactactcctcgtcgtcttcgtcaacttcctacggtttggcttcgaaagatttgaaaagttcgtccggaagcagcaaaactcaaagctcgtcgtcttcttct

SEQ ID NO: 1352 - DNA, 4305 bp, Aedes aegypti
caaggaagggcttgagatgatcaagagctccaccatcaacaccaaagttaagctctgcgaggacgataaagttagtatggacgactttaagctgctgaaagtgctgggtactggcgcgtacggaaaggtgttcctggtgcggaagctcggtggcgtagacaacaacaaattgtacgctatgaaagtcctcaagaaggccaccatctgccagaagaaaaagacagccgagcacaccagaaccgaacggcaggtgttggaatcgatcaagcgatcgcctttcctcgtgacgatgcactacgccttccaaacggaatcgaagctgcacatcattttggactacgtgagtggcggggagctgttcacccatctctacaataaagaacacttcaccgaggatgaggtgcggatctacatcgcagagatcatcgtggcgttggaacagcttcacaaacttggaatcatctaccgcgacattaaactagagaacattctaatcgattcggaaggccacatcgtactgacggattttggtctctcccgagaattggtgtacgaaaatgagcgggcacacagtttttgcggtacaatcgagtacatggcaccggaaattgtgaaatccaaccagaacggtcacgaccaaacggtcgactggtggtcggtgggggttcttacgttcgaactgctcaccggtagttctcccttcagttccgaagaatccgtcacgcagacggaaatctcgaagaaaatcaccaacaccgaagcggtcattccggatcatctttcccgggaggcgaaagatttcatccggaagctgctggttaaggatcccaggcgacggttaggcggtggatcggcggatgcctccgagctgaagtcgcatgatttcttcaagtcgatcaactggcgccagctggcggacaagaagatttccgctccgtttaggccggtcattgaggacgaactggacaccaacaacttcagcgacgagttcacccgacaaacaccggtcgattcacccgcctcggcaccaccaaactccgaacggttatttagaggttattcatacgtttcgcctagtttactatcgagtaaagtcgtcgatagaaataaatacatgaagaacaaaaatgttcgaccaagtgaggcttcgatacgaaaatttgtcagcaagaggtacgaactgtcatcggatcgtgccatcggcgatggtttgttctccacctgcctcaagtgtcgccgtcttagtagtagtaagtactacgccgtaaaagtgctgttcaaccacccggaaccggcagaatatgcccggcgtgaggtcgaagccctgaaagagtgtcaaggtcatccgaatatagttaagtttgttgaagttttgaaagactcccatcatatctacatcgtattggaactgttgggcggtggcgagttgttgcaccggataaataagaccagtagttttaccgacagtcaagcccggcactacttccgacagatggtgcaagcggtggcctacatgcaccagaaaggaattgcccactgcgatctcaagccggagaatgtgctcttcgagggacccagttccgaacacctgaaactgatcgatttcagtttcgccaaaagcatagagaacaacaactgcctggtgtcgtcgccaatcgctggaacgttgggctattcggcaccggaagtgttcgacggacgatcgtacgcgttggaatcgagcgatctctggtccctgggggtgatcctgtacacgatgctgtgcggtcaggctccgttcacgccgcggcaattcttcggccatacgaatttggcgtcgtcggcgaaacagatggagatcatcatggacaaaattcggaggggatcgttcgatctcgctgcgtcggcgtgggagtgtgtcagcgaagaggccaaagacttagtgaagcgtctgttgacggtagatccggacagacggataacaatggaacagctactggtgcacgagtggttggacctgaaccgaacagccggagttcggagacagcttaagaccatatatccgcatcagagtctacagcagttggaaacgaacgtgaagaacacctatgacgcatttaagcgagcagaagaggaaggcttccggctgcgcgaagtcagccggacagctgccagccagagacgcaccaatggggccaaatcgaagaaatcaaccgaaagccagtatagtagttcaatggaagagagcacttccagtggtattggacgaagcaaatccagcaagagtagttctatgtcggataataacggacacgagggacaccgaacgataagtgtttcgacgaacaattccgaggtggtgctaattgacgaagctgatagcgacgagcttgctctgccagagaagacgcaagagagcgaaaagacggaatctagtgaaagcaataataatgacctgaataaattggagcaggagcaccaggaagagcaggaaagtgcggtggaggaagaactcgaggacgaggacgatgaacaggagattgacgacctgttggcagatctcgatgagattgttgaggagcacaaagctgagatggaacagcggcaacaacagccggaaccagctgaaatcgaggaagagccagagaagcaagtgcgaagacggaacgattcgtgtgaaagtgatactagcagcactaccgttccacttgagctcgcaggcggagtcaaagagcaaccggaaccacctcaaatcgtcgagcaagaagaatccgaggcggaagaagtcgatgacgaagaagaagaagaagaagaccaacctgtcgccgtcgttgaagcggaagaaccggcatcactcgaagccgatttggcctcgatctcgagcgaatcgtttgtgttcggattccgggcctcgatcgacttcgaagcgcgagaatttggctacacgtccggcgatgccgaaccgatctttttcggctttgacgaggcgaccgaactgggcgagaagccttctctgatcctcacgttcagtatcaaaacagcgttgggcagaccagcgcgcaagcgacgaacggaagtggacctcaattgccgccgctccaagcggatgcgatctaccgtaaattatgtgtattaaagctagcaacaaaagaaaacgtttttaggccgttttttgttaattattttctcttatattcctctaaatggtacttgactctttcgcggagacatttatcgattgtgtactatatttctttttcattttactaatataaaaaaacattcgttttcctttggtttcgatcgatctccttagtagaaccgaaaaaaaagtttggttagaacaatattgtatgaatggacacagagtaatgcgaatcatcaagtgcacttattagagatttgttaaccggagaataaagcatagaagaagaagctgctgcactgcggcggcaagctaacaaacagactttcacatgcgtagaaacagaggaagagagacagcgacatttaagtagttgaataaatgcaccaatatgaactacaattttacccaggaatgatgttattatccctttttacaatagttagagagaaactcaatgcaattgtatatcgaagcattcataagagagaggcaagcatgtaacaaactaccaacccggtttcaaacgacacctaaaacacctctttcagttatggtcattacgtgcaagctacgcgagctgattgatttagggagttcactgacattagagttcgcttgtaggagtcggaattattgaaattgcttttcgatgttaacattgtgactcgcttcgtcggatacaaaaaagggtcagttgaagctctcagtcttacagttttctaggaaggtcaatccatggcctgtttccttctgcttgcttccttaaatatcagcgaaccatcacgatattaccggatgtatggtaaagctccatcttcgtaggtttgatcaatacaccccaacctcttattataatcgaaattcagattaacgaccgtttcaaaaaatgatcaatatctcaacaagtcatcaacttagacggtcctgatgttccgcaaagatgtttcgtagatagaagacttacatgcgatggtcattaagatgttttgcaaacatctcggagacctgactacttagagagatgacgtcttcgacaaagttgttcattagctcaaaaactataattatagaagccattaggttcgatatattgccaccaggtggcgcaggcatgaaacttttgttttgcggatatcgcaggatccctgaccacttggagagatggcgtattcggcaaa

SEQ ID NO: 1353 - DNA, 3826 bp, Aedes aegypti
ccagaaagaagaagaagaagggaatttagtagcaccagtttttgccataacgccaaatgagagctacaatcaatataatctttcgaatttaagcaaagaaaataattttaattgctatacacctagtgtgggaccgtgtttctttattttttttactaaaaaactagtttgaacaataagccagttaaaaatatagcattcctatcagatcgatcgttattttactagtaaatgtaacgggcttgggaacatattggatcaattagttttcttaggctctcggcaagtgaactttgttcaatactaaacacatcgaaaacaaatttttcatgaaaaaactaaccatattcgacaaaagtctgatatgtttgaaattgaataacaaacgacgttgaagcctagtctattggaatatcgtagtttcctcaaacaaaaaaatgtcacgatttgtatcacaaagtgcatttcttgattgtggtactgtgccagagacacacatgtaacgatatttttatatcgtccacgtacgaatagccatgggcaatgatgacgcgtgttcatttcagtcgagtcgaagtttacatcgggatgtgtgctacacataccgatgcgaaacgaacagagtttagtaaacatcggccaaaacaatattgctcagacatccgaatgggaaatcgtttcttttttctgcacggacagagtgcatcacaggaccaagcaccttatttcacaagttttattgtttcctctaatttgtggtagatgaaagtgcatacatcaatgatcagtagttctcagcaaagtgttagaagttatggtttcagttaacataattgaactgtgagaagtttttaaaagtgccactatatttcttcgattactgtctgcgccattgaagccatctttgttttcaaacgaccttgaaagttatttcacgttcatgcaaggaattttctgtggttctatatctacctaaacagtttctcttctgttcgatgtgtggtgtatgcgtgttgccccaataaaatcaacataaagtgcaaataatcatgcctccatagtccactggaatacacagaaccattgaaataagtttttagttattcttcgactgttctacgtgtcggctttctaaattttgtattggttttgagaagaacaattcacacgacgataagacaggaagcatggccaacagtgtgagtagtcatttcggtgacagaatcataaacatgttgggatcaccggatcagcaacagtcaacgtcggacagcggagtgaacggcaataataatcttaagagctttgttaataacaacatagctacatctgacaatagtaactacaatgtgaatagtcatcaaaccaaaaatgctgcatcgtactgtttgacactacagaacagcattagcctgtacaatttttatgctaaaaatgataaacgtgacgcaaccaaagaagaaagtacgtcaagcagtactattacgggcaacatggtcgaccaaaaggacacagtagatggatcacagcaaaagtctaccataatttcaactactcttagtacaaatgttcatagtaacatgaacgaccttcaaaaccaacaccacaactattccaaatcctatgatagtcagccggatttaaagctagatacttcatgtgatgatcccatcgacagtgacgatcatgctactaccgattccatgaatgattacgtttctccggctaaacaatcatcgtcatcggatcacattgccagaagtcagcagaatgctacccctacgacaccagatcatcacgctcgacgacccatgaatgctttcctgatattttgcaaacgtcatagaaccatagtgagagatcggcacccaaatttggaaaatagatcaataaccaaaattcttggcgattggtgggcgaatttagacaaagatcagaaagcaagctacacgaatctcgcaaagcagtacaaggacgcattctttactgctcatccggattttaaatggtacaaattaccagccccaccgttgcggccccaaggtatacgaccagtgaaaacggaaccgtcagggttgggctccgaatacgagtatggctatgggatatcctatgagacagttgaaacaaaagacgaagagcaattcgacacagatcaacgcacaaacatcaccaccagtgagtttattaccggcgacaatgagcttacttacggagaattgccaaccgaatcaagcccgaaaaagaagaatttggagatgtctgtcttcaaattggcagatgaagcacaaatgggtggtttgaatagccttatgatggatgcgtacgaaggaaagatcaatcaaaacgattcttcaagtcctggctattgcgaagccaaacaggagtccacaatgctggatcctagttcacctgaacccagaatgacgatggaaccatgtatcaacatgaagaatcatttttattccaaacgtccaaacgatgtaaatcgtgagttgagtgcctatgatagtaaacggtttaagagagcttttgattcaatgcactacgagtactatgatgaagattatacaagaaagactgcgcgcgcatgcaagggtaaacgatataaggaattcatgacacatacgagactgagctcggcttcaaagaagacatcaaaaagcgcaactgtcgtccgagcggaacagccgcaggcagctgtggaaagtggccctgctcctatagtaacggaatacgccatcgatgatccggcacccaaaacaaatggcacgctggaccaaaactactccggatgcatcgcgtatgaagaaacaaacatcgttgggaagaatgatccgaagcatttcgatgcttcggatttcgatctggacaagaaaatcaatgaactaccatgtctaaatctggacgagtatctcacgaaaaagaaagacaccaagaagaaaaagaaaatcaaaggaaaattcaaatcaacgatcaagccccacataaccgtcgttgagcagatggagaaaattgtgggcagccgtaagcggaaggctcgcaaggaaagcatcacccgtcgggatgtaagtttatcagacagcaacctggtgcctgaggcggacgctttattcgcgctcgcaacccttgcggaagtagccgccaacgaaaaccatatcggcgaaaaaaccatctaagtcaagttgaaaatggtccaatttgaggcgatttgaccggcaatgatcgaacagccagcgtaatgatagatacctactgttttaagtgaatacagaaattattttcaaatatttgctacaagcattagcgttgtttgcgtacaacgcaaacataatcctagtaacaaacaaaaatatataagagacaaacgatcacatcgttgatatatttttagatttaaatatcgttgatctgttttgatttttatttgatgtgctaaatgccgaagatgtactacaaacgaatcgatagtgcttgattccttgttattcatatttcacactaaaaagttgttacgtattggaaacaagtcttttattctcacaattcatagtattgtcttgaaaataatgatctaagatagatattcccccatttatttaaaaatatttaagttgaaggcatgctttcaagtaccgtcaatatattacattcaatatgaatatgctttgaaaacatctacggtagtatgattcagtagatatgcccataaaacataacatttctgccgtttcctatgttcgaaaagttaattattattatctgtgcttatgttaaatttaataaatattatctggttttagtctaataaattgttcaacagaaa

SEQ ID NO: 1354 - DNA, 4058 bp, Aedes aegypti
ggtcgatgtgttgtttgtgtggaatgattcaacttgaatcatatgtataggggagatgccaaatgcgcatgcaaagagtggattaagcaaaagtttacaatattttaaggatactaaaagtaattagcaactctggtaaactatgcattgttctgaaagaaaaagtgaagtgagtgatccaatccatgctaaaattatcccaaagatgcaattcaagctgaaaaataaaagcgacggagtgctgttaaaaattcatcaaacggtgtcccagaatggccgcttattaaggatacgcttcatcatagcctgtttcagttatgaaaatgacaagctgttttgtgtggatcacaggggaagcatctttgtctttagtttgactgctctcaaatattggataatcgaaaataacttaaatcaagtaactgcaattgagcctatacctaatacgaaccaactgcttgtgggaaataaagaaggaattgttgcagttatagattcagatactggcaacgaactaatgcgcttaaaacctcaccatacacgaatcgaacggatatccttcccaccctgggtaggaaaacaacatcaacagcaacaaaaacaactaccacatgcacaattcaattcacgccaaaaacaggaagcaaagtacttagaaaaaccaaccaacacgaccggcacaaaggaccaacagaaagctaaatcgagcaagaacgccttagcagcgatgtttctagtaacagcgcccggctgtgccaaattgttcgatatgcgaaatttcgtggaggtgcaccaattgaattacgggacagtggactcaatgaagcatatcgagcagctacaatgggttccacgggcgaatcttctgctaggttgcggactgcatggaatgctcaagctgtggaacaccgacttcaaactagccaaagagatagatctgcggaagatgagaagcaactacttgaaaaagttccaaatggaaactattatatacgacaaggaaccaccgatctgcgaaagccatgatgaatccaagcgtgaagttgagcgagtaattcagagcatgaccactgatggccgtaccaaaaggtacgtgaaatctgctcaatttactgctaacggaaagtttctcgttcttaattgcatggaccactctttgattatactccgatgtgattcatggcaggtatgcaaaattctgacactttctagtccattcattacgcattttgaaatcgtacactttgaccgggagcagcatcttcctcgcactacagctcaggagtttttgatgatggtgaaaactgttgagaatgatttgctgctaatgaatttggagaacggttccaaaagctacataggacatagaccggaaaacaaatgctataaattccgactctccaacaatggcaaaatgctagccaacgtgctgaaaagcggtgaaattttgctccataatttggaattccatttgtgtgccttggaagcgaataaattacaacattcggtggcagcggtaggcataccaacaggaaaaacacatccgcgaccatcgaaaagaactgcaagtaccactagcatcagccaacaacagcaacgaacgatggcaaatagtaatgtagctactccttccattgcatcattgtacacaattgtaccaactgaaacggttgcttcttccgggtcaacttcgacaggacaaatagtgtccgtattccggaaggagagtaagcttaaaatagataagcgcttggaggagatccacgataagatatcgaaaacgctagccaaaaacagactgctgcctatattgaaagagtttggcgaatatccggagaagcatcggactaccatttggcgcactttactcgaactaccacaaaacgtcgattgcttcaatgcgttgcttctgcgaggacaccatccttgtgtggcggattacgagcgcaaattttccggtttcggaggacggatggttcgaaacatgaaaaaaatcgtttcctgcctggctcactggtcagcggtttttgcacagtgtgattttgtgccatttttcgtacatcccttcgttcgactgtatccaaatgattctcttacttgtttcgaaaccgttgctacggtgtttctaaaccactgtcagttgtggttcgagtttgctccactggaaccgtttaattatttgggtatgatagagaacattctgtgcgagtacgagccgaagctgatgaatttttatcgtacgcgcaatatttcttcccgaatctatgggctgacgttgatggagacagctttcgcgggaaactttgatgccaataaatggatccgtctatgggaccacatactttccaacgaatcctggttcatgctattttttattgtagcatacaacgctgctcacaggacgactatcatgaattgctcgaatgaaaaggatgttgaaggattttttcacgaactatcactgatagacatcaacagactgctgaaaaggacatacgatttggccgaacgatgcgctgaaggcattcatccctcgtactacatgaaatcattcatatcacttagtggcgcaacggtttgtaacacttcgacgaccggggtcaaatgctctaatttagagagaccccataaatcgactcaatgttatgaacccaatcaacttcgaattcgtgatggcgataaagcggtcgaaagcacgtatagcaaattcagcaactttcccaaacagctggttgatattagaactggcgaaataaattgcttgaaagcggaacagcagcgattggaagcaaaaatagtggaaatggaaaagctcgagcacatgctgaaggaccgaatggtggaaaatttgatccaagaagagcatgagcagcggatgagagaggttgaaaggaaatatgaggaagccctaacgagcgaggagcaacgcatcgaaatgcaacgaaaactgctgctgctgcacaagagacagctgcgagaacgggaaaatgaagttttgaccgagtctcggaatatgctgctgcggaaaagtgctgctgcaagagaatccgagctcgaaacattgctgaaaacgctgcagcaagagaggcaccgcgaggaaattgatctcatgttcgccgaggaggacatgaaacatcgggaaatggaactacaggcaaaacgctgcgataccaactcggaattagtggacgatcgatctctggagcaacgatatcagcaggcaattcaacagctggagcgccagaagcaacgattttacgaggatatcgaacgggtgtcttattatgattcggttggacgtcccgtcgcaaacatgtacagcggcacgcagactggtacagcggattactgccattcaatgccaaaacaatggcatctaaaggattgcgagaaaaagattgagtatctggaaagacaattggaaactcttcttcattccaaaaatcagatataatactaaaatctttttgtttgtataggttttatttcatcagatcgtttgaaaattgtcctaacaataaaactattttcttttgatttatgacaatcacacgagtcaatgaattgcgttttcctgtggaaatagtcaaataagtcagtgtgacacaaacttactaacttaatatcactttaaagaatcgagtctaggcgagtttttccaagttgagttttgttacctttttaatagtgctcaccgataaataacactctaccgcgcacaaacataggtacgtaccacgtatgcacttgcacctgtgacatagaacaaggaaaggatccaacatagaagagcagatggtgatttcaaaatttgcattacaaatctgctaagttgctctactaccagggataacatgaatctgggtttttgcgtctttctagaatagaacggaggagtaaaaatgccgttgattcgatatacactatgtagtcaccatagtaagctaaccaaagcaacttaccgcaggtacacaaaggagcagatgcagttgtagggcagaggttctcaatgtatttcaatcttggagtgataaataaaaatattgaagagatggtcg

SEQ ID NO: 1355 - DNA, 1595 bp, Aedes aegypti
atttcgcaatcaataaaccagcaaaagccgtgttttctagaaggtttccgctttgatttcgcgcgagtgcataaattagaagcttctgtgttgcgtcgtaatgaaaattgatatccatcctctgacggaggatcccacaaaggcatggaaggaaatatcgaaaagccagcgagtgataaagatcaacacgaaggctcccggagcggaagttccccagaacaaggtgagggtggtttgtatgtccgatacccactccctgacgcatcacataaagttcgacattcccgagggggacgtcttcatccatgctggcgactttacccggtgtggcaagctggatgaggtcatagacttcaacaattggttggaaaaactaccgcacaagcataaactggtcatagcagggaaccacgagctcagcttcgaccacacattcacccacccgttccagaatgcgagtgcctgttgcaagaaaaccggtagcactctgctggacgaaatccctaccctgggaaatagcaaagaaagcttggccgaagcggtcaagacggagaacatacgacaatacctgagcaactgcgtgtacctgcaggatgaatcgatcgaactgtacgggttgaaaatctacggtaccccgtggcaaccggagttctgcaagtgggccttcaacgtgaaacgtggccaagactgtctggacaagtgggagaaaattccggaaaacctggacattctaatcacgcacacaccgcccgttggtcacggagatttgtgctgttctggggtgcgagctggatgtgtggaactgctgaccacagtgcagcaacgggtcaaacccaagtaccacgtgtttgggcacgtacacgagggctacgggatcacctccgatggtaagatcatttttatcaatgcgtccacctgtgacatcaactatctgccgaacaaccacccgatcgtgttcgatgtcaccctgccgaaggggcgcaccaaagacaatctgtaaaatgggatggcttattgatagtttatagaggatatttagtagaagaactacgcttaaaacagccgtaatgccatggataaaagtataaacttttgtttggcagattactcctctaatagatctagatcatttctcgctatgaacaacaaattttgtagtaatttattactttcaatatgtatatttcggtaacctggaattatcaagtttgcggagccttagaactacaaaatctttaaattatgctcttttggttagatttgtagatctttatttttaaacacttgcatggatataaagttagattcggttcaataggacttcgattaaggggaaaaatcattttttgtaatagtttaaaagataggctcaataattcaataagttcacgagaagtacataagcactcatttacatgagattctatatgaacttacacgacgacgctacatgacacgttacataaagctacaaacctagaattttactttttcaatattttatgcagcactaaatgatcaatgcgtactcatgactgtatttcaaaatctagtttttttcgggtccgtttagcgaatagaattattagtaattg

SEQ ID NO: 1356 - DNA, 1091 bp, Aedes aegypti
atgggaaacacggccagctttaaagcattctggtcggtgatattcgaaaggagaaccctcctcttgaaatgttcgctcgactggaagaaccctgctgcttatatttgccgctgccccgtgtcgcttagcgaactgggtgcgctgaatacaaccaacatcgactatctgatggggctgttcagttacgataggctgccgtatgccgctgacatgggcgaagaaccgaacaaggagactccccccttggtgaggatggttcactattcgttggagatgttgcagaaaaaggagcactcgggtggtttcttgcttttcgtggaggacggtaacattcaggaggcgcacaaggagaacaaaccgatcaaggcattcgagcaggtcaaacactatgctaatgctttcaatatggcccacatgatggtgtcggaagcgaacacgttgctcatttcgatgaatgatgtcggaagtacgctgtccattccaggatacccggcacgtgacacggacatactgaccgaggccggtacaagtgacaaggattccaaaccataccttagtcttgcttacgctacggggccttcatacgactcgtattaccaaccaaacgagggccgcgttaatccgcttgccgtgctgcaaggcactccgacgcagaaggagcagacatgcagcgctgccgttccaatgagcgagggtgtcaacggtggagaagacgcttccgtctatgctaccgggccatgggcgttcatgttttccggtggatacgagcaaaacttcattgcccatgccatctcgtttgcctcttgtatcacggacgtgtgtggaggcgcatcgagcgtggtggtttctagcgcggccttgtttttggcgttgatggtgcgagtttttgcctaatgaaaggatggtacgaaaagaccacaactacaaagtccactagatgaaacgaaagttgactccacttaattaggtagtattttttaaattattgggattgtaactctacaagcatctgattccactccacttactatttaggtactattattcatgtgaaataaaggagaagctacaaataaaatatgttgcaaatt

SEQ ID NO: 1357 - DNA, 717 bp, Aedes aegypti
atgagcagattacggtttgacgtgtcggtctgggtcatggtgaccatgtgtgtgcttagtgccagaaattgttgggctcaaggagaatatgacccaaactattggaaccagcaggcgcacgatctcttatttgagaaaaaggattatacgatgcaaaaagttaacattgccaaaaatataatcgtatttgtcggatccggaatgtcccaggcaaccgtcaccgccgccagaactcataaaggaggcgaaaatgctacgttcccgttcgagcagctcaaatggagtggtaatgcccggacatattgcgtcgatagtagggtgccggatagtgcttgcgccagcacagcgtttttgaccggagtgaaaggtaatctgggaacggttgcagttcatcccaccgtgaaacgaggagaatgtgtcgctaccagtgataaggtgaagcagttggaatctattgccaaatgggcgctcgcagaaggacgtgtcgttggttttgccacgacatcacgagttaccgacggctccaacgctgctctatacgcgcactctgccgataaagattgggaaaatgatgcctctgtcactgcagctggatgcaacgccactcaggttaacgatattgcctatcaactaataaatggagatgttggaaagcactttaaggtaatcttcggaggtggacgcaaaaattttatttccaaacaccgaaaccgatga

SEQ ID NO: 1358 - DNA, 4177 bp, Aedes aegypti
atggttcgtcagccgactgctgccagaaggtacataactgaaatggctggtgaaatgaccaaaacagggaagaccacgacggtggtcagtggaccggagtcgccctacaaaccgagcaaagttctgctcagttcggtcaatccttacattacgtgtaatctgtgcaaaggttacttgatcgatgcaaccactatcgtcgagtgtctacattcattttgtcatagctgcatcatgaagcacttgcgaacggagcagtactgtccacaatgtgagatgatgataaacaaagcgaaaccgaacatcaaaccggacgccaccctgcagtccatcgtgtacaaactggtgccggggttgtacgagaaggaactactccggaagcgggccttctatcgtcaacacccggataaggctgccctgacgactccggagcaacgtggggaagataccgagcatctcatcttcgggcccagcgacatgttttcgctcacgctggagtacgccgacaaggaacttgccggagacaacgaagagcttctgaagccgaaaattctcaaatgcccggctgttttcacgattgccaacctgaaaaagttcatcgccaacaagtacaacattccgatgcatctcttctacgtggaaatcatgtacaaagtgcaaacaattacgctgcccgatcactacaccctgatggatgtggcctacatctacacgtggaagaaggatgcccacatgcgatttttctaccgcatccggacgcacgagatgaaatcggtggagctgccggaggttcccctgaggcgctcgccaagcatctcaactggccgcagcagcacttcgctaacgaccatcaaagaggaggaatccgactgcaaggaaagcttagacctcatcaaaccgagtgacattaaacgcgaggaaccgagcttggtggaatgtgataacaaaggtactgaaaccacaaataccacgatcactaccaccatgactgctcctgccactttgcctcctcccttggtcgtggcaattccagcgccgaacaaaccaatgtcgcctccgaaaacaacggcttcgaaaatcgtcgctgcccccgttcggtatagtgtgagtgagcccatgctggatgtgaaacccaatgtggccacgctcggaagacaacagccgcatcaacagcagcagcaacaacaacaagtggaaagcagcgaacagcccaaagtgaagaagaatgaatcgataaagttgaaaatagaaatgaacaaaaacacttatgtcagtatcctgcaaagccctcagccggatactgtcagcaagcatcacaagtcggacaaaggggaaaaggtgaagaagaagaaatcggaggacaaggacaagagtgtcaataagattaaatcatccagtgatctcaagattaagatagaaaaagtgaaagatggactagtcagtggcaagagtagcaaaaaggctccgtacaaggtggaactgagtggactcagtgatgtgaagaacaataaccataaaagtgccgataatgagtacgacagtaaaaaagcgaagaaagaagcgaagcttctggataaaagtgcgaaaaaagtgaaatcacccaaacggagcttggatttggaaaaagtgcaaccatccatagtgctgaaaattgaccaaaaaagtccggaactgtcgacatctacgctgaaaatggtacccttacctttggcgtcttcttcaccgaaacacaaaaccgatgttacgatagaggatgaaaaatctcagttcctgaattcgttcgatctcacgccaatcaagtcagttcagagtaataaatcaggatccccagcaagttccccgggatcaaactcttcttcgccaccgagctcatccagcggagataccaagcatggtaagcgaaaaaacaaagatgcacctgctgggcgtagcgttctcaagaaaccaaaactgtctgacgatgagatgaaggcactggttgagaggacggtgcagcaaaccaagtctacttcggaacacatggcatcgctatccactcctgtcaagactgtgaaaaaagagctggaaagtccccccactcaacattcagccccaaaacctttgccagtgaagaatgaaatgtcggtcaaggatgttcctaagacagaaaacaaaccaagaccggctgaaatcaaacctccattagtatttcctcctccggtggtgtccgccaacaacattcctgcgccaaaacctgctcaacctgtgatgattgctccaaaaccctctgttgacgccccttcaaagcggcctgcagtgccttccttccctaaaccaatgcaaccgatgaaaaaactacctccactcctaccaaaggacctcgaatacataaagaacaacaagcagaaacagttggaaatgaaacggcctcacctcaatctgaacatatctcccaacaaagacacggaaattagtcaaatcaaaccggaagatgctaagaaaaacatcaaagtgtatggtcccccttcggacaatgataactttgccataccagctgcagtgccatcagtgtcgaagccaaagcctaacaagaatcgacctatgaatttcctgaactatgccttgcacaacaccaataaagccccggctggctcccgaacaccaattccttcctattccaactcaccgagctactcgccggattcacctcagtacaacccgaacttcaacatttcaacaaaacagtacaagtacaccaaccctcttgcgtatgctaatttcgtacaaaacatgctcaacgatcgcaagaacagcaacgtttcacctccgtccgtacaggaaaagaaatccgaacagcaaaacgagaggaaacggccttgtcctagtccagaaaacaagcaagagcccccggaaaaacaaccgaaagttcagtcacttctaaatcaaatcaatatcccttcctccctgtccatcaccttggctacggaagaggatgaagccgcgcgggaaaaggcacggaagagtctaccggaagaggataaaaactacatcgaaatcttgaagctgccggaaatttcgataacggaaaccgaccgaacaacgccacccaaaacacaagaaaacgctcagaagaaacctgtcaaaagtttgagcccggtcaaatccgacactctgaaagcgttaaccgatgcgagaaaatccagtgagttggataaatcctcattccaggattcgttcatccaatcgattaaaggcaaagtggaaaaacagcgacccaacaaggctggcaacaagccagagaagcaaccctcattgggattttcccctccaacatcagtgccgaacaacaacgcattcaagctcccaaatgcaaccgttctcagcaatggaattgtgaagcttaactcataccctgaactggatctcatcaacaagaatactggtaaccaaaccccacgacccatgccatccccaccaaaatcaatcacctccaaacatgttccaatcgctccaaagccaaccggaacattcttccctccaaccggaatgccttccatgccttcaccagcgcatcaacgcaagagcatgtcacccccggtgccaaaaccatcccactccccagtgcaacccaagtcgaagacccctccaattgtgtcctcaacatctccatcgcacgcagcgcttgcttcgatgggcccaatgttcggactacagataaaaccagaagcgtctggctatcatcaggccaaaaaatccgaacccaaaccgaagaagtcctcgcagaaatcgcccaagccaaaccctctggacctcacggctccatcaatgcctactccgatggtggacaaatccaaggaggccgccatgaacatgctcatgatgaacaacaacctcaacaaccttagcaacgcacaaaagtttctaatggccaactacaacaacggaatgatggtcccacagatggcagccaacccgctcataaatcagatgctgcaggcctctctttatctgcagcagtggaaccgaatggcccaccagcagcaggccaacaacgattccatggacaaatgaaacatgctctcaccaacatcacagcctcctgctcggaaaaccattgtgatagacattccctagccagccaaagtccaaagtacgccgaacagcacgcggtcgtcaacggaacagtggcagtcaatcttga

SEQ ID NO: 1359 - DNA, 947 bp, Aedes aegypti
tgacaatgctattgtgaaagtccggtcgcttgtctctgtaaaggcggagagagtgtaggtcgcccttgaggagccgaagacgaatgggacctccgtgtaacatccacattctgaatgccgacatcttccatttgctgagcaagccgatcaacatcaacgtcatggaaagttggacgcccctgggagggattcgccagcagctgacgaacgttgaaacgaagactgattcccttgaggacatggctgagaatgtcggtgaggaggagttggttgcgcggaagcgtcaaattccgaaaggaaaggattcaacattcgtgacgagtcctcaataacttcggagctaatcgccgccgatggccaggccgctgcttccgatagatttggctgtaccgtcgagttcaaaatcggtctcaaatcgccttctaaggaagtggatactaactcaggaagcaaatttactgttgaggtggttacagtctgcaaactaggaaagtttccaccattcaaagggttcccggtactgtatcgagtagcactcgctaccggttcggaaaatcgagaagtgttcggtggtgctggtaaccaagcactgccataaggagtttcttgcgacgtggtattttgaacggcacggaatgggagttgaaatccatccgcggaaaaatttactcttgaagcgcgttccatttcggcctgcaaattgttcggagctggcaaacgactgtccatcgagtgattttggatgatctgatcagcccaggccagacgatgctcgcgatactggccggcttcaatccgatttccaaggatttcttgccgtgaaaattcggattctcccctcggaggtgtcaccaaagttctttgggagttagaggtcgaattctggaccatacggtcgtccatgttggtctgtaaatatcaaaatgcaaagcaaattcagtggtatg

SEQ ID NO: 1360 - DNA, 1740 bp, Aedes aegypti
atgatcccgtacgcgatttgtttgatcaggctgctaattgcaataatcagaaaagaagtggaagatttggtggtgcggttttggcctggcatagtgagaccggtagtgcaagtgagacaaggacagattcaaggtattacgtcgaaattaccgaacggggaatcgtacagctattttaaaggaattccgtatgccaaaccaccggtcaaagagttgcgcttcagacctccagttccgctggacagtttcggaaccccacttttgaagtgcttagttgataaaaatgacttcattcagccacacgtcttgtttaagtcatttgtcaccggtaccgaggatgctctgtatttgaatgtgtatacccctgcaacggcgaattcgaatgagaaaaaacctgtcatggtttatatccacggtggcggccttgagcatggtacggctagcagtttcgtgtacgatcctcagtacttggtgatgcaaggtgtaattgtcgttaccatgttttaccgtctgggaccgtttgggtttctgtcattaccagacgccggcgttcatggtaactttgggttaaaagatcaacgccaagccctgatgtgggtgcaggagaacattgaccggtttggaggagatccccagaatgtgacgctgtttggtgaaagtgccggaagctggtcgacttacgtccattatctgtcacccagctctagaaaatacttccatcgcgccatatgtcagagcggtgatacatgcaccgagtccggtctgcagatagacgctgaaagcaaagcgcgcaagctagcatacttgctgggctatcggggaatttttcgctgctctaatcgactttgtttcttttttattttttcagatgttcttagaaaagctcctgcgaaagtattagccagatatcaagtgttatgtaacaatgagcaagaaaaaaccttcccattgaggtttcccttcaggcctgtcgtagaacaactatgcagcgaggatgccatcttgaaccagacgccagaaaaactgcttaaatcagtcgacaccatcagaattccaatgattaatggatacacgagtaacgaaggaattctaggatttaaatcgaacaaacatagattgaagaagtttgacgaaaacccgaagtggcttgttccagagctgatgggccatccagcaggcttaaatagaacagtagtaggagatcaaatcaagcaattttactttgggaacaaacggattggtctagaaacgagcaatgaagttacagatctgttctctgaccacacgtttatgaccacatcgaatttgagtgctgaatggttagcaaaatatcaacccaatgctgtacagtaccattatgtattctcgtatgttggacgattcaactttaccaaagcgctgtacaaagcaagtaatctgaaaggagcttctcacggagatgattgtttatatctattcaatgcggcattcttgccacggttaccaagagctagcgaagagcaaaaagttagggaacaatttatacggttgtggaccaactttgcgaaatacggtgatccaacaccagatggcgatgacctgcgattcaaatggaaaccggtgaaaaaagttgtacgtacttcaccggactttgacttggactgtttggatatcacatcagaattgaggatgatacaaaacccctttcaggaaaggaaagagttttggagaaatatgatcaaaaagtatacaaactatttg

SEQ ID NO: 1361 - DNA, 1545 bp, Aedes aegypti
tcccggtcaaccagtcagtgattttcgatagcgatcgatatagattcgttttgaaccgttagcgatcgccatcgttggtcaaagatctataaagaattatgaagactggttggtcggggtgtgcaaaaaaatcagggaccggggaaatttaaggctctaggtcgcttgcttttattttaattggattttagaacccaaatatctcaccacacctccgtaccgccatggatgtgtccaccgtggatggtttcaatgcctggctgaacggtaagctgcgcgatttcaatacggatgagggtgtttttggttcctatataatggggattctcgagggtgacgaaaccaacgaagagaaaaccgaagctctggaaggaattttgtcagaaatactggaaaccgatataaatacattcatcacagaaattctcgacaaatggaaacaatgccatcaggtgcaagaatctggggcttccaagctgaagttggatgtcgatgagcagttggctaaactgttggagaatcaaaagctggccaaaaaagaagaacgtgaatacaccgaggaagaacgacgaatcaagcagcaaattctatcgcaatacagtcagctctcggaaagcgaaccggacggggaggacgacgacgatggggccggcggaggaggtggacttgcttcgtcatccaacggaggcctcacgcgcaacaccaatgccgctgacgtggccgccttggtacgggaaaagcgcgaacaggccaaactggagagtcaacagaagaaagataaggacaaacaggaccgcgaaaagcagaaacaactgcgcgaggagaagaaagaaaagcgtaagaccgtcaaaggagaaagaagacggtagcgccctcgagcggattcgggttcgacaattgtacaggttatggtcggcaacggtgtttgacgcggagatggagtaaaagtaaaacttcccaattagatttcgatcagtaatagaactttccaatcaagatctgaaacagaggcgcaataacaaacttactggtgggagatgtttgttcaagcaatgagtggaaaagtttgcaatcagcaatgttaaatgaaaaactgttttattcgctaattagtatcacaatttgtcccttactttgtcactctagttacaacccctagcaataccaacagaatccatcttctgtgtagtaatcgtcgtagttctggtcataaaccggctccctggttggataatcggagatgtaattgaaactgttgtacaaactgtctttactgtcgtagtcctgatagtaatcgtattcagggtaggagtacgcactgtaagcaggtttatagaagcccatcatgctgctgaagagattcgaaccggtgaagatatctatatttggtagaaaaaaaaaacgaatttacaaatggactacattttctgcacttcatattacttagccggaatccataactaacaggtaacattacaaagcaaatcaaaacactgaatattaaactagaattcatgatagcttctatttgaaaccgaatccaaa

SEQ ID NO: 1362 - DNA, 1339 bp, Aedes aegypti
gttgcgaaacagtcaagaaaaagtttaaacccgattccccacaatgatggattccgcggaagaacctgtctcgaaacgtgccaaatctgacgccgctgctgcggacgaggaagcgcccgccgtaagatgtcggcattttgtacagcggaagaagcgctactgcaagatgacggtcggcagagggaagctctattgtggggagcatgaagtccacgctgaagacgactcgacaggggaaagacgaatcccatgtccactggatcccaagcactcgatttcggctgcgaagctggagaagcatttgaagatttgcaatgctaagccgaaagatctgccggggtatattgaagtggggatcaatgccgtttcggatggggaggacaatgaggtggcaaacagccaaacgagtttgaagctgtctgatgttccgatggatcgattagacgcgcttatcaaaaagatagaggccattttcgacgacacccaaatcggggtcatggaagaactgatattggagcatgaagtattcaaagaggagctagggaacgaatcctacgggccacaaacgctgaagcatctgatccagtccgcttccctgttaggcatcctgaggcgggagaacttcttccaaaatgacgtagctttcgtggagtttggagcgggaaagggtcaggttgctttctggttggctaccgtgctccagcagtcggatttgaagaacgtgaaggtctttctggtggataaggcttcccatcgacataagaaagacaataagattgaggaccgggagatcatacaacgggtccgagcggatatcggcgatctagtgctgcaaaagttggacgttctgcgggatagcaggaagattgttggcgtggggaagcacctttgcggcggagccacggatcttgccctgcgttgcttgatacgtgcaaataaacataggccagagggtgatactctgcaatccgatggattcgttttcgctctctgttgccatcatcgatgcgattggaagacgtatgcggggaaaaagtttcttctggagaaaggcatcagtagggaggatttcgatttggtggtgaaaatggtcagctgggctgtttgcggcacgggaaccagtcgggagaggagaaacgctgaaggggacgaaggagatggaatcaagtacggaatgacgagaagccaacgcgaggaagttggacgaaggtgcaaacgaatgctggactggggacgaattcaatatctgaaagagaatgggtttgaagcgggtctgaaactgtacgcaaaagctgaaacgacactagagaatgtatgcctcattggacatgtcaaataa

SEQ ID NO: 1363 - DNA, 4158 bp, Aedes aegypti
cagagacgttcgtacccgtcatttcaaggagctcgcagggaagattcaaaattgaaattgatgagcgccgcaaccaccatcagtctgtgttgaaattccgcatcagataatggcagaaaaatgtatcgtcacgattaaggaagagcagcagcaccaacagcaatgtcccagccctctgggggagataaagaatgattctgtgacggcgttgaccggtacacctacgacgatcatcactagcagcatcccatcagcgacgaccgcgatcagtctgccatcaacgacgacggtatccgcctcttcgactcccacccaatccggcacgatagactgcgacgacgatgaccaggaagagaacggcggcaaaccgcgcgaaaaaggttgctatgcgtggttctattccacaaatcatggcgtcgttgttgggcactctaccggaaaccagattcatctggaaacaccagcgctcgaggaaaaaagcaacggtggcatgaatctagcgaaaccaaagcgtctgagcgatgagttttactctgccgacgatgactacgacgaggacgacgacgacgagatgattggtggcggagaagatggaggcatcggaatcagtagtagcagcagtggcagcagcagtttgaccggaatcagtaaaagtgttggaggtgacggagattgcgaagcgcacgctagcttaaatgagattaaaaacctgagtatcacgaatggtggtgctgagcttggtgaggatcgatatgaacaggatgaaaactcgatttccgatccgatctatatcagtgaggagacttcgtcatgtagtagcggtcaccaacggatcatagctgaagaagcttccgtagaagcacaggagactgaagagccaagtcggcaacatccggaacagcctttgggaatggagcaggaggaaatcccagaggacgaaggtgttgctgcgctggaagataacctcgaggacgatgaagatgacgaggtggatgaggatgatcctcatgatgtgcaatcaatcgatgcaatcgaacgtcgggattttgagcaggaacaaaaactgactggcggaattataattaaaaatagcgctttgatacccgataaccatagactgaatttagaggtaataaatagttttagtaggaaccgcaacgatgcattggcgaaaaaatctcagtctgagagcggcaaagttcagcttataacaacgccaactagcagtagacacgcgtacaagaattgttgtaataatccatctagttctaatagcactagtaatagggaacaaaacagtaatagtacaacaaagtcaacggtaaaagttaatctgtcagctagtctagatagctattgtgcagctagtgaatccgtaaatggaccggatatggctgatgggccttcctgttcttcctcaatggcttcgtcctcgtcttcttcggcctccagtagcagtaagacgcataatcgccaacaacagcagcaattagatgcgatcttcaatagtaactccaatgatagtctatcatccgatcgttctatatttatccccaacctgcaagctctgaaagcatctgccaaggattgcccaacagctcccagcagcagcggtgtcaatgagccaggaacatcatcttcctcgtcgtcatcaccatcaccttcatcagcaagctgttccgctggtccttcaacttccggagcaaccaaagcaccatccgactgtagtttatcgtcttgtgcaacatcggtcataaagcaaacaggagaatgcagcaaaaacatcaaccaccatcccattccctcaactagtactagtagttcctcgctgttttcctttagctgtccctttggaagcgcagatcgtgaaaccggcgaaggatgtagtaacggcaatgtttccctaagaagattcccttcgaatggctcgaattttgccgataacattgccgatgaagtggaaccttctagttcgtctcaccgtattcgccaaccacaacttcatcacgagcataatcacatggaggatcccctgttggaaccttctgaactatcgatgccaccggagctagccgcttcggcatctgtcgtcgatcacgaatgcgacgaagacaactgggccgattgcgaagaaggctccgacgaagaaatatgcacctgccgagattataccgatgatgaaggaaacggcactaccggagccggtggccatgctagcagcgaagacgaactgccctccagggacgttgatctatcgagctttactcacatggatgccgctgaggatattcttgctcatgacccgagtaccggtgggtccggtagcgcggccaatactagcggaaacaacgcacaaacgccaagactgcatcggaagcgcaaacttaccgaaaatcgcattctattcggaagcggcggcagccggacttcaacgggaggaatgtcggagaccaccggtgggctgggtagccattgcgatagccctagtacggaatcgctcaactacaacagccgcaaacgattagctttagatagtaccagctcgccacgaacggtgcgtagtccgtctaatcttgcttcgacgcccacgacatcttcagcgctgggagaacggaagactccccgaaatataatccctaccaaagataatcctcctcccgaactgaacgaagtcgtcagtggttcccgagatgcgacgttacgtgtgtgggacgtagacgagggcacttgcctgcatgttttggtgggtcatttggccgccgttcgatgtgttcaatacgatggtaggctagtagtttccggagcgtacgactacatggtgaaggtgtggaacccagagcgtcaggagtgtctccatacgttgcaaggccatacgaatcgtgtctattccctgcagtttgacggcgtccacgtggtgtcgggatcgttggatacgtcgatccgtgtgtgggaagcggaaaccggcagttgcaagcacgcccttatgggtcatcagagtttaacttccggcatggagctcagatcgaacattttggtgtccggtaatgccgattccacggttaaggtgtgggatatcatcacgggacagtgcttgcagacgttatctgggcccaacaagcaccagtcggccgtgacttgtttacagttcaattctcgcttcgtgataaccagctcagacgacggcactgtgaagctgtgggacgttaagactggagaattcatacgcaatctggtcgccctggaatctgggggctccggaggtgtagtgtggcgtattagggctaacgatacgaagctgatatgcgctgtcggttcgcgtaacggaacggaggaaaccaaactgctggttctcgacttcgatgtagaagaaaatttgagaaaccatcctgaaacgtggacatccgaaagggaatcgtcatcttcgtcatccgcatcttcattgtagtcaacgtcactagtaccaccattagataacagctgttataggatcaaatacctaccacaagcatcatcagcacactgcttgggattattgcagtagcaaagccagtaaatatagccacatagacgccactccagatgtacgcaggtttgttgagcatgttactatacttcagaacaacgtagactagtgcatactcctgaatgagcagaataggatactccatgtaggacagaaacgcataccggttggtgaaattgtacaacatcgtcacactgtagctgcatagttccataagtagtccattcagggataagccagtagcggatttcagcttctgcacagtttgaatctgcggaactttcgataccaagcaggacgctatggttatcagggacaacaagtccgctataatgtaaaggatgcctcggtcatctagtagatccattttttggtaatttttagttatataatttgactagaatgctgcaatggcacaatattcaggaggatggttttcgaatttgttttgttgtaatacactagctactcaacatcataggcttgtctttaattacgtatagctgcaagataaaaatagaatttttacaatgagaatgaatcaaaaagtttaccattattgacactcacaaaagatgcattatattgcatacccacatgtacaacaattagataataaattgtatagttattat

SEQ ID NO: 1364 - DNA, 938 bp, Aedes aegypti
atgttctgtatcgcttccaacaccttctgtatgtatttacttcacacaggcgctcatgtgatacccttggaggaggaaggctattggggatcgccatgcagttccagcgaatcccttgagcatcgagacgagtattctcctggccagaatgtactgtcgtcgcaatccggaccggaaggatcgtccccttatggtagccagtatcatcaccatcatcaccacaatcagccagtgtactgtcccgttgagtatgagaaaacgagttatatatgtgacgagggctattacggagcaacaacggcaacaagcacaagcggtggatcgatgtcatcggtgaatgcttcaagtgcaatagttaccggcagtgtcccggtagtacgagtagtcaaaagacgcaacacggcgaacaagaaagaacgtagacgtactcaaagtattaactcggcctacacctcgctgcgggatcgtattccaaatgttccgaatgatacaaagctttcaaagattaaaacgctccgactagcaatctcatacattgcacatctactagcagtcgtgaacggcaaccaagatccatcctgcgacttccgagcggaactggtaccctcatcaagaaagataaacgcggaacgaagggcgcagaaaagtatgctccaaaacctggccaacgagggaaagaaaatcaaaggcagaaccggatggccacagcacgtttgggcgttggaaaccaagactaccatcaagtgaaataatttcaaaatgtgcatttcagagacataagatgttcatcctatgattttaaacactaatctacgttgaatccgtgatattgcacttttttttcgtaaacaagtgatcagaaccaaatttgtaaataattgtttagttcattcagttgtttgtaccaatcaatgaataataaaaatctcgagtgctta

SEQ ID NO: 1365 - DNA, 1491 bp, Aedes aegypti
cttgcaccagcactgagttcgacgacggccgccggatcagtgcgtatttcattttcttgtagagcagtttagccacaccctaccaccatgtctgatgatgaagagtattcgggtgatgatcccgagttcatcaagcgccaagaccaaaagcgctcagacttggatgaacagctgaaggagtatatcaacgaatggcgtaaacagcggtccaaggaagaagatgaactcaagaggctcaaggaaaaacaggccaagcgcaaagtctcccgagctgaagaggagcagcgtatggctcagcgcaagaaggaagaggaggagcgtcgtgtgcgcgaaattgaagaaaagaaacagcgcgaaatcgatgagaagagacgtcgtctcgaagaggccgagaagaagcgtcaggctatgctgcaggccatgaaggacaaggacaagaagggaccgaacttcaccattaccaagaaggacagcaatttcggtatgtccaatgctcagatggagcgtaataagactaaggaacagctggaggaagagaagaagatttctctctccttccgtatcaagcccctggaaatggatggcttgagcgccgatgctctccgtaccaaggccactgaattgtgggaaaccatcgtcaagctggaaaccgaaaagtacgatttggaggaaaggcaaaaacgtcaggactacgatttgaaagagttgaaggaaagacagaagcagcagctgagacacaaagcacttaaaaagggtttggacccagaagctctcaccggaaaatacccgccaaagattcaagtcgcctccaaatacgaacgtcgcgttgatacccgctcctatgatgacaagaagaagctgtttgagggtggctttgatactctaaacaaagaaagcctcgaaaagcagtggtccgagaggaaggaacagtacgtcggtcgtcagaaatcgaaacttccaaaatggttcggagaacgaccgggcaagaaggcgggagacccagaaactccagaaggcgaagacgaagtcaagcccgaggatgaggaggttgaagaagtcgaagaagtcgtggaggaagttgtcgaggaagaagaagaggaggaggaagaagaagaggaggaagaggaagaggaggaagaagaggaagaggaggaggaggaagaggaagaagaataaatgttcgattgtcaacggtttccttttagagctattgattaagttcggaagcattatttttctactaccatttccatactattcctctaatcagcgcagcgagcacaacaactatcatgatgatgatgacatcaatatcgaagagctaaagcaacagaatgaagcagtgccagcagcaacagcatctactattatgactggaatcatctaaattaacatctttcatgaactttattattttacacattattttattatttaaaatctcattaaaatcaaataaaattatttattataaactacacgagctggact

SEQ ID NO: 1366 - DNA, 750 bp, Aedes aegypti
gcgaaatactcgggaatcttacttaaatctgtaataataagtgatctatctattcgacaaatttaagaacatttcgttaccgatgccaattgtagtgtggtgaaacaaaaaagtgataaattcaatgactcataagccaaggaacttaccaaatttgtaatttcttcctggcaagtgaaaacaaaagatgatccaagcagacatcattgaccagcgtaagcaggattcccattccaatcctcggaatccggatagagtagcaaatgaccgcttttgccccggtggtctccctacttatgattgctaggagaaccaagtagcagtcgttctcttgctcgtgatgatccagtttaccggcggatttagaaatggaaccacaattttcgttcgattctggaatggtgtgccgttccatcggtggcgtaaatatacctcggactgtactggaggtggcatcatatagacccaatacatcatgttgtatggatgaaggaactcccgcacccactaatacaggacatgtaatcacggcaatgtgtttcaaatgccataaagcgctatctagcatcggaacggcgactacggtgaaacggatttacacgaagaactcgaacgagctctgcggatcattccactgtgctgaaagcatctaaacagtactaggaacgccttcatgctatgtgaactacaatgtgattactcgggattatctcctacgttaggcgactcaggaattatatttcatcattt

SEQ ID NO: 1367 - DNA, 1846 bp, Aedes aegypti
acagtccacttttatgcttcacgtttcccacgactgaaaggcgaaccggcctggcactcaactcccgagacggggaccgatcgcaagaagttcaacacgcacaccattgcatcgctcggtttctttgctgagcaaacaagcaccggagttgagttcccttcttcaccctcgatggagtcactcgtgtgtcgttagttccgcactctaaacactgctcggagagcgcctactgtgaatgagagtgagttaccacactgctgctgctggtagctggtagccacagctacagcctactcgactttggactcgtcgtttcagtcctagagagacgctcgtgcggtgtaaatggctacagcggtgatcaagtagtccggtcactactgctagagagaaagagctggggagttcgacgacgggcttcggcgtttgttttaattgggcgagcgagcggtcgggtatcgcggcggattagcgtaataaaagtattgtagcagcagcggcgaaggcggcggcggcagaagcagcagcagcatccaacaaccgtcagtcgcggtgacgacggtgacagattgactagattaagaaacacgcgtaatcgtgttcagattcgacggacaagagtagacatcttcgcagagggatcgcaactccgtagaggcacccaaccatggctgtgttcggactggtctcgtcggtggccggcttcatcaaggtccggtacctgatcgataaggccatcatcgataatatggtgttccggtgtcattaccggttaaccagcgctgtgctcttcctatgctgcgtgctcgtgacagccaacaatctaattggtgatcccatttcctgcatcaacgacggcgctattcccggccatgtgatcaatacctactgctggattacgtacaccttcacgttgcccggccagcacgggcgaccggtgggcacttcggtagcacactccggtctcggcaacgagtacaaccaggagcgaacgtaccacagctactaccagtgggtgccgttcatgctgttcttccagggcctactgttctacatgccccactgggtctggaagaactgggaagagggcaggatgcgcatgatctccgacggattgcgtggcaacatgatcatcagcccggatgagcgcaaagggcgccaaagtcggctcgctaagtacctctacgattcactcaatacgcacaacagctactcgttcggttacttcatctgcgaagcactgaacttcgtcaacgttattggcaacatcttcttcgtggacaagttcctcggcggtgctttcctcacctacggttccgaagtgctcaagttcagcgacatggatcaggagaatcgctcggatcccatgatcgagatcttccctcgcgtgacgaagtgtacattccacaaatacggagcttccggcagtatccagaagcacgatgccctttgcgtcctggcgttgaacatcctgaacgaaaagatctacatcttcctgtggttctggttcatcctgctgtccatcctctctggactggccattctgtactcggcggccattgtcatgatgccgacaacgcgcgaggccgccctcaagcgtcgcttccgcacggccccggcaaatcagatcgagaacctggtccgccggatccagatcggtgacttcctcatgattcacctcctgggacagaacatcaacgtgacgtcctacagcgaggtgctgcactcgctgatgaaccgcctaaacgaggacagaactcgcgatacgccttcggcgccgtccaccctggagatggctcccatctatccggaaattggaaaatacggtaaagatactgctatctga

SEQ ID NO: 1368 - DNA, 6746 bp, Aedes aegypti
aggaaaatggaagatcagtgcctgacctcaccgcaagcccgggccgtgctccgcctggtccaatgccctcctcgcaccaacagcagcaacagcccggccagggcatcatgcagcaacgcaaccagtatggccaactgcagcagggtggcagcggaggagagcagcgaggtatgggcggaccaggtcccggagggggaggcagcggcagcgggtccaacaaggaaccagtattactacagggcgacttccggaaggtgtccggcatcagttcggagatattccgccagatcgaagcggtggaaaacgaccacgatcccagtacggcggcagcactggaggctgtggaaagacgtggtgaaatgatagtgcgaatcctggaaccccgctgcatgggaagtcgacaggccgtcgaagctggacagaagtttctcaacaaagccgacgcacggcacacggttcagcttgtggaaatcgtcaaacgacctggccaaaccctggggttgtacattcgcgaagggaacggtgcggaccggtccgatggtgtgttcatctcccggatagctctggaatcggccgtctacaatagtggatgtctgagggtgggagacgaaattttggccgtcaatctggtggacgtaacgcggatgtcactggacgacgtagtcataatcatgtctataccgagacgtctcgtgttggctatccgacaacgtcggggttcccgcggagccaactcaccggggccacctcaaatgtcccgtccggagcagaaacccccgccagtggtcgtcatcaagcgagaccttcgggatgacgatctggacgattcggaccgcgcaccacgctcatcgagatccacccgagtccgccgaatgggtgatggccgcgagatgacccagtcccactcccggatgggactcggcataaacagctacagcccccagagcgagcaactggatttgtactatggtccaaggcagggacaatctgtggaaacaccaagctggggctacaaaccaccgccaccgccgtcagtcatcacagaacaaccgaagggaacgcacggcttccaaacttcgcactcgtactatcagaacgccggaacgctggaaagtctcgccgagaaggtgcactcattctaccccagcgccaaccgacggatgtcagccggtactggcgtcacaatgtcgcaatcccaccaacggtttccacggagcggttccgatcaacacttgccacgagtcgaatacgcagattaccaatcgctcgggagacacacgctgctacggtctagcctgaagtcagacctcgtccaggcagctcccatcgccggcggtacccttgaccgctacggacgttacgaaccaccaccgtcatcacgcacaccgaaatatggtccgtcaccgttgggcgccactggatccctccagaggcgttcccgtccggcgttggactactcaagcgatacggaagctaccatcggtccacggcctagttattactactacaaccacccagctatggcgaacacgatagctcgcggtagtacgcaagccctcggaggtggcccagagtatgccaagttcaattcgctcccacgcgatcgacccggatcccgcatgggtctccgcagtcgcataggtgaacgactgcaggacgaaaatgatggaaacctttcagctcccgagtactcactgcccatccgaagggatccccgagatctgcgccagcgtctgaccgccagtccatcgatcttcacctcggatgaataccgagcttggctgcgacgcgctccaagcagttccgccatttgcgaacagatgcgagcctcacgcgacatcctaaatcaacagcgagcacaccggttctcctgttccgccgaaaacatccacgacgtgctgaagaacaccgaaaacatctacagcagccggacagcactcaccggcggcactctagatcggcacggtctaaccggagccggaggtccccgtatgtcttcactgccggtacggtctatgtcttcgcagcacatcggaccgtcgtctatccgttcacccagcgtccggcggatgcgacagctactggaactgacccaggccggtccaggtggtgtgcccggatctgccatggcagctctcaccggccaccagagccctgcaccgacaccgagcacaacactgccccgcacccaccgccagatcgacatcaacccggccgagtacaccaagtacaagctagacaaaccagtggttgacgccatcggaatgtccggcatgctgtggatccatctgcttgccggtcgcggacttcgggccatgtccgaaacgtcccaagcgcagcaaccgatgatccgggacctgtactgcgtgctggaatgcgaccgtatccacaaggcacgtacagttgtgcgatcgggtgatttgcagttcgactgggatgaatccttcgagctggatctggtgtgcaacaagcagctggacgttctcgtatactcgtgggatcctcaacatcgacacaagctgtgctatcggggtgcactgtcgctcactactctcctacggcagtcaccgatccatcagctggcgctgaaggttgaacctcgtggaacgatctatttgcgcctgcggcacacggatcccttccagctgtaccggcgacggggattgcccagcctgcggggtaacgtgccagccttgttcggggccgacctggaaacggtagtgacacgcgaatccaagggtgctcccggcagtgctccagttcctatcattctgcgtcgatgcgtcgaggaagtcgaacggcgcggtctggacatcatcggcctgtatcggttgtgcggatcggccaccaagaaacgattgctcagggaagcgttcgagcgtaatagccgagcagttgagctcacgccggagcacgtcccggatatcaacgtaattaccggagttctcaaggactatctccgtgaacttcctgaaccgctgtttaccaagtgtctgttccaaatgacggtcgatgcgttaggtagtgtctgcctgccagatgacccggaaggaaatgccaagctgatgctcagtattctggactgtttgccaagggcaaaccgggcaacgctggtattcttgctggatcacctgtcgctagtggtgtccgcgtcggagcggaacaagatgtccgcccaggctctagccacggttatgggcccaccgttgatgctgcactcgtccagtgccggcccgaacgaggagatcgatcacgcacaaccgatcgcagtgctcaaatatcttctgcagatctggccgcagccacagcacggccacgtcggtggtacttcaggtcggcgcggcgagccagtagagccgcgtggaaacaaagccagtgcgttgccagtgggcaaatctccggctctacacccgtccctcccatcatcattgggggcggccccactcagcctcagcagcagcagtctcagtctcagctccaacaccagccatcgatctcagctccatcaaccgtcatcggcggcagcagcggcagcggcggcggcatcatcctccctgtcggcggcatcggggacagcggcagcggcggcggcggaacatatctcccgttcagtagccagcagtccatcaacaacctccttacaacacggtccgcgtccgctctcagccactcccagcagtctacagtatcaatcagtagtggctcagttagctcaatcccatcgagcctcgccacaagcggtcccacagccccatctattggagggctcagcggcctcggcggagcacggccaatcgccacgtcacgtcacaccctccccaagctctagttccacctcgtcggcgtccggatcgggttccggtactgataccatcaaacgtggcgcatcaccagcttcggttaagttcaaagaatccggcagtagctattcccttaagtcggacacgagccgcatcctcagcagtagcggtagcctggcaaagaagtacacccccaatggagccggcaacggcggcgaacccatagccaatggatcctctccatacgagcaccacccgccgtcgtcttcgtcgtcgacgcttcttggcaacggcaatggagctattcgtaagcagcagcagcatcaacgtgacggcaatggtagcactagcagcactatcaacaatggaccaaatatctcctcatcatcagatctacaacttccatccagaagtgttcttttttcatcggattacttatcatccacatcgacctcctcgacatcagtaacaacagcaacgacggcagcatcagtaacgaagccaatggcaccactgtcaacgctggacgtggcaacgttcagtctggatgagaagaacaatttggtggtatctccgtcgccttcgtcagcatcggagtcatctcatcattcgtcgaactcttcgctacgcgaacgatcaccacagccatcgccttcactgaagcgacaggagcctgttgatcgaactgatagtgtcacaagtaccagtacgggcggttcaagcttgttctcttcgctgcgcagtcaaaccctcggcagttaccagtttccgtcgagtacgctgaagttgtctagtcagttgagcgccgattcggccacttcttcggcagacgatggcagcacgtcgtcgttgcttcggaaactcaccacatcgttgtcgagatccatcactagtaatacaggcacattaccattatcgttaggtagacaaagcgctagtagtgcactatatcagcaagacataagctattcaggcggcagtagtagtggtaaatcaacgagtgcttctctgaattacgcaagcccagccggtggtagtagtttattgagcggtggcgaaggaaatgggagcagtgcggttaccacggcagcggccgtcagtagtatgagcatctacggaactcttccgaagaattcgtcaatttattcatatggcggcacttcgtccagtttactgacgggtacgtccagctcatatggcataagcgatagattacgggcactgactggaagtgggagtggcagcgcaggagaggacagttccagtggtttgggatctagcatgacaacgacaaccacttcgtctagctccggagtggacagtggagccggctccagtgctgccgatctgggcgctagtggatatgactacgagtcatctggattctcgtccactggattgacctcatcctacggtgccacttctgcttccccttctgtttcgatgactacgtcggcaggctctgggctttcgtcatcgtacttcagcaccggaagcggtagtagtccttttggaggaaatggcggtgaaactactagcagtagtggtcctccgacgtatcgagtgcaatattcgtcaacgaacccctttctacctagttacaatcctccaagcgacaatggcgccggcgctacaggtaacggcgttacaagcgggcgtaacggtggattaaggtcttcggacgaagacgactcgttcgatatgaaataagatggaaccgtaaaacagttgaactcgaacagtattagtcaaactgtagctgaccaggagtatctagaactctctttgttaactgtggattaggataattaccagtaccaactaacagaaccttacaatcaacttttctcttctttcatacgatgcattttttcccagacaacaatacaatcaaaacgaaggcatttcttttttcaagtattcagcactgtatcgtttacaccaaggcggtcgcgtgttttcacacgtccgcgaaactccttttctaggttacgttttatcgcgaaagttacaggtttacatatactaccaaacaggcaaaaatacaaattttgcagaaaacccaaacgtacttatgcattatatagctgtattgtataccgacgggaagaagtagcatctgcaaacggcaacaagatcattataaggttatactaatgaacgtgtgcatttgatacgctttacttgtcctttcgaacaaaagaaaaacaaaatccaataatcgatgaaactgctttaaacgaataccaacaacgcaaagcccaaaacacaatttcacacgaacacagtcacacatctgcaaggaagaccatcgttaagaaaaaaaagaaacacatttaaacaaatcgcctgctattgttcatggaacgaagcgcgaggcaaaaaaaaaacaaaacaaatcgaaaacaataagacgaaaaagaacaagactaacttttacattgattacagttattgagcaaaggaaaaataagagaattaacaaaacattagtcgatcggtaaatctctctcacacacacacattcaaacatagacagattgatcacaaatttgctgaaaactcgcgctttaaaactgcccgaacactgaaaaacgagagggcaagtgtaaaatatgataaccacaacgacattagagtaatccggttttatggagatcacttgtattccatcacaacacccagatcgtttttcctcttcaagcaaaactatgtacagaaacaggttgcatttcaggaaatggacagttcaccaagcgtcataccagcgcggaaacgggaatggaatcattttaaggtcggttattagaagatcaatttgttgaaagtagaatggataattttagggtgatatatgaatggtttggtgaggtaaggtaaaataacactatcgaaactgcaacggtcgtctcattgattgatttgatttgactttattaacgagat

SEQ ID NO: 1369 - DNA, 965 bp, Aedes aegypti
cattcaacgacctactaataatcgaacgactgactagctaaatgtctcgtctctgataacgacactgtggaatcctcacttgaaaggcttgcgataagtacccagctcttattaccagcaatcaaaacgatagacggtgtagtgcaatgtcacgagagaagctcatttcgacaacgacagtggctctttatgggctgctgctggttcagttgattagctgctgcagtgccgaggagactaatagcaaaatggtgaacgttcaggcggcattctccgagcacgaagttgttcccgatgtggtggatgcagctccgaaagaactgttgaaggtatcctatcccagcggtgtatttgccaacggaggcgatgagctcacaccgacacaggtgaaggatcaaccaaatctggaatggtcggccgatccaaatgctttctacaccctgttcatggtggacccggatgctcccaaccggcaagatccaaagttccgctccgtttgccactggtacgtgggaaacatccccggagataaggtcgaccagggagatcatcgcattgcgttcgtgggatcagggccaccccaaggcagcggacttcaccggtatatcttcctggtgtacaagcaaaccgatggacgggttgacctatcggaggcaccgcgcacttccaatcgaagtcggaacaaccggctgaacttccagcacaaggactacgtgaagaagtacaacctgggcgaactcgtggcgggcaatttctatcgggcacagttcgacgactatgtgccgaccctgcacgcccagttgtcctctgggacggagtaacacaatgcaaattaaatgatgaactcattaattttttgttttaaattatggagacaaggttctcaattttaaccattctttcaaattctctacaattcactttttaatgtaaaattataataaatattttgaggcaaaatctaa

SEQ ID NO: 1370 - DNA, 1575 bp, Aedes aegypti
agtccagctggtttgtgtgatttttaagtagtagtagttcatcttcggcttagttctgatgtgaagtgctatccgtcccaggtccggtttttgggtgtccaatttttgtcctttcggcaccacttcaaagacatatcattttgtcgaagccagaaaatagtgtttggagattctgaaatttacattccattttcaaagcatccagaagatcaacaagcatggctagtacttcaacagacgcaaaacagtttccactagtccccaagattatcaacggtggcattgctggcattatcggcgtctcatgtgtatttccactagatttggtgaaaacgagactgcaaaatcaacaggttggcccaaatggcgaacgaatgtataaatctatgtttgactgttttaagaaaacctacaaagtggaaggttattttggaatgtatcgaggttctgccgtcaacattcttctcatcactccagagaaagccattaaactagctgccaacgactttttccgacataatctgagaacgaaagatggaaaattaccaatcacgcgccagatggctgccggaggactggctggactttgccaaattgtaatcacaacaccgatggagcttttgaaaatccaaatgcaggatgctgggcgtttagctgcacaagcaaaggaagcaggcaaaacaataccaaaaacatcagcgacgcagatagccctagaattgattaaaactaagggcattacgggcctatacaagggtacaggtgccaccatgctgcgggacgtatcattttcggttgtgtatttcccgttatttgcaacacttaacgatctcggtccacggaaggcggatggttccggtgaagcagtattttggtgttcctttttgagtgggtgtgctgctggctctttagcagcactggctgtgaatccatttgatgtcatcaaaacacggctacaagcgcttaaaaaagccgaaggtgaaatgcaatttaacggtgttgctgactgtatcaaaaaaacattcgttaatgaaggacccaaggcattcttcaaaggaggactttgtcgtatgattgttattgctccgttgttcggtatcgcgcaaatggtgtactttttaggtgtagctgaatcaattttgggaattaagcaaacaaaagtttaagtaaattcattgtgccagaacaaaattgaaatgaaacaatttgaaatgctaaggtcaattagctagttaaatcattgcgagaaattgtagacgacccatctaaaatatgaaaatatttccaaagcagcattttaatcattgcattgtatgtgaacagttgatctgtgttaaaatcagaaattgtatgacgacgtgacgtccaacgtagaactgttgcttcaactattattgtgttgtatgtaagtacagagcatatattggtatttcaacgaaattgactacgaggtataaaatactagtgtaaaagttctcctaatgttcaatgtgtataattggccatacataatgtgtgcctgcaaacgtaataaacgtgattgatgctgacaataaaattgtaactgcaagcttc

SEQ ID NO: 1371 - DNA, 5445 bp, Aedes aegypti
gctcctaagaaaccagtgcgacgagcaggcgtgaaacctcaacctgaccgaccagtaagagcgctgttctgtttgacactgaaaaacccgctccgaaaactgtgtattgatatagtggaatggaagccattcgaatacttgatcttgttaacaattttcgcaaattgtgttgccttagctgtttatactcctttcccgaatagtgattcaaataccacgaatgctgcgttggaaaagattgaatatatttttttagtaatttttacagccgaatgtgtaatgaaattaattgcatacgggtttataatgcatccagggtcatatctgagaaatggatggaatattctcgatttcactatcgtcgtcattggaatgatttccactgcattatctaatttgatgaaagagggatttgatgtcaaagctcttcgagcgtttcgagtactgagacctctgcgattagtgtcaggagtgccaagcttacaagtcgtacttaattcaattctccgtgccatggtgcctttactacacatcgcccttttggtactgttcgtaattatcatctatgccatcataggacttgaactgttctccggaaaactccataagacttgttttcataacgtcacagatgaaattatggatgatcctcatccatgtggagatgatggattccaatgcgccagtatatccgaagatatggtgtgccgctactactgggcgggtccgaattttggcataaccaattttgacaatttcggactttctatgctgactgtattccaatgtgtaacattagaaggctggactgatatgctctattacattcaagatgctatgggcagcacatggcaatgggtgtactttatatctatggttatattaggtgctttttttgttatgaaccttattcttggtgtcttgagcggtgagttttcgaaggagagaacaaaagcaaaaaatcgtggtgattttcaaaagctgcgtgagaaacaacaaatcgaggaagacttgagggggtatctagattggattacgcaagcagaagacatagatccagaaaatgaagcaaacgttgtacaagagggaaaaacgatgacagcgaacgaaatagattcttccgatcatatgggagaagaaggggaaattcaacaggaatcttggctggcaagaaaacgaaaaaatatagatcgcgttaatcgtcggttacgaagagcctgtcgcaaagcagtcaaatcacaggcattctattggcttatcattgttctagtatttttgaataccggagttctagcaacggagcattaccagcagccaccatggttagatgactttcaagaatatacaaacatgttcttcgtggcactgttcacaatggaaatgttgctaaaaatgtacagcttgggatttcaagggtatttcgtgtcactgttcaatcgattcgattgtttcgtagtcataggaagtattggggagatggtgttgaccagtacacaaatcatgccaccactgggagtctccgtgctccgttgtgttcgacttttacgagtgttcaaggttacaaaatactggcaatctttatcgaatttagtggcgtcccttctcaattcgattcaatccattgcttcactcttactgttgctttttcttttcatcgtcatttttgccctattgggaatgcaagtttttggaggaaagtttaatttcaatagtgagaccgataagccacgatcaaattttgatagttttgttcaaagtctgctaactgtgtttcagattcttacgggtgaagattggaatgcagtaatgtatgatggtatacaggcgtatggaggtgtagcatcaattggaatattagctagcatttattttataattctttttatatgcggtaactatattctgttgaacgtcttcttggctatcgctgtggataatcttgccgatgcagactctttgacgacggtcgaaaaagaagaaggtgaaggagaagaaggggccgatgtagaaaaatccggttcacatgaaggaaccccattgggtatcacagacgatggattcatggagcacgacaaaaacaatttggattcggaaaacgaaatgaatatatctgaggattatgaacacaatggttcagaaaccaaaatgacgttgccagacgacgatgaggattatcaagataaagaatataatcttgcacgaccacgacgtatgtccgagttaaatgtagctaataaaatcataccaattcctccagggtcatcgttttttattatgtctcaaacaaacaggtttcgagtgttttgtcactggctatgcaatcacagcacatttggcaatataattctagtttgcattatgttttcatctgctatgttggcagcagaagatccgttgaacgcaaattctgagcgtaatcaaattctgaactattttgattattttttcactacggtttttaccatcgaacttctactaaaagtcatttcttatggattcctgttccatgatggtgcattttgtcgatcggcgttcaatcttctagatttactagttgtatgcgtctcgctgatatcaatgtttttcagttctggtgctatatcagtgatcaaaattcttcgtgtactaagagttttgaggcccctacgtgccattaaccgtgcgaaaggtttgaagcatgtagttcaatgtgttattgtagcagttaaaacaatcggaaatattgttctagtaacttgcctactacagtttatgtttgcggttataggagttcaattatacaaggggaaatttttctcttgctcagatggatcgaaaatgcaggaatcggaatgccacggaacttacttggtattcgaaggtggtaatgtagataaaccagtatcgaaagaacgggaatggtcgaggaataggtttcatttcgatgatgtttctaaagctatgcttactttatttactgtttctacgtttgaaggatggccaggactattatatgtttcgattgattctcacgaagaggattccggaccaattcataactttagaccaatcgtcgctgcttattatatcatatacattatcatcattgcattcttcatggtcaatatcttcgttggtttcgttattgttacattccaaaatgaaggagagcaagagtataaaaactgtgacctggataaaaaccagcgaaattgcatagagttcgcattgaaagctaaaccgatacgacgatatattccaaaacacagaatccagtataaagtgtggtggtttgttacatcgcaaccatttgagtacatgattttcatacttattatgataaatacaattactctatcaatgaaattctaccgccagccagaaatatacaccgaagttttggatttgctcaacttaattttcactgcagttttcgctttggaatttgttttcaaactggcagcatttagatttaagaactatttcggcgatgcgtggaacgtattcgactttataattgtactgggtagtttcattgacattgtttactcagaagtgaacgtcagcaaaggcatgaaggtaggtgtagtgatttatttatgttgtactctattgtatagctcaggcggatccagcataatatcgatcaacttctttcgtctgtttcgtgtgatgcgattagtgaaacttttggcccgtggtgaaggcattaggacactcttgtggacatttataaaatctttccaagcacttccttacgtcgctctgttgattgtgatgctcttcttcatctatgcagtaattggaatgcaggcaactgtattcggaaagattgcaatggatgacgagacatctatccatcgaaacaataatttccaaaccttcccgcaagcagtattggtactattccgatcagccacaggcgaagcatggcaagatatcatgctggactgttcatctcgacctggagaagtaatgtgtgatccacgatcagatgacgccaattcgccggagggatgcggatccagtattgcattcccatatttcatatcgttttatgtattatgttcatttttaattattaatctcttcgttgccgttattatggataactttgattatcttacacgagattggtctattctggggcctcatcatttggacgaatttgttcggctatggagtgagtacgatccggacgccaaaggaaggataaagcacctagacgtcgtaacgttattgcgaaaaatttcacccccactagggttcggaaaattgtgcccccatagagttgcatgtaaaaggctagtctcaatgaacatgccgttaaacagtgatggtacggtgttatttaatgcaacattgttcgctgttgttagaacttcgttaaaaattaaaactgaaggaaacattgatgatgccaatgcggaattgagagctaccatcaaacaaatatggaaacgaacagctccgaaactactggatcaggtagtcccaccgccaggagtagatgatgaagtaacggtgggcaaattctacgctacttttctcatacaagactactttaggagatttaaaaagcggaaagaaaatgacaataagcacgtagactacgacaatagacgcacaatgactttacaagcaggcttgaggacacttcatgaggcaggtcctgaattgaaacgtgctatctccggtaatctagaggatataggagacgacaatccagagcctatgcataggagaaatcatactcttttcggtaatatgtggtcatcgatacgaaggccaggccagttcccgaaaaagggaaacaatgtagctccaaaaacgtctgccacatctgcagcagcgacagccgcaatgcatgcagtgttatcaggggcggaggcgtacaaagctccgtattgtcaaatcaacaatggtttcaaccgtatggcgaaaaatgaaccagcacatgacaatattccattgtatccattgctgttagacggtagcaacacagcacaaactggacgtgtttacaacgcaaatgaactatcgaaggaaaacaaattaacaacaagcacatctgtgacatctacgaaatctacgacgacggtactgaacgacgatgtagagtcaaattcgtcttcatcaatacgtcgaagaaatagactaaacttcaataacatgttgatgctcatggtagatgataaaacaaaagaaaaatattgttacgacaggaacttcataccagccagagtgatacactctacaccaagtagcccacaggacaagagaactaaatcgatagaagtgatcggatcagcagagagcctcgttggtcgagttttattagaacaaggattaggcaaatattgtgatccagaatttgtgcattgtgctcaaatggaaatgcaagaagcgcttgagatgacgcaggaagaaatggacttagcagcacatgaactgatgcttcaagaa

SEQ ID NO: 1372 - DNA, 2092 bp, Aedes aegypti
atggagaactggggcctgatcacctaccgggaaaccgccctgctgtaccatcccaacatctcgaccgccaacaacaaacatcgagtggcgtcggttatcgctcacgaactcgcccatcaatggttcggcaacttggtcaccatgaagtggtggaccgatctgtggctgaatgaaggtttcgccacgtacgtcgccagcttgggcgttgaatatctgcatccggaatggcactccctggaggaggaatccgtcgataatacgctgggaattttcaagttcgatgccctgaccagcagccaccccgtttcggtcgagatcggacaccccaaccagatctcgcagatattcgacgccatctcctacgagaagggatcaactgtcatccgtatgatgcatctcttcctcggcgaagaaaccttccgcaatggagttcgtcgctatctgaaacaacacaagtacgccaacgctgaacagagcgatctctgggctgcgctgaccgaagaagcccgcatcaacaaggctctgccggaagacgtcgacgtcaaaaccgtcatggagtcgtggactctgcaaaccggctacccggtgatcaccgtctctcgcaactacgaatcatccactgcggagatcacgcaagttcgcttcctgtccgatcgcgaacaacaagcgaacgcaaccgactactgctggtgggttccgctgacgtacgtcacctcggagaaccctaacttcgaagacacccgcgccaaggaatggatgatgtgcggcgccggcaagctgcgcaagggaccgatcaagcagttgcaaaagatgcctcccgctgatcaatgggtgctgttcaacgtccagctcgccgggctttacaaagtccgatacgacataaccaactacaagctgctgatcaagcagctcaacagcgaacagtacaacaccatcagtctggcgaaccgcgctcagttgatcgacgatgccatggacttggcgtggaccggagagcagcagtacggaatcgccttcgccatgatcaactacctccggcaggaggtggaatacatcccgtggaagtctgccctctcgaacctcaacgcgatcaaccgtctgctcaagcgcacgcccatctacggagtattccgaagctacatccagttcatcgtcgaacccatctacgagaagctgcagatcttcggcgatgatcgaaccgtcagccaacgactggacgctaccaaacagctggttcaaatcgcagcctgggcttgcaggttcgacgtcggagattgcgttcagcgatcagtagccttatttgccaagtggatggccgtgcaggatccggaagttaccaacccggtcccgaaggacctccgctcggttgtgtactgcaacgctatgcgcaacggcaaggaaccggagtggaacttcctgtggcagcgctacctgaagagcaacgtcggctcggagaaggtcatgatcatcggtgcgctgtcctgcacccgagaggtctggctggtcgaacgcttcctgctgtggtccttgaacagcacttccggtgtgcgtaagcaggacaccaccatcgtgttcggcggagtcgccaagagcgacgttggtttccacctggccaagagtttcttcctggagaacgtcgaggaaatctacaactatctttccccggacacatcccgcgtgtctcgcttcatcaagcccctggccgagcagatgtcctcgatgaaggagctccaggagctcaaagacctgatcgaatccaagcggaccgtcttcgagaaggcaacccaaggcgtcaaacaagcgctagaaacggtcgagatcaacctgcagtggaagtcgcacgggtacacgcagatgacgcggttcctgccgctgctgaactaccggtccggcaatctggatgtgatggagctgctggactgatccgtgggtgcaccgtggccggatcgagtccggtgtttgttttttttagtcacctagtttgacacagctctcgttgtttttaaaagctcgcacaaagcgatcgcacgcatttcgccgttgtactttttagccattttgaacaattgaaaataaaaatttgccgaaaatt

SEQ ID NO: 1373 - DNA, 596 bp, Aedes aegypti
atgtcaaagcttcttctgaagaaaacgactctgaaaacgagaaaccgacgctcatggattcatcaagaaggcagatttttgtggctccagtggtctgcccttcgggacaaaaaccggatcatcgtggaagatgccgtccagtgtggtccatgtgaagttgttcaagtcatttgaacgttttagaatgttatacatgagctacgtttggcgagttcacgataatggcctgataagtgtatcccccacatctattatctgcatatataagttatgaaaaaataaataatcgcgcataatgatgtttctgatctcctagtattttgaaagatttatccgagtttacaaacatctgaaaaaaaaaactgctccatggaatacttaaagcagggttgctcaacgtacggcctgcgaagagtttgaagattcgcctcacatctgctccgttgattgttctaccaactcgaagttagatcataccaaatccacttattactctttcctttaattttatttcattttcaagctaaacttcaacttatttttaaatttgaaaatgagtaaattttcattaattatccactttttcagaatttgaa

SEQ ID NO: 1374 - DNA, 920 bp, Aedes aegypti
acaactggtagaacatgttctgctaaataaaccagtgaaaatttaacttttaacatttaatttaatatttaatattttatttaatatttaaaactactgtgataaattcagtgacatgttggtccgacgctttcacagctcatctctcgcattgggaaaagtggtgcccacaaatttgaaaggtaaatccaagagttcacagcaatggctctcgaggcagttgaatgatccctatgtggaaaaagccaagatgctaaactaccgatgccgttctgccttcaaattgctggaaatcgatcagaagtacaacatcataaaacctggccataccgtaatcgattgtggagcatcacccggatcttggtcccagatagctgtacagcaatcgaacgccagtggttcccaacctggcaagccaaggggaatggtgatcggagtagacctgctgcagatatatcccatcgagcacgcgacaatgctgggaaacaccgatttcatgaagcaggaatcgcaggacaaaatacgcgccctcttgggcgaaaggcgagtggattgtgtcctttcggatatggcacccaatgccactggggttcgatctctcgatcaggaaaatataatcaccctctgctattcggtgttgcgatttgccattctgatgtcttcgccgaacgcctcgctgctggttaaagtctgggacaacggagaggttccgctgctggagaaaaacatgcaaaagtactatcagcaggtcaaacgcatcaagccccgggcgagccggagtgattcggcagaaaatttcatattagctcgtgggtttaccggagtggagcggtaacaggcgaattgttaactgtataattgtaagtatgtacacgaacctttagataagcagtaatcagttagaagttgtttctaaacct

SEQ ID NO: 1375 - DNA, 1757 bp, Aedes aegypti
ccggcttgtggaataccttcctatcgtttgcctatcgatactttcgctttccagtttttttgttatttcggtggcttatcacacataaaccgtccgcgcgatacctgctatacagagattaagaaccaccgaaacggtgcaagtatcagttggactttgaattctgttcgagccggttctgttttgtttgcaacagcgccacgatgggattcgctgggcggtttgtcttggtgacgttcaccctgctagtaggagtgctgttcaaggttttccaggatctatcggccccagctgcaattccggccatagactaccaggaatactggggtcctggagatgtgaaaaacaacaaggaaaatgttgaagtgaaatcatttgagttgaactacggagaggacgttattgggaagctaaggaacaggttggatgacgtcccaaaatttgccgaaccgttagagggcacggctttcgaatatggtttcaacagtaagaaactaggagagattttgaaatattggcggtcggattatctcgagaggtgggatgaacgccaaaaatatctaaatcgcttccctcagtttaaaacgcaaattcaaggattggacatccatttcctgcgcgtgaagccggaagttcgaaatccaaaacggattgttccgttattaatgctccacggttggcctggttcggtgcgagagttttacgagataatcccgaggctggtcgctcgaagcgatgataaagagtatgtttttgaggtaatcgtgccaagtttgccgggctatggattcagccagggtgcatcgaaacaaggtcttagcccagcaaaaattgccgttatcatgcgcaacttgatggcccgtctcgggttcaaaaagtactatgtccatggcggcgattggggatcagttattgggaacctgatggccactttcttccaggacgaagtattaggcgtgcacttgaccatgtgcatgaatactgcacccatcggtactctgaagaatattcttggagcagttgccccatctctggtcgtagaaagtcaatacaaggacttctactacccatacttggatcgcttgaagctgctcatcgcggaaactggctacatgcacattcaagcaaccaaaccggatacgatcggagcggttcttaccggaaatcccgtaggactggccacatacatcctcgagaagttttcgacctggaccaatccacagtatcgaagcttagcggatggaggactcgaaaagtatttcactctcgacaccctgctggacaatatcatgatctattatctgagcgactccatcaccacctcccagaggctttacgccgaaacgttcaatgtcaaagagctgtcccgcgaactggatcgcattccgacgcacgttccagccgcttgtgccaagttccggtatgaactgttccagcaaaccgattgggccctccgggatcacttccggaatctgatccaaagcaagcactatgacgatggaggccattttgtggccatgcaactaccggacgtcctttacgaagatatcgtagaatttgtgaaccgtctgtacagacgggaggatcaataacaagggaacggcgtgtaggctgaaaaaacgctgtgtagtttcattttatttccggggaaaatgatgaacaaatcaaattctagtgggatacaagtacgaaggagggattatgtttcaaatagcaaataggaagggattccaggggctcattcatttatttcataa

SEQ ID NO: 1376 - DNA, 1284 bp, Aedes aegypti
cgcgaagcgcatttttctgcttcgttattttgctcaacagatttcttaaatttaattttagtttttcctaaaaattgtaggtttaatagcactttttcaaatgcattaagttttgtaaaagcaataaacttgtgacgcttcaagctgaatcgccattagtgtttagccggccacaaaatggtccgtccgaagacttcccgcaatggaaattccaaacggaaccgcaccagctaccaggaagaaaaagtcaacgctaaattaagagattacgatattttggccgatagtttagtagcaaatctggaatcaattttcaatgacaaactcgaagagctgtcgctggcattcaaaatggagaagactcgtttccccaaacatgttctccagatgcggatgggcgatctccggctgataggggccagcacctttgccgatctggataaaattacgctggaaccaccggcttgcgatggcatgagttcgttgggatcgagccagctttccagcagctacaatacgggatccaagggcgagaagaaacaatcgcgcgccgatgaaggatatcttacagaggatagtgcaaccagcaacagaaactccgacctgctatcgtcagccaagggacggccctacggtcccctggcatcggccatgaaaaatagacgacgaagtaaatctgtttcatcgaattccactccctccaagcaccattcgtcggtcctgttcgggatcaaatcgaagaaaactttcggcggttctcaatcgctgttcgctgaaagtaatcgcctgtcgcgatccaaattccgaaccccggtgccgggcagcagactgaagcaaaccgtaagtgccgatcgtggtatgaccatgatcactcccaaagtacaacccaacacaccgatggccattatgcgccatgctcggctcggtgaaagcatctattccattaccggaagtccggtcatcaccgctgcgatggtggaagaaatggccaacgttaacattccgatccagaacggcatactgtcgcttcggccgaccgagatggactcgatcgatacggggttggtgcagaaaatcgattcggacactttggagcacctgaaaaagctacagatgaatctgaataagatcatgcagatggccgagggaaacaatttccagcagatgtaattttttcattcacgtttatgagctttaaaattttgaatcagtagactgttcttttttatgtattagttacttttcactcaataaatgtaattccaattgtgtcttaatgcaatc

SEQ ID NO: 1377 - DNA, 2883 bp, Aedes aegypti
tttttttgttcggtgcattttggttcgaggaattaacctacattccggctaagctcaactcaacgtgcactgctgtcaaaataaaaagtggacgagaaaattttatcacagtttttctgctacacgaagtcgattccagtatttacaaaattcctccagccaaaaaccgcaaaattcgttccgattttgccaacttgctataggaaaactatcgggcaccactgaatagtaagtagttcgtgtcccagcggcgaccgattccccatttggatggactaccagcgctaattccgtccgaagagtcaccaaaggatgattgacaacaacaataagagctcagcccgtcgcttcatcagctaattaaggtgcgttgcgggaagttaaattgcaagtcgtcttcattggtattctgccctcatcctggtggcacagaattcgcaactaggaacaaacacatcttgcgaaacgacaaattgccggggaggggatgagtagcagtcacagcgatgccgggtcgtccttctggaagaataactccggacggataccagggcgtcccacggccgcctcaaggatgccaggccctgctgtaggtccaggtggagccagttcgagcaactcgttccaagactaccaggaatcggtgagcgacgcgtgggacctgggagacgatgagttctgtatcatttccggcaccgtggatccgacgacggcccggatatcaaagaaggtgtcccattcggcggcactgaatgtcatcaagacacatcgcagtagctcggggagcggtgtggaacgaggtacaggaagattgaccgaggtcagtgtgcatcggggaagttccgggacaggcggtggaactacggttaccgggacgatgaccgtggtggagagtttggacggactgaagatcgatcggagtgtggcggagaaggcactggtgcaacgccagccgaactacgaagcgctgaatcatgttaacgaaaatcgttaccgacaaagattccacgcctacccaggccgtccacagctgctgaaactgtcgtccaatgtggcctcgaaggatgtcgagtgcgagtcgaagtacgaaaagttcaccaatatcctcgaagcacccctgttgaatctgatcgccctcaaagaactcagctggtccggaatcccccggaggatgcgagccgtgacgtggcgcctactgtctggatatctccctaccagcctggaacggcggaacaccgtgctggagcggaaacgagccgactacaagaagctcgtccagcagtacttccatgtagatagccgggacgaaatccagcaggacacgtatcgccaaattcacatcgatgtgcctcggatgaatccgcacgtgtcgctgttccagcagaaactggtccaggaaatgttcgagcgaattctcttcatctgggccattagacatcccgcctccggatacgtacagggtatcaacgatctggtgacgccgttcttcatcgtattcctgcaggagtcggtgggggctgaaaaagatctggaacagtgccaactaggggacctatcgctcgaacagcgggacatcatcgaagcggactcgttctggtgtttgtccaagtttctcgactgcatacaggacaactacatctttgcccagctcggcatccaggagaaggtgaaccaactgaaggaactcatccagcgaattgacggaaccctccatcggcacctgcaatcgcacggcgtcgactatctgcagttttcgttccgctggatgaacaatctgctaacccgcgaactgccactctactgtacgatccgactgtgggacacctatctggccgagtcggatggctttgccgtgttccagctgtacgtgtgtgccgcctttttgctgcactggcgcgaacaactgctccaggagaaggactttcaagggttgatgctgctgctgcagaatctgccgacccacagctggatggactcgcatatcggcgtcctggtggcggaagcgttccgcctcaagttcacctacgccgacacgcccaaacacctggagggcaaaagttgacagcaccacagcgagcgcaattacaactactgtaaaaactatctctataagtttatctaggttgggcgagtttcgtttcgctggattgattttttctctgacgttaaactattacattgattgtgatttatcttgtttcgtttgtttaattcgcatgttcgaatgagggaagggataaagcaattgcgacagaatttccacattctgttcgaagttagggcaagaaggaaacgtagttgaaagcatcatagaccaagacaactcgttagatatatctatgaaatacctagtataacaactaaatcaaaaacttcgattatcaaaattgaggaatcacggaacacattcaagagcagggaagggatggaaagaaatagaactgaagaaaatacgaaaccaattcgactaaattatgcaggtgcatgaaaagaggagcaaattaacccaaggttatcaaactttgaatcgattcaatgtaggttacaattttacttttatcacttggaagaaatatcggaaagcaagagagtagagtacgatacaaaaatgcaaattatttttttctagttttacgtagttttataatgatagaagatttatgtttaaaactgacaacaaccgaataatacaatgagaaaggaaatcaagtgtaaaacatcaggaaacatttaacaaccaacatatgaaaactggattaagaattaagaaaacgtttaattgataattgaaagtaattattggaatcgcatgataaattaaacaaatgaagatcatctgtatacatataggtaatcaataaacaatattatagaaaaataaaa

SEQ ID NO: 1378 - DNA, 1023 bp, Aedes aegypti
aggctcaaaactccagaagaacatgcccaatacgatgtattgattcgtcaattctgcactctcatctgcgacaaatgtggatttgcgggcgaaaatttctacaatttggagaaacactgcaaaaacgttcacgatcatcgaggctatgccacgtgctgtggacgaaggttttataaaaaacgacagttgtacgagcattgtcaacggcacgtcaacccggacacgttccactgcgagatttgcaaaaagtccttccccgacagtgagggtcttgaaaagcataaccaatggattcacacgccggactcggagaagcccttcaaatgtgagatctgtgattctgttttcatcaaggaatacttgctgaaaaaccatttgatgtatcaccttgccatagagcagaaaatctactactgcaaagattgcgatagacccttcggagcaccatcctacttgcgaacacatctggaggccatacatggtgccgcatcgagttgggtgtgcgatatctgcgcaaagggattctcgcacaaatctttcctggaggcgcatcggctttcgcacaccgaggaaggagcggctagtttgaagcgccaatgcgagcactgtaaaaaatggctcaaaaacgccaagtctttcacccggcatctgaagcgctgccaatccggtggccccgtgacgtgtgatgtgtgcggcaaggaagtggccaacgaggtgtccttggccagtcacaaacggttctatcactccgagcagccagtgtacccttgcagctactgcggcaaaatattcaaacgtttaattcggcacagggagcacgaagccaatcaccgtggagaggttctttatgaatgccccttctgcccttattcctgcaactccaactcaaatatgtacacccataagaaggcggctcatgctgaacagtgggcagcgaaggtggaggaacggttttacaagcgataacttgatttttgcagtttcgagtgctttaacaaggtaagaaatcttatattaatttca

SEQ ID NO: 1379 - DNA, 924 bp, Aedes aegypti
tgtcgggtgatggaagttgattggaataaactctgtcgtatgaagttctacagcgttccgatggctttagaacagcaggaaaacgttcgatttgcccgcacaattaaactttatccttgtctgtacgattttaccaacaacagatattcgagcaggacagaaactgacgctgcatggagagcaatttcagcagaattcaacgcacctgtacgagactgcaaactgcgatggaagaacattcgcactgttttccgaaggcacatgtttggaggcataggtccagcgcccaaaaaggagtactatttgaacagagagctcaggtttatgttaccgttcatgaaagtatcgaaaacccatcaagatgacacttcaaaattggaagatgacgaaacggaggtgtccgttatggtggaaatggagacgaacgatacggagtctaatgatccttctgcatcacgggctccatcggaatcacagattccggtaaacagccttcaggaatcgcatccagagcatcaggaatttcaaaatgatcctattcaaaggcataactatctggatcctgccaatgaagctgttaagtccacttacaattaccagactcgattaccatccagatcagaaagtgagtacggagagtacatgcaagatgatttggctgcaaaatcggatgaatttttcttgctcagtttgaaagatgacatgcgacgcatgaatatgacacaaaaacgcaaatttaaacgaagaattttcgatataattgatgaggtaatgatgggtgacgaactaacaacgaccaatagtgtgaatcgcgaatcaaccaatgaacagctagcgcaacagtcaatcgtgaaagtagaagaaaatgagttctgagttttgagagcaagttaagatagctttaataaatacattttgactagt

SEQ ID NO: 1380 - DNA, 2579 bp, Aedes aegypti
ttatcgatagtccatttgcctgagggtgcgaaaaattatcattccttcgaaaaaccttaagccttgaaattaataagaatgtaatttaacaaaaataagaaaatttcaataaggaaaaaatagattaagtagaagctttgtcgaaagacgtaattaaccgcgacacccccatgttacgtcccgtgtcactcatcgagcatcgcctgtcaaaatagttcactaaatcagcaacaatggccgaagctgtggaaaactgtttaacttgccgcagaaaaacagataatttcctccggacatcggacgattcaactgcggaaaacatcggggccattatcgccattcatttctggttccaggctgaccaatatgagcaccaagtgctgtgtaccagttgctgggaaaagatcgatgatttccacaaattttacaatgaagtgaaacaggtctggtccgacgagagtctacccagcagcgccgtcatcaagaaggaaaagttcaacgatgatacccaacccgaactcatcgcttgcgagttggtcaaggtggaaatcgacaaagcagaagagctggacaaattccacgatgaggacgacgatgattcgggcaaaaattatgttccatatgaagaatcggaaacctcagacgattccgaagaggaatccgcgatacccatagctaagagatgccgaagcgtcaagcgcccttcaaaggctgctaagcgtgataagccaattcgcaagaagcgccaagtcaacacccaacggactccgaaggttgtgaatcgaaaacgtaacattcattgcagggaggagtacccattccaatgtctcatttgcgatccggtaagagcattcaaggaaagcgagggtttacggttgcacaacgaggtatgccacacggaagagtcggagaaaaagttccagtgcgatcaatgcgagaaagcttttactagcgaatggcagctctccggacacaagagttggcatcagaagcagatcttgaatttctactgtgaaaaatgcaacaaacatttcgattcagggcgaacgttgaacaaccacatgcacgcaaatcatcctgaaacggtccctaaattcttaatgccaagcccactctcaaccggagacactgccacaactgatcagcaagctctagccccaacggaaaatccagcgaatacttcgcaaagctctcaggtcgcatccgattggaatccgaaaaatccagaggaaatagcacaacgcgatgagacgattcggaaattctgcacgctcatctgcgacaaatgtggattcgcgggcgaaaacttctactatctagagaagcactacaaaaacgaacacaatttgctcgggtatgcgctctgctgcaaccggaagtttttcaaaaagcgaaagttgtacgagcattgtctacgacacatcaatccggacatgttccgttgcgagctttgtaagcgatctttcatggacagagacagtcttttaagtcacaataaacgagttcacacgccagactcgcagaaaccgttcaagtgtgaaatatgcgatgcggctttccataaagagtatctgatgaagacccacatgaagtaccacctgtcattggagcaaaaaatttacaactgcaaagattgcgatcgatctttcggagcagcaacctacttacgcacacatcagcaaaccgttcacggtgccgcatccagctgggtgtgcgatatctgtgccaagggatttgcccacaagtggcgcctggagtcgcatcggctttcgcacacggcggaaggagctgccagcttgaagagacagtgcgacaactgtaagaagtggctcaagaatgaaatatcattcaaaaaccatctgatgcggtgtttgaacagcaatcccgtgtcgtgcgatctttgcgggaaggaagctgcaaatgagctggccttggccagtcacaagcgacttcatcacacggagcagccagtgtacacctgcagctactgcgggaagcagttcaaacgcgccattcggcacaaggagcacgaggcgaaccaccggggagaggttctttattcgtgtccattctgtccttacacttgtaattccaattccaacatgtacacccacaagaaggtggctcatcctgaattgtgggcggcaaagattaacgataagtactataagcgataatttacaactgggatgtaatttaacaaggttttaactaaaggatctctagtatcttagaaagcaatttaattatgattgacgaatccgaaatatttcagtcccttgttctgcattttgtgaagagtccgcaaatcgtccttcacttggtttactaatcttgctcgttgcatatcacttcattttgtatacatgattgataaaacttaattctatgttcgaatcattcggatttgaaaatgaaatataattcagtgtactttatactcatcacatttaacgttcaaggatccgacatcgtaatcatcgaaacttcaagatatgttttttctgttcaaaaccaaaaattactcgatgataatatgttcactgtgcctcggattgagtgtacagtgaacacatttt

SEQ ID NO: 1381 - DNA, 1475 bp, Aedes aegypti
ctcatttttcatttaggtaaatcggcatcatttgcaaacaaaccaaacaacaagaagatttaaaatactgctacctcattctatttatacaatttattcatttaataaagttgaatttttagaagtaggatttcattgaggcgccttttcagcatcgagatggaaccattcgaatccacaacacatatgtgtcgtttgtgccttcggaaatacagtgtgaaacagatggtgcatgtgtttgccaaggagcacgaactggatcaagcaatatatgaagctgtttcgataaagatgtatcaattggatgccatggctagtatttgcaacaattgccaaactattattcaaataatcaactgctttagagaagcctgtcagaaaagcgatactattttgaaaaatggcacaactacactagattctaatgcctggtcgagttcgtatgcaaccaacgtttttcatctaactgaaaaattaatcaagacacatcaaaaggatatggattttctgtacaaaaatcatataagtttaaaagaacaagcggcagcttccgaattcatagtgcaatacattaaagaagaagaacatatcgaaatcaatgattatggtacaggtcaagatgaaccagattatctgaattctactgtgcctgaggacacatctggaaccgatgataatatttcaagaactcaagaccaaacggaatcagatagtgaagcatcgaacaaacgaaaaagaaaaaagaaatcagaaaaccaacaggaaaaggtagtttgttcgacgtgtggcgagatggtaccgcataagggactagagggccacatgaatcgccatttgggtgtgagaccgtttccatgtaatgtggcaggttgcgatgctaagctgtactcgaagttttccctgcagcaacatcgtagccgacacaaatcgtccaaccggtatttcgactgcgaggtatgtgggaagcgaatcaaaggcaatgcatactggttggtacacaagaggatacacgaggaagaacccaaatattcctgcgatatttgcggtaaaaagttccaccgaaaatttaaactgaaggatcactcaaccgtgcactccggaatagcagactattcgtgtgaactctgcgggaaattttttaccgtcaaacacaatctcacagcgcactaccaacgccataagaaaaatggaacttatcctgatgggtttgagccgaacgcatctgtgaatgcttgaataataaagaatctttcatttaaaaattctatatactttttttcgtgtatagatatgaaaaattcttattagaaattgtttatgtaaatgaggggagatttttgaatctacttaatcgcatttgatttacatgttattgaacaaatgtatcgaaatctatcgttaaaattacattattcgtgatgttatcagcatattagggggattaggggcacaatgaacacccggggcgaaatgga

SEQ ID NO: 1382 - DNA, 1413 bp, Aedes aegypti
atggaacaaacggtaaagcaaataagtgaccgcttcccctgtcgagaggacgtgattcgccagctgtatcgcttctacggggacggtgatcctttcccgcccgcagtttacctgtacgggcacacttccaccggcaagacctcgatcttgcgagagttcctctctcatcacctggaggacaccaagtgcgccttcctgaacgccatcgagtgctacacgaacaaaatcctgttcgagacgattttgaaccggctgaccgaccacgttcccagtgcggacaacgggtatgcttcggtggccagtgccgattgtatgcgtgactttgtcgggcatctatcccatctgctggacgaagagctgagctatgtggtcgtggtggagaatgccgataggattcgtgacatggaccacaatgtgctgccgatgctgttgcgactgccggaggtctgtgggctgaacctttccgtggtgctggtgtcggatttgcccttcgagaagtactttgtccgaactgggctgtcgccggtgatcaaggtttttgttgcggagtacagcaagaaggacattaccgcgatcatgaagggaggattcgaaaaggtgcgagaagagatacggatcaacttggagcagatggctgagatcgacaaacggatcaatgtgctgatggagctgcccacagagttctacgacaactacctaaacatgttcctgaatgtgttcttcaaggtgtgccgcgatctcaaggaactgcagcttgtgtcgttcgaatgtttccaaaaatactgcgaaccggtgctggacgggtcaatcgccccggatgacgtgaccaaactgtggagacacatcttcaaaacgatgaagctggccctaagcacaatctacatgcgaatgggaagcgtgaaccaggagttgcttcgtcccactcagcaggaatcgtccgaatcgttagagcaagtgcaaactatgaagcggcttgctcgaaatctagaattgccgttctacgcgaagtacctgctcatagctgcctacctggccagtcataacgccgccaaggaggacaagcgactgtttatgaagaatcacggcaagcagaagaagcgactgcagtcggtcaatgccaaggcgaaggtatcggagaagatggccacccagttgggcccgaagtcgttcaccatcgaccggctgctggccatcttctatgccatactggacgagaaggtcggactgaactgtcatctgttggcgcaaatctcgactcttattcatctgaagttcctcatattcgcgtcaggcgagggaagcattatggatggaagtgcacggctccagtgcacagtcgggatggacttcatcacgcacatcggaaagatggtcgggtttaatgtgaggcagtatttgtgcgatttcttttag

SEQ ID NO: 1383 - DNA, 1001 bp, Aedes aegypti
gtcgcaaactctttccgcatgtgttgataggattcgggatagaaatcctgcgatattcctcggtttccgcgtccgaaactagtgcgaatcggttcgattggtgctttaagtgttatttccataactaggtttttgaacaaagtctcaaaatgcagcaggacgagatcgtgtggagcatcatcagccggcagttctgctcgtacatggtaaagacccaaactcagaacttctgccgcaacgagtacagcttgacgggtttgtgttcgcgtaaatcctgtcccattgccaacagccagtatgccacaatccgggaggagaacggtataatttacctgtatatgaaaacggccgaacggaatgcattcccggcgaaacactgggagaaggtgaagctttcgcgcaacttcgagaaagccgtccatcagatcaacgagaatctgctttattgggaccgatttgtgcggctgaagtgcaaacagagattcaccaaaattacccaatatcttatcaggatgcggaagttgaagctccgacgccagaagatgttggttccgctgtccacgaaggtggaacggcgagagcggcggcgggaggaaaaggccctggtcgcggccaagatcgacaacgccatcgagaaggaactgatggaacggttgaggaagggagcctacgaggacatctacaacttcccgcagacggcgttcaacaaggcgctggaagcggaagaagtggaagatgaagatgaggaggaggcggagagcgagatcgaggaggagctggagaaggagatggaaattgacgatgaggtgcagaaggaactggacatggatgatgagtttatcgagggcgattccgaggatgacgaggatgaggaggaggacgaggaagagggagatgaggatctggaagatgaagaatcggatgcggaaagtgaatctggtgttcgagaacgggtggaagtggacagcgattttgagtcgagcgaggatgaagatatcgag

SEQ ID NO: 1384 - DNA, 1434 bp, Aedes aegypti
ataacaagttctcaaacaaaaacaacgaaagtagttgattgtttttcgtaaatttcaagttttaaatacctcccgcctgcagtattttttggtgtgaacggaaaaattatgtaattgaaaaagctatgcattcaggaaaagtacaattcaaaccagtaagcagtaaatcgcaccaacccatcgagtgtcgcttctgtcggaccacggcgaccaatgtaagtgtggatctgttccagcatggcctcgctcaaaaggcggagaagtgcttctatctttcgattgatccaaccgatccactgcccaagaagatctgccaccagtgtaaagcttctctctgcgcagcgtatgcctttggggagaaggcccggcttgtggagaaggaactgaaactgaaatacggggaagccacggacgaggatttcttgaatgtcgaatacctccaggacgaggtcccatttgagtacctaacgtacgaatcggatccggttggattagcactggagaaactgaaggacactgcaatagttattaagaaagttccacccaaagaagttccgattgagcgattgcaggaatcgaagcgaatggatgggagtccagatagcgatgaagattgtgataagggagaaccggcaagaaagtacagaaaattcgagggggaaatcgttatcaacctgactggacctgtgccttgcatttgcatgtgctgttcaaaaacgttttcctccaaggaagaactcttgaagcataaggatgtatgcggtgaggacagttacatttgccgaaagtgctgtacaatttgtgacagcctggcggccctgaagaagcaccagcagacgcactacgattacaagtacaagcacaaatgcccatcatgcgagcaaatcttcaggaacaccttcgccttggacaatcaccgatcgaaggatcacggcgaggacattgaagagcgaggatatgtttaccggtgctgcgataaagagttccgcaccaggaaagcactccacgagcatgccgaaatacacgcagagccaccgcttgaatgcgccgtttgtggtatcaagtccaagaataagcacaccctgaggctgcacctccggatacacgaagactatcggccgtacgtttgccaggactgcgggatggccttcagaaagaagaatatgcttttccaacattcgcaaatgcacgctggagtgcagcttctcaggtgtgattactgtccgaagcagtttggtaagaaggagtcgttgaagaaccactgccagcggtatcacccgagtgaatcgatggactttaaaggccttaaactgggacagacccggaaaaggatagcgcaggatcattcgtaccaaggtgaggtcggaagggaggaagaggtcaaaacggttgaataatgaatgatcgtcaaacaaagtttgaatgtttgaaagt

SEQ ID NO: 1385 - DNA, 838 bp, Aedes aegypti
ctatttcgacctgcaatggatcgcttccgaacagccttttgtagtgttttgctgttaacagcaagttccgtcttttgtaccgcaaaccttatgggtagttctgggttcgactttgaattaccggaagtgagagtagaatctccactaccagtaagcacgtcgagcattcaaacgctggaacagctgagaaattcccagcatatctacggttcttgtgatgaggttccatcgaattcgtccggggtgtacagaatatacgccaatctggacgaaactgctgtagtttactgtgaccaagagtacgaaggcggtggttggacggtggtcatgaaccggtttgatgggtccgtctgttttgatcgccctaggaacaaatatcttggaggttttggaagattcgatagcggagaatttatgatgggactgaacctactttatctgctgacaaatctggcaccgcacgaaatggttgttctgttcgaagactttagcggtgcatctatgaagagcagagcggatcggtttatattaaatgaaggacaaagaatatcaacagattcaggtttaaacctagaagatttttcgagcgaatggagcgacaataaagatcctaacaacactataagattcaatctgtttggatactatagaaaaggaaatgtaaatgcaggaccatctgatatgcgatgggcggattcaaacaacaaccaattctatttaaaatcttgcagaattatgataaggaaaacaaaaacttcttaactgtgatagggattgtgcaaaataatggtaaaaataaaagtctccctgaaagtatgtattggaatgtatttagtac

SEQ ID NO: 1386 - DNA, 981 bp, Aedes aegypti
atgattctcaagctggaaatgatcacgaaagagcgcgaacggcacatggagaagctctggaaagaatttcaaaaggtcctcaatgcttacctgcgtaacactgaagagtaccgtaacgagtacagtaagcttcgcaatcaagatgcgaacgatacacgccacattcaaaatcattacattgaggtagctcgattgagcgagttgatctcgaacctcaggcagaagttggtcaccatcaaggacgagcacgaattcaacgtaaaacaactacaaaaaaccaagatggaactacaagagcgcattcggaacatcaaacaggagatggaaataggactgaaaatggacgatgacaaattgaagcaacttgcagtttgcggtcatggtgcgctcaagtatttgcagaacttgttgagacgcggaaatgccattttacagattgcaacgttctgcaagaagtttgaaacggaaaacgagagcttgcttccgtttgtgcatagcgccgtgaaacgacaaatgtttgaggtagacgaagacgaactgaaggaaccaactacagagtttgaagttttcaagaaagatacttttgggattgcaaagaagtttgaaaacttttggatgaggttcaataaggccagggtcgactgtgcatgcttgcaagaagagaagaaacaactgttggaagataatgagagattgaagaatcaattgaaagagtatctgattacggtcaatatgaataatggcggatcgttggagtcaaacgagacactgcttgcggaaagacccagctcgatgaaggtcgaaaaggtgattcatatcgacttgaagctgaagtcggtccggttcagcaaaaatggtaaacgcagacctgtgacttgtatcgagggaaacttgagcaatgccatccgcaatgacaaattgatggaaatgcgaagcaaacctaaccagttgtactcgctgatacgtcaatctacgtcgtaa

SEQ ID NO: 1387 - DNA, 968 bp, Aedes aegypti
gaaaagcctgctgctatacagcagataattctttacgacgcattcaataactcaatttgtgtagctggtgtacaaaacctattgtgttctcgataagcgttttattgtgagttttgtccagaatttgttgcaagtctgcccgtgcattgattggcgtcacagttgaattgcttttaaaatattaccccaagaagtgaagaccacagaaggttcaatttaaatccacaatcgttgagagcggttggtcagtttaaaaaactccggagaagtgtgcagttcagttcagtggatctcagccgggccgtttaaaaatgtgtgcaccaattccattaaaggagcttctaaaccaattacggaaggaggttataatggtcagattgcagcagatcaaagagcggatgtcccaacaagagggctcacgcccttctcaacatcgaattcgccaagtatatcaaattctcgatgtgactgttgacagacgagatctaccagcggacttttttcagcgaattccaagaattcctgcgaatcgaccaatcaaaaagcgccatggttctcatcgatcgtcctcggcgccgccaagaagtagtcctttgacatcaaactttcgtgtacatccagcgtttcgccggtttaacgatcaacgcccggtaatagacaggagaagtgcacccaccagcacgccacgggatacagtagttttgagggttcaagtgacacggttatatttgatgccaaatcaaggctctcacggtgaactgaacacaaatgtgcctaagaacgatcacacaaatggtgatcgacaactgtgataaaagctgaatgcttttatttgattacccgatatctgtattactcgaccaggcgttcagaagaagtgcgaatttagtttaaaatttgtagtacataaatttgaaatgtgtattatttcacctaaataaagatatttttcatataaccggtacact

SEQ ID NO: 1388 - DNA, 1725 bp, Aedes aegypti
gtgttttggaaagttcggttctgttctgacgaaattcaaacttaattaatagtaaaatagtgcaaacgccacaagaaaaactatctaaccatggccgctatggtagggccttccggtggacaatcgacggcatcggtttgtcggttgtgcttcacagagcggcggcagcacgagttggcattcatcggatctcagctccaagagtggatcgagatgctgacttctgtcaagattgtccacgttccgaatgcgcccacgtcgttgtgccaagtatgcaaagccattttggaaggctatgataagttccgcgaaatgtgccatgccaacgatagaatgttccaagagacgttcctccaggatggcgatgattaccaatcgaagaagcgaaagatcgaagtgaaagataagttcttcgtggtagaagacaaaggtagtcacactgttacgacgatggaagtggaactgggtgtggagccctgcgagtgcaccgatgaatatgaaaccacgttggatgaccaggagatcaagatcgaagaggtggttgttgagaaatcacccacagatgtgaaaattatctcggaaaatgatttgagtcaagacatcgtcatcgaaatactgcgatcagacctgtcctgccaaaggctcatcagagaaaaactttcccatggaatctcagtggccaacaaagacaaaagtctcatctgtcgaacactgtgcacgcccttgttcggttcgatgattgaacatggaattccagtaagctgggatatcaaactgaaactggcgcagtgtatcatcgcggcatatccttgccttggaacgcaggctagcggaatgccagctgaggctgaatggttttggcggcacagcggacattccaagggagagcactcgggaaagatacatacctggattaggaatgcccaggcgaaggctccggccagtgtgcggcggaaacgtcgcggcaccaatctggacctgaccgatgtcgaggcaaatgctgtcgaaaagctatgccttctggacgagcaggcaagttaccgcaaagtgaataagttgatgatcgaaacgttcgcctatcgtcagaatctgcgcgatccgaagagtggcccttcgcacttgtgtgcggagttcccccatctgctgtggtatggtcccgtgatgattgaggaagagttcgatcgaatgcatcccaatagaaacacaattggtactctggcctcgatttcctctctgtgcttgatgcttgatcattcgtacaatgaaatagcgtgtgaaaccatccaagctttgatgaaagtgatggccgaactaacgctgcaagggaacatccgtaaggactcaagctcatccgggctatccccgctggaagagtacgcctcgatattcgtccgctggcagcagcccgatacggacttggactacttcgccgagaatgtccccggggacccgccatacatcgtctgctcggcaacggccttcagcgagggtcagtacttcgtgataatcatgaacacggccatcgactgcgggttcacgtttgggcgggctttcgacgttctgctgaaatcgtataaggttttcaacttcccggtcccgggaagggccaaaaaggtgattgagttgttcgatctgttctacggcatccagacgcacagcagactggctaacgttaacaaactgtttgacaaaatcagcaaggcgtccaatcggttgctcaattga

SEQ ID NO: 1389 - DNA, 953 bp, Aedes aegypti
gacccatcatcacagtcgatcgagcgttagttactcaaagttcactcagcagcagcccgccacgctaagataatggctcatattgttcgcccatatattgcaccgagcatatcaaaacatggttataaaatcaccaaagacgacaaggaacgcaaacggagaaagctacatttcatcgtacgcaggattgtcgaaggaccggatattgaatacgacacgtcaatggatagcgatctccagtcatcgctcgccagcagtgaaccgatcagatcattttctccagccctcagcaccggtagcactattccatcggaatcgtcatcagttttgtcagaatgtgagcgtttagttcgcaaaagagtggatcgtgtcccgaaacggatgtcccagctatcggttctaccaggaatggagctggtaataccggtcaagtacaaccagaagatggcccgatcgtttccggggcagaacagtcgaactgaacgggaacaggctcggcgctctaggaatactatatcggcgagggaaagtcgcgccaaattgcggatgatgaacgagcttttgcataaggaagccgccgaagcacataggagaaacgtggagttgaaattcggactggcgaccactttctgctacgcggaggaattgctgcataagttgggtctaccgatgatggacttcttcggtatgtggaagaatgcgaaagagtccattggggttcctccgattaacgatgacatcctggaatgtaagttggacgacggcgatattaaaaaggaaccagaaccagaggagtaatcagattcgttttggtgatgatgatggagattgcacgttccttatgaaaccagcttttactttagttacagttctgctatgacgatgattttaaattgtataaattataagttgttcgcacaaattggaaattaataaaatttaagatgcacttt

SEQ ID NO: 1390 - DNA, 9877 bp, Aedes aegypti
ctcgatgcatgcagcttgaactcactcgcactcgcctactggagagcccaccacctcaaagtagtatccgttcgaacgcgccaacgaaggagtagtgtgtgaacagagacgaaaccgacaacacaagtgaacctcttctacgggcccaaagcaagctgcgaaaaaagaggcaaccatttttctccatcgtatcgaaaacgagattgtgcagattttccgttttttaattatcgcgttacggcgcgtgtcgagtccggaaaacggtgttccagtgtagtggaaaacggttccgcctgggaatcgccagaaacttgtgaaggggaccgattttcgaagtgagggggataaaagaaatttttctcctcgagtttcggccggacgcaaaggaagaagggagcaaaacgcgttccactggtcagccaagagaagcgcccatcgcaataaaagcagtagccccactgggtggaagagaaaaaaagggcattcgaagggggccccgtgtgttttctatcaatcgaatatggaagtgttttgatgtgaatgctggagtagcccttacggtaaccattcctgcgccagatcaccagaggacccaaaagtctggactgaaacaggaagacactttccatttccagagtgggattgtcgtgacggaatccggatttgagttgcaaggagcagcttcagtatcaactatagcactcaaaccctacagcagcaggaagacgagaacagatcatcgagttctctcttcatcaacacgggaagtagcgatttctacctccgctagggactcgagggcatgttttccactttcatcggactaatcgatattcaatcatggtgggaggtgccctacattgcacacttctgttcgttgtttagtggctcctttcagttgccggatttcgacatcgaggatctggaagaagcgcttctgaccgatgtcgacaccgagagcgagattgatataaaagtgtacactcgtctgctgccggatctcatcgttgctctgttgaagggttgtgacgcgctcagccagatcgtatcacacatcagtccgagcaactatcagatgttcctgagacgactgtttcgtcaaaaatgtcaggaatataacatcaataaccctttcaacgaggatacagattttgaaaagctgccgcttcgtaccaagatcttgattttaaaatatctatgtgactttcgccttgactcagttgacgtatacagcagctttgcaaatcttgaagctgacagtttacgcgtggaaccattaggctacgatagtaaaggatctgcctactggtacttttttggcactagactctaccgtgaggatttcgacgttccttccggcaagggtagcaaatcgtcaaagcgatccgtttggcaagtgatttgtttcaccgaggaagattggagtaatttagctggcaagttcaagcattcaaaaaacgaaaacgagcgagcattattgctgcagttggaggaaaattttcttccaaatataccaaaaatcttccgcgataaagaacgcgagcgaagaaagaagctactagagcgccgtacatcatctcgcatcaaaatctgcgaagaacgtcgtctggctgaattattccgtcagaaggaaattgaagaagcccacaacgccctgcttaaagaacagcgtaggcttaaggcaaagtgcgaacccaaaccggaggtctgtcgatcccataaagaaaggctagccgaagacagagctaaacgcgccgaacgacggtcacgttcaaactcggtctcaagtatagtatcaacctatgccagctcgccagaaccagaacctctcacaagtgattttatttttcagccaaaagaaaacgaaagtcaattttttagaaaacattcttctggcggtataaagcacaccgcaaccgtaatcgttagtaatccaccagcttccccatcttcagagctaggttccgagccgacttcttgtgcagacattgatgtgtgctcgggcactttcaagcacaacccggggcaagtgttagaagaaaataacgaagcaaacgacgacgaagaagaagacgaagaggacagtgcaagtgtgatagtcgttgatcaggtgaacaataattttatcgaagtaggatcgagtatcagtgttgttagtggttctactactaccagcagtggaatcagcagtcgtgagcaacgtgataaaacaccttcgccgcctccaacgccccctccactgtctttgttacaaccagtggaagaaacctcacagtcggcggaaccagtgaaacgaagatccaaacttagtgctgagatcgaagggttgctgcaatacaacagaaatatggctccaactacaaccaaactgcccgggaggcaaaccaacaattcgttgtcgtcagttaccggcccggtgatcctgccgttcgccgaaactccgccgaaaaccacgactggtggaagttcgggtagcaaaagtggtgactccaatgccggtactggcggcggtacaaccggcaccagtggaaggaagaaaaagagcaaagcttcggaagtttttacggaaactgaagaggtcctgcagattgggatgcacaaaatacttgagtacataaaaaatcacgatgacgcgtggcccttcatggatcctgttgatgaagacatcgccccgcgttactattctatcatcaggcggccgatggatttgcaaaagatggaagacaagctagataatggtgaatatctaacgttcggtgactttcgcaatgattttaaactgattgtgaacaactgtcgactgtacaatggtcaggccaatgaatacaccgaaatggttaacaacttgcaattggcgttcgaaaaggcgaaaaagaaatactttgactcgaactcctcagacgaagagcaatctctcgaatatccaatcttcagggagaaaccattcggaggaaaaaatattaatgagtcatccggtagctgcaccagtgttaacaatagtaaatcttgcaatgaaaacaaaggtgaaagtgttcacaaaaaaagtaacgatgtgaagaagagcagtgcaaaagattctaaagttgacaagaaagaaggaaaagttaaacatgccaacaaaaaagaaagacatgaaacaagcgaaagtgctgagaaaagcaaatctcacagcagtggcgcatctggtagtgctaaaaagggtaaaagcaatgccgaggaagaaccaaaaagtggtaaagcagggaccggtaagggacacaaacggaaacgaaaggaaaaggataaagtgggaaaagtaaaaagcaagaagttcaaatcaaataaaagtgacgaagaagaaaccggagaagaagagaatgaaaatgacgaaaaagatatcaagagtatagaagaacaatctgagtgtgaagaagaagttcgatctccatcaccagtaccgctggaaactaaaaagaagaacaattccaagggaaagaaaaaagatgccaaggccaaagagcaaaagaaaaattctaaacctacaaaagaagatgaggaatcagccaaccacgacgtgggtaaaaaagtgcgtaaaaaatctcaaatgcgatcgcgatcagtgtccagatccggatccaaatcaaggtcggcaactccaatgtcaaggtcccctagcccagcaccagcttcaacgccgaaaaaagctgagaaacggaaggaattaacgaaacaaaaacatggtagaaaggggcgtaaagcggaaaaagctgtaactgaaccaaaaccttccaaacaaatagacagttccttaagctctggaacaccttctccgactaaacctcgtggcaagaaaaaggcgcaggaaaagaaaatagagccgctgagcgatgaggaaaacattgaggatgttcaaatggaagaggaggatggcaaagaaacagacctcagcactttcgcggatattgatgaaatacggatcaaaaacgatagcaagggatatgcttccgaggatagcatcgatgaacttccagttactgaaagcagtaaaaagagcaagaagcacaagaaaaacaaccagaaagcagccaaaacaaagacaaaaagcaaaagtgaagaaaaacctaagaaaatcaaatcaaaagccaagagtggaaagagcaaaacatctaaaaacaaaagttttgatacaacctcagtagtctcatctagcaatgaggaggaggtcatagaagaaatcccgaaggtaaataaaaacgtggatcctgtggacaaagaaatcaaaagtgcctcaaagaaacaaccaaaagatttctccaaatacacgacgcttcctagagatagaagcttatcgcgaagcttttctcggtctcccagtccattgccttcaatcagagatggatattcatcaatgtcggatcactctatggagtttgaccaagatcttgatgagactgacaaaggaaaatctgatcccgtaaggccattgacgccggacatcagagacaaatatgacctcatcaaagagcgtcgacgtaatcagcagaaagcagcacctcaaacttccacttcgacgccagtgacgcaagaaaaacccacaaagcaaaaacctaaacctcaggaaatcagtcgaaagaagcaaaaatctaatcaaacacaaaataccagttcaagtgcctcaacaacccccagcaagcagcaaaagggtacagaggaaagtgaaaaacctgcaaaaaccaaagaaacagaggacgttaaagcaccaatagagccacttcccgtagtagagaaacccagactctcctacatggatgacaaaacggacaaacgagaatctgaaaggaaaattgatccttgcgatgagtatgatttcatcgacgattcaccgactgaaattcctacactcaaagtggcgactcctgtagcgtccccagtggagaagatatcaaagcctccgaaggttaagacggatccatgtaaaaagcaaacacagaaatctagtaaaagttctcaaaacaacactactgtaaaaccaaaccctatcacagcaagcaaaccgcctaaagcttctggtgcaaacatggaagctctggagctagaaactgagcaaactctaaaggacatcaacaagtggttagaaaatacgccacgattttctgaatacagttctgcgagtaactcaccttctagatacattatggatgatctcgatgctgtgactgccaagattgatgctgcggatttcagaaaacccatgccactttcccagctgcctgaggaagaaccggacggcactcatattatcccgataacaccgtcggtagtttcgtcgtctttgaacacaatgcctgcgtcaattccttcactacctatgtctccaaaaccgatgattccggcttctacttcattgccaaaagaagcttctaaaacaaagaactccaaggagatatcgtatgatacaaatccccttaaggaatctatcaacaacgtcaacatatccgctgctaccgctcccgtaataaaaccccatcctctacaaccggcagtggttaacacaactgtagttccagtatctgcgataacaccgccagaccgtcctcatcttggtccgccaccgattattccgcctcactcacaaaagaaagaaccgaaggaacccaaacgtaagtcattgaaagaaaaactaagccagttaggttctcgcaagcgggaaacagtgcatcgtacaattgatcgattgcagccaggaaaatcgaaaggaaatttacttacttccatgcagaatctcaacaaaccagaagagctttttccgttgggtggctcgacaaacaaactgaaagaggttaaaaactcactcattgtcaagacggatgaatcaaagccaaaattgagcttgggtacagttttgaatactgaaggtttcggcttgggacaacagcacaactttgctgatgaaaagaaggaaaatgtagcagatgtggtagacaacaaggtggataaaaaggaagatgagggcgaaaaactgttgaacaactcgaagggtgagagtgctaatgtaactagtctgcttattcacgacgatattaaagcggccaaagctgagcttgccaagacagacccaagtaaagtggtggaatcacctgaaaaagtcatcaaagctgtgacgaaatcggacaaaccttcggcaaccccgaatttgagcgcttggttcaaagcgtttggagcacctaagaaaccaaagaagtcagaggagggagatgaaaacgccagtaaaaattccccgtctgagagtgggaagggtagtgaatatgcatctccatcagaatctggattgaatgtaccgttggtgccaagtttggaaagcccaagttatccttcattacctgcgcccaggcagagaaaggccagtactggcagtacggtgtcggagagatcttcgtttagtcaagatccggatagtccaagaattgggatagatgagcgaataggagtttacccggcgccttatcccagtccgatgggagcatcgcctattatgacgtcacctaaactggacgaaatacaaaaaagtccttatccattgaatggtgctatcaaggttggattctatcaagacacaaccacaaagagtagtcctgagaaaagttgtagtccaagagatttaccatcaccttacccacaatactctcaacatttgtatagttctaatacgggaatgacgggaaataatctctacggcaattactcgtacagtgcaaatgctaatcctagtactagcaatactaatgtagaaaactttaaaagttttgaccagtacaaacaacctgcttcccaggagtcggattacaattcatcaatgagtcccagtacaaatccaaattctccttaccacaatcaacagtcctcgccttaccagcaacaacctaattcaccttatcagcagcagcagcaacaaccaaatcagaattacaatcagcagcagcaaccgatagcttctcctgcatcttcagggccactgtctccatacagcaacaattcaatagcacctcaatcttcagtacaacaaagcccggctcaatccgtcagcagtcagtcgccttttcatccatcgccgtcatcgccttaccaaacacctcaacaccaatctcaaagccagccatcacaagtgcagaaatccaatcaacaacagcaacaaccacctcaaccacagcagcatacatcgaaaccaaatactcccattcaccaaagcccgaattcgcctttctcacagtcaaaccacagttcgccgtattcccagcaagatccaaattcaccatactcccaagggcagttgtctccctttcaaccgatgtctccgaaaccaccgcaatcaagtcttccagctattccacaaggtactaccaacaatagtttgaagctagcacctcccattatcactccccagcaagccgcggcagctgcaggagttgttcttccagaatcgcccgtaaatagtctatcccaacaaccaatgcaaacgtcaccgcagcagcagcagcagcaacaaccaattcaaaatacaggatctcagctgccaattcagcagcaacaaccgcaacttccaccacaactgaatactcaaacacagtggaatcagcagcaaaactacaaccagtacggtacaccacccgacaactcgatgggcatgaattcaagtgtccctgctcctgctcatatgcatcaccatcagcagcaaccgcaagcgcagcagcatcaacagcaacagaagcctcaaccagcacatcacaatgttcagcatttgcaaccgcaattacccactcaacaacagcagcaacaacaacaaccacagcaacaccatcaaacaccaccatcctgccaacagcaaactcaacaacagctacaaacccccagtttaagtaatttaacacccgctcattctcaacccaatcaacaacaacatcagcagcagcaacaacagcactatagtcatttgagtaacctacttagtaacaatccttacacatccagttacggtaggcaagcgtatgaccatattggccagagttcacatgttggacaagatgttggcaaaaattcggcaaccaaggtacctgaactgattaatttaggctacaacagtggcagtaacgaaagcgcggcaagcagtaataaaaatccacctcagcagcaacagcaagatattcctatgaacatgggaagtaaggcagttactgctgaagtgcccaaggataaagagcttgccaagcagcagcaaatgtttgagctcatgggagcaatgagttatggaagtccgatggacatctcgatttctaaatccaaggcttttgatatgttcaatcgtgcggctactatgagctttccacgtggattccctggtaccagcagtaatagcggtagtagtgcaaccagcggaagtcaaacgcaacaccaagaccttacaaagatgggatatactggaagtgcaagtggatatgatcagttgcaaacgaattcaaataaggctcatgacatgagtggtgcaaatgcttacaatatgcaacaaccgcagcaaccgaaaagcagtacaagcgatttggttgcaggaagtaacattcgtgggaacgtttcatctggaacttacgaacaaagacccacaagtaatgctcctcaacagcagcagggtaatatggatcttagctctggatacaaatcattcagtggatctacaacttcatcgttgatagaccctgcattgaggaatctggcttccctttcgtcgttgtatcaatctgatggatcttccggattttacgacaaaaacatgccgccagctgctcacatgtttggtaaaaatctaccaaatcatccatcgggcgcttcttcaacagcagtttccacaacatcaactcttcagcaaatgttcaactcatcgatggcctacagtgcgactcgggatcaatcaagtgcatatggaaccaattaccatcaaaggaatgacatgctgaaccaaggacaaaaggtgccattgaatattcccacggtatccaacacgccggctcaagtggaaccaacgaaacccaaaagaagtcgaaaaaagaaggacacacaagaggtaatgcagcaacagatgcaacatcaacaacaagcacatcagcatcaacagccacaacctaatgcggcccatcaaggattccaagcgtatcctggcctcaagaacagccaatcgtcaaactcgtctagtagtcagtcgaactcgacttcaaatgcccctggtaatgttggatccaacaccaccggaaactctgagccatctgcaatttcactgaaaacagctgttccaggtagcgccttcaattttggaactgggcctgcagggcttggtctgccatctagcctgtatggtgaaaattcttcatacctggatgagttccgcaataatccgaacccttacccctaccttacatctagtcaccgaggatcgtcctcttcaggagcagcgtcaacggatgcgaccgataaatcacataactcatcggcatccactgcctctgctgtagctgcagtagcagcagcagctgcagctgcccaccaacccccaccagcagcctctccgtaccatcagttcctttcgcatccctcgtctcgtgcaccatatcaatttatgaatcagttagatcctctgcatcagcaatatatacgacaagaagagcttcgtgcccaaatgatgttgaatcaaagccttgggctaggtgctccaggtgctcatggaccacctccaggggctaacgccggtggaagcgatgaccataacgccaacgctacaagcgttatctcctcggctaatgcaagaaacgatacgatggcctggggagctcgcagaaaccacaacgatttccagtaa

SEQ ID NO: 1391 - DNA, 1341 bp, Aedes aegypti
gatatccatttctgatgttttgtttggatatgaaaatagtttaccttgcttttaaaaactttgataaccgcaaagaagaagcagaggaagcgctccgatttgtttacatcctctccgcatcaagcatcagaaggtacatttttatgatcgttgtgtttcgtgttcaagtttttgaaaaatcagcgaatttaagtgactgtaccaacaaagctatgtcgtgtaattatgccgatggtttatcagattaccagaacaagggcatattgggagttccagagatttttgacgacgcggaaacagtggaggaaaagtgcgaacagctggcaaagtggattctgggttcgaaacatgttgtgattcacaccggagccgggatcagcaccagtgctgggataccggactttcgcgggcccaaaggcgtgtggacgctggagaagaaaggcgaaaagccttcggtgaatgtggcttttgatgaggccaagccaaccaaaactcacatgggattgaaggctctggtcgaggccggattcgtgaaatacgttatcagccagaatatcgacgggttgcatttgcggtctgggttgggtcgtaaatacctggcggaattgcatgggaacatgttcatagagcagtgcctcaaatgcaggcggcaatatgtgagaagcaaaccggcgcccaccgttggaaagaaattgaccggagagctgtgtcgggggacgaaaaactcccgggcttgtcggggcggcaatctcatcgataacattctggattgggagcacgatctgccggagagcgatttggacttagccttcatgcattccacgctggcggatttgaacgtttgcctcgggacgacgctgcagattgttcccagtgggaatttaccgctaaggaacaaacgctatggtggcaagctggtcatatgcaatttgcaaccgacgaagcatgacaagaaagccgatctgaagatatcgacctacgtggataccatcatcgaaaaggtagccaaacgattaggcgtggaaatcccagcctacacgaaggaagtggaccccaccaaagcggagccgtgttcgctggagtggaccattcctaccgaagaggtgaaaagtttagataaacactattcaaaaaccgttcgcgaatggtccaagaacagaaagaaaggcggctgccgggaggaagaagctgacgagttcgagttcaaaagcaaaaagttcaagaaggaaaaggcggagtctaacgaccaggatgctactacggtggtcgaaaccgaagcggaagttaaaagtgaacagaccgacgttgaagttgagtaaacaattttattttaaacttgaa

SEQ ID NO: 1392 - DNA, 827 bp, Aedes aegypti
ggccgtctccgtctgtctctttaactcaacggttcgtcggcactctcgtcaatcgtgtcgaagccaccaggaagtgaagacatttttgcagctgttttcttcgaaacaatttgatagctaattcccagtcaaaatgccggctaaagcagtttgtgttctgagcggcgatgtcaagggcaccatctttttccagcaaaatggagattcggatccggtgaaggttactggcgaagtgaccggactgaagccgggcaaccatggattccacatccacgagttcggtgacaacaccaacggatgcacctcggctggaccgcacttcaacccgcacggcaaggagcacggtggccccgatgccgccgaaagacacgccggagacttgggcaacgttgtcgccgatggcagcggagtcgccaaggtcgatatctccgacagtcagatttccttgtccggaccgctgagcatcctgggacgcactgtggtcgttcatgccgatcctgatgatttgggcctgggtggacacgaattgagcaagtctaccggaaacgccggtgctcgtctggcttgcggtgtcattgggatttgcaaagcataaaccttccaaactgtaacggttacggaagagttccacagaaaacattcgaacgggattcgagttgcatcctcgtactaacctaaaaccttcccttgggaaatggaacctgtgtccttaaaaaaacgtcgatttgatagacggaaagtcccttagttgtatccatatgttctatgaacaaattgtctactgttttgtctggtctgaataaagtcaaaagttcattactcaaaaa

SEQ ID NO: 1393 - DNA, 1209 bp, Aedes aegypti
atgagacaaattttcgcatttctagcgttattgctagctctggttcagatttccggtggcactctgacgccatcggatgtcaaggggaaaggtaagaaggtgaaggagctgaaagtgaagcaaggaccgcaaccgtccagtgtctttgatcggggtctaattcaggaggaaccatccgccaaggatatcctggtggagagtggtgcatattacgaggagacggcactgaaaaacttcaaggggacggtgttggggtatgtcacaccgtggaataatcacggatatgacgtggccaaaatttggggaggtaaattcaactatgtttcaccggtctggttgcaagtattgcggaaaggaccaaagcaatacgagctgggtggagcgcacgatatcgatgccggctgggtgaaagatgtaaagaaggcaggagaggcgatcaataacaaaggtaaatgtacatttttcgttccccgcgtcctgttcgacaaatttaccgacaaggatttctcccagctgctgacctacagcgaggagcgtacgatcgcagccaagctgatcctcaacacggtccgaaagtacaaatttgacggaatcgtcctggaggtgtggtcccagctggcagcgcgagtcgacgacgaatacctggtcgggctggtcaaggagatctgcgaaaccctgacgggggctaactttgcttgcattttggttattcctccggcacggaaggaaacctacgatctgttctcccggcgccattttgaatcgctggttccggtggtaacggccttttcgttgatgacctacgattactcgagcatccagcggccgggtgcttgtgctccgctgtattgggtgaagaacgccgtgcagcacatttgtccggatacggcggaggacgtgaaggagaaacgggcgaagattctgttggggttgaatctgtatggaagcgattacactcccaacggtggacagccgatcgtgagccatgagtatttggccttgctcaaacatttgaagggtcacctgacattcgatgaccacgatgtggagaatttctttgaagtgaaaacttccaatggacggcatatggtattctacccgacgttgttttccatcaacgaacgactcaaattggccaaggacctcggcacaggaatttccctgtgggaattggggcaagggttggactacttctatgatcttttctag

SEQ ID NO: 1394 - DNA, 8000 bp, Aedes aegypti
cgcggaacggaacgcagtggaacaaagttcaaaagattcagtctaacgtggacggtcgactttcggtagtgataagtgcctgaagagtgaatatttctttgggaattggagtggttgaagtgtcttggaggaaaattttaaatgatcagtgaaagtgaaatggtaatcggaatgtgaatatctaagtgggagaaaactcaaataaaccaacgctgatcaatgaaattatatcgaaaataagtgaattcagcaacagtgatttatcagttttataacatggatactagaaaagtagctagtgaagatcttcaacttcaacaaaaaccatggaaacagaatgccataaaccggataggcctactattcctgatgatcatgatagtaattgccatgacaatcatattcacacttctcataggcgctgtgacgcgtgtattattcacacctcaaacagttcaagtggtttatcatcaagaaacgcactccgatggagatctgatagatgtggttctgaaaccaatgaagcacttgctagccagtgcattgcatttgataggatttgaaaataatcataaatctcggcgaaagcgagatctcaacgacgacaatcgcattcagttggtggacgacaacaagttggagaagagtgaagaatccaatgaggatacagggacgggtggttttgaaccaggaatagatggggcgcttcagcgattgacgcaaaagaatttgacccttaagattgtttacgcaccttaccgtgatgatggtaacaggaacgagattatgcggtcgatgcggaggagaaggaggcgtagacgaagtgcagaggtgcaagggatcttgcgggagaggcgtagcgcacaggaatatcaggagcttaagaaagagtacagttggcggtgcaagaaggaagctcctgaggagaagaactgctcaagatactgtgaaaaatttgaacagtttctgaaggagaccaaacatagttataaagagataaagcacaaattgagtggactgctgaaggagtgcaaaggtaagcatggtggcgatctgaaaggtgatctcagtgacagttttccgaagagaaaggagaaaaagctaagtgatatggattcagatgaaagctctgggaaaataatgaagaaggataaacccaaaccaacaatgattgatcaggcaacagacagcacgacgataaatgaggatcaattgacgaccatgattaccaagttggaaacaactactgcggttggtaaggatagtgatgccagtgaaacttctgtggtgaatgataaaattaatactcaaaccaccgaaaaagatacaaaagttgtaccaacagtgccacctcttgaaaaatctactatcaatccgttggatcttaatctagaggaagaaatggaaaaattcgcagaaaatttggtagatgaaacaacatggaaagtctttaaaaccgtttcgacgaaaacgactgaagatttgcagacaactaccgtcgctgtaacaactacggaacaaaccaataaagatccgactttggatgatctaataaaatcattaaataagacttcaacaaacagctcactaccgcagcctttcaacgtcaacaggcacaatcctgttgaagacgactgcgtgaaagacttggatgacttgttgaagaaaattcccgagttcagatcagacgaagatgaggagcttaactgcaacgagaccacaactcaatcttctagtgaaaagctggtcggtcagccaaaaattagccatttcaaaaagcaaaacttaaaatacaatccagatgaacatcgaccaagaactgtcgagtgtatcaaaaatatagacgatcttctggcggcggtcgacatggagcatgggggttggaaggaaccgaaaaattgtacaattccatcctcaaccgttgctccaaaccaacatcgttcagccttaccggatacatccgtggatgatctttatgaagagtatggtcggcctccaccaccattccacgaagaacagttcgatcaatctactcttccagtggaaattcacgacttcatcatgggaagatcacgtaaccgtgggcagtttaatcacgacgtgccttcaacaatcgatacaccagaaactagagctaccaagtactcttcccagccaacagttgcagccagtggtccatttttgaacctctgtgatcagcttcgaaatcagcagcatggaacacccatcaaaactctgtccagcaatcagcaccacttccaggctcaacaatacggaggccttggacagactagcatcccggttacaggagaaactctcaaggcaacatctcaggttctggttaactccgcatacggaggcttcactccgaaccacttctgcttctatcaggttccgccgacttacggagctatgcgaccggtctatgctggaggacacaattacccagcaggtaagtcactcccactaggcgaagtgcctacaccggaacacttgctgaacgatcccgtgatcgaaactatcatcgaaccacgtggtgacttccccaaaggtctaatgaatgttccactcaacatccaaaatctttccggaaaaagaacaagtgacgatccggatctagaaggagctcaactggtgtgtagcttcgtgggaccatcttccacggagaaacctttagctgggaatgattcgatgatgttgcaatcatcacaggaattgtttgtgagcagtacgagggctcgtggccaccatcggcactgtcctcgaggcaaggttccctgtgcagatggcattcagtgtgttctgagttcacatttgtgtgactcgcgggtggactgtttcgatggaagtgacgaatcgcactgctcgtgtttgtcacggttggcggacaaacggcgctgtgatggttacgtagactgtcctctcgcggaagatgagatgggctgcttcggatgtgacaagttctcgttctcgtgtttcaatacgttttttgagtatcaggcttcgcatcattccgagacaaggtgctttacgttgatcgagaagtgtgatggcttcaacaactgcatgaatcggaaggacgaacaggattgtacgatgttggtgcgagacttgagaagtcccctggcgtttgcggttggccattcagtgggtgtcctgcatcggaactacaagggtaagtggtatccggtttgtcacaatccgttgaatctggcacgagaggcttgtgaagcagaacttggaccagcggatcgcgatccggtgattctgcagcaccatggagatctaccgggaccatttattcaaccaagtccacgaagtcatcacgtgttccaaccggagttcaccgatacctgtaacgggttgatcaactacgttaagtgtccggcaccgaagtgtggatccagcaagcagaacgagatggaaaatcttcgtattaaaatccgtggaaagagaaatgctacagagttagtgcagatcgttggcggaacgaaagctgaaccggctgcttacccttttattgtgggaatattcagagacgggaaattccattgcggtggtagcatcttcaacgaacgttggatcgtaacggcagctcactgctgtgacaacttcccaaggcaccattacgaactgcgagcgggtcttctccgtagacgtagcttctctcctcaggtgcaggtttcaacggtaacccatgtgttcatacaccgaggatacagcgcgcaaaagatgatcaacgacatcagtctgatgcattcggacaggcctttccagtacaaccgatgggtaaggccgatctgtctacccgaccgacacatgactaccaacgatcgggattggatttggggtccgaaaccgggaacgatgtgtacggctgttggttggggagcactcagggagcacggtggatcacctgatcatttgatgcaggttacggtcccaattctaccgttctgtaaacataaaaatgatcgcgatggactcgctatttgtgctgccgaaatgagtggaggtcacgacgcctgtcaaggtgactcgggaggtccatttgcctgcattagtgtctccagtccacatgagtggtatctggcgggagtggttagccatggagagggctgtgctagaccaaacgagcctggcgtctatacgagagttgcactgttcaacgactggatccaaaggaaaactagggaagtgcttacttcgtcctctacgcggcaggattgtcccggcttccagtgctcagttggggtatcgttctgcataccgcggcagaagcggtgcaacgggaaggtagattgtcttggtggagaagatgaactaagctgttcgctggatcaactgctagctgaatcgatacaggaaacaaccatagcgacgacaccaaagaatagtactgcgacaagttcaacaactgctgcagctactacagaagctgtcacttcgaagatcgatttcctcgcggagaattctgaagcatcggatcctgctactaccgtgacggaagcatcaagcactgaaactgctaatattgaaactatattgacaactattgagacagtatctgctaaagatgtaagtgatggtattttccaagtatcaactgaggcaactacagtggaaataaatactaccttagatattagcagttcatcgcaaaatgtttcagcttcaccagaaaaagttgaagaatcaacagtggacgaaaccacttcatccacaactgaaacaagcttcacacatccaacaacgattgaatccgaaactacagctgacagtgtaaccgctctcatgtcggaaactacctcgccatctctaccaccaaacgaaaacaacactacagtggactacactgtcacaagatctactgatcaaacaacaaatacaccttttacaatatcccctaccactgattccttagatgactcatctgctgcttactcatcatctgcaaacgattcagaagtaaatcacagtacaacgatagaacccaagaacacagaaagtagcgtacatgcaacgacagttatagaactgatctcggttgaatctactaccaatatcgaagcaacgtccttagcggatccctcaaatgcgtcaatcacaacgctatcctccgatttggtcgaagaaacttcatcctcgtcaacaaccccgtccactccagattctacttcatcaactcaacctgattcctcccacagcagcacctcaagcgctccttggatgcagattaacgaagctatcgcaaatttgaaacctcgtccacctagcacggatcgcgatatggagatgcgtcaactggaattgggcgacagcgtcgcagcgactcgaacagacaacaccacgtcgacaactatctctacagctcccagtgctgcaaccgattccaccagttccacaccgctgtcaaccaccacggtggaaagttccagcacgacccacggcgatctggaacacagcgaaactcaaatcgagcccgttgaagccgaagcgaccaatgcttctgtggaggagcatccatttttgcgcgaaattcacaatctggtggaggagaaaacccgtcggttgaaccagttccggttgtccatgcactacctgcacacatcgctgaggaaccaaacgcaggacgcgaacgaaacttcctaccaataccggcggttcaagtgttctaaaatccgacaatcgatcaacattgcgcaccattgcgatcggatcatcgactgcgaagacggtacggacgaattgcggtgcacgtgtcgcgattacctgaaggataagtacgacttcctgatctgtgacggcaaaacggattgtttggatttgaccgatgaagcagattgcttttcttgcacggctggacagtttccttgccgaatgagcaaagtctgcatcgacgagaagaagctgtgcgatgcgattccggattgtcctctgcatgaagatgagctggattgtcttgccctcacggatggtcacaaggtctactttgatgcgaacaacctctcggaattcaaatacgaagggctggtcactaagaacactaacggaacgtgggatctgatctgtggagcggagatcaataacaaatctgtggaatcgattggaaaaatctgctctttcttgggatttgctgggtacgaaagctactatcaaaccgtcctaacaccactggtgaacgaaacggtggatttggatcatcagccgctgctgatcatgtcgtatcgcaatatctcatcggagccaaactgtaaggccctccatataacctgtgcgccattcatcaatgctactgaacatgagatcagtcacttcgagaaccaacataaggaacaaccagtgcaagtcaacattcgtccaacacatccgatacagaatatcacctctctaacgcacatcaccttccaagaaaacgctcacatcgagttcatcgagaacttcggcgatgactacgattggccatggaacgccgacatctacctggaaggagtgttcctgtgcagtgcgatcatcatcgaggtcaactggatcgtggtcgacagttcctgcatgaggatgatcaatctgaagaacgattacctctccgtagtggccggtggagccaagtcatatctgaagatctccggaccatacgaacaggttgttcgcgtggattgttatcactttttgcccgaggcacgcgttgtgatgcttcatttggcgaaaaacttgaccttcaccaggcatgttctgccgacattcattccggaaaagaactataacattacggataaccaatgcctcgccgttggtcaggacaagtatggaagaacgcgtacgttacgagtccacatgaacatgacgaattgcgaaccagaggaccatatctgttatcagctaaatccagataacggcatataccatgcagatcactgctataccgaaaatgcatcacgtactggagtcgtcgtttgtaagtctaaggtctcgggatggtatccagtgggcttctatcagaacaagcacggcctttgcgggttcaacgaagtcgtcaaaatgatctccctgaaggaattctacactgacattcaacatgttttgagccataagaaatgtgactacgaatttcctgagccgctttgcgatggagtgaggtgttggcatgggaaatgtattggccattctttggtttgtgataacaaaatggactgcgacgacaactttgacgagcgtcccgaagcgtgcaatgccataaacgatacgtcaactgcctgtctaccgacgcagttccgttgcgggagccatcaatgcgttgataagagcaagttctgtgacgggcgaaacgattgcggtgatttgtcggatgagccacacgaatgctcttgctacacttatctcaaggtaaccgatccatctaagatatgcgatggcgttcgcaactgttgggacaaatctgatgagaatccacgactgtgcaagtgtgcaaaaacgagcttcagatgcggcgacagcgaagtttgtattccttacgatcacgtctgcgacgacgagatcgactgccccggagaagaagacgaacgatactgctatgctctacagcagaatccagcggagaccaactacggtgaagtgatgcaacaaagctacggcatctggcactcaaagtgcttccctaaggacgataaatacgacgagcaaacgatcaaggaaatatgtcatcgcgtcggataccaacaggtccggaaggtctacggcagaaaggtgcttccggagtcacgtctgagaacttccaatcggacacatgatcccgtcgataggttacgcggcgcagcaaccaaggcagttgcgttcaacaaattcttcaaagtgaatatcaacgaaaaacaagcgatcttcatgaaacccagtaggccgttgtacactctggtcaactgggatgccgaagacgagcagaagtgcgatcggttagagatcaactgtggagattaatttttgaaataaattatttgtaaaccgca

SEQ ID NO: 1395 - DNA, 2165 bp, Aedes aegypti
atggcaatcgacacggctcaggacggtaccagagtgaccgtgtcaagagggaaaagctcttttacgattagggcttcggtttacagccgtatgccgcccgtataccacttcgaagataagtctcaatgcctcaatgcagattcgagcaatgtgtactgtgtatcacgaaccttgatcaaaccagatggatcttctgaaaactggaaacttatagagaaacactctatagaggacacagatttccaaagatacgtgctggatcggggattttgtgttaagagctgcgaagtgctagtcaacagtttgacaccacaagaactgaagcagtatgaccatgtgaaaatttcagtggatgttccgcacacctacgactccagctacatccccggcatggaagaatacaggcaaaaatatgatcgtttaaccaacatctgtcacaactatcggcttcagcgagattacaatctatctgggtattcgttcatcgaacattgcatgggttcaaatgatctgagaaatccctttaccgagcatcatgttatattcgctgtgcttgccagtgccatagtctatctagtgattcgcgccacctatcgagatacgaaagacttcaggaacgagaataacaacctaattacagtagaagacgatatctggatggagttctccttgaagcgtagcttccgtcggttattcgccacgccgcaaaccaaactacatcgggactttgcatttgtggaatcggttcgggtcatttcggtgttcttcatcactgcagtccacgtgctgatggctttcggtgcaagtccaatggagaacccacaggctctggaaacgtttttcaggaatccagtgatgcggatggcctcagcgatattccccttcttggtgcacactttcttcaccgttggtggagttctgttggcggtgcatttcctggatttcattgaatccggcccaaggtttcgctggcagtattttatcatgggtatcatcaaccggtacatgcgactgtttccgctgtatttcatcatgtggctgtatcaggtgtcctggttcgatcggatgggaagtggtgccaccggacattcgctggttggcgttgagatgcaactttgtaaggagaatggatggtcgaatttcctgttcgtcaacaactactacaaattcgataaagggtgtatgcagcagacctggtacttggcagccgatttccagttcttttgcataggaatgctcatcatgatgatcttgtggcggtttccacggtccataaagacaatgatttatgtaatgatgacaatttctattgtggttcccatacttaacaattatatttacaattttgtaggagtcattctgctcaacttcaaacaccttcggtttatgctattcttctacgagtgggtcaaacgtgactacattctatcacatccgcacacgtgtagctacttttccggaattatagccgggatagcctaccatcgctaccaaaaggacccacagtacctgaagaacctccgagtttaccaagtcttgaagcgtttggccccactaatggttctactcctgtcggctccggccacctttttctactacaacaaaccagttgaaccgtccctatggatggctatctacgcatcggctcatcggaatttcttcggaataatgtgcggcgtgggtctactgtatggagcgaccgagggaagtgtgaaacttccggagattatgcgacacccaactttgctggccattggaaggttgtcgttcagtgtctatctgacccagttcaatgccattcgatacgtattcatggacgtcaaggagtacggcttctatttaaatgtgataaactatttgcaagcctttgctacgagttacatcgtgtcttatactgcagcgttggtactatgcacaacggtcgaattaccaatggtagcggtaatcaaacgcttacaaaaccacaaaaagcagaagagcagtgacgaatgccaaaacataacaaacggaagcacgaaactgaaaagttcttagggattcttttggaatggtttatttttgctcggatgttaacattgcattgtaaataatttgcggactctgagatttcagtaatatttgcggtggttttacaaatttgatgtacattttaaaatatagtttac

SEQ ID NO: 1396 - DNA, 707 bp, Aedes aegypti
ctcgagcgtagttctgataagtgacggaaatcgaagttttctcgttaatctactttacgattggaagtacccggaatactaagagataatcgaaagaacaagacatctgacgcggagtaccgatttcttagtttttcaaacgaacccacacaaatcgaattcatcaatcttcgaatcaatttagttagtaatttctcgtcgatcatgagccgcagtggcatgggaggatagcactcgccattggttgtgcttagtagtgagaacgaaagtgatacaagttccgccgggtggtgcacaaagacaatagtcaagctgaagttggccagatctttcaaactggaaaaggttccgcgaggtgccaaagttatgagaaaagctacaggccttccgctgcatttgacccactcgtaccgcagacgccgcatcaagttttgcgatagttttttaagtagccgtagtagtagtagtagtgacgatcaacggggaagtcagaacatacggctggagcttcgcctggagagtattaggagtcacatttgaagtgaggcccgggtcattgttacgtagtattatttttaagccagtatcctcgaaagtaacacgatctggaagaacccacgaactcgaacagatcggcaacagcaacccatcgatcgaaagcgacggaaaagcggctgcgtctgcgaaaccagccaaggtaaatctcc

SEQ ID NO: 1397 - DNA, 2089 bp, Aedes aegypti
acagaaatggtggccgctgggatcagcaatttccactccgagcagcgaaacgatccactggtccgggagttgcgacgagtgcgggagcagaacgctcaacgctacaaggaagactactcgcatgtgtttcgaaacaaaacgcgatgggacttcatccggctgtcgttcgtcattatgggcattgagtttgtgtactcggccgaaacggcgttcgtgtcgccgattctgctcggcataggagtcgaacatcagctgatgacactggtttgggccatttcgccgatgatcggattcttcctggcgccgattctcggcacgtacagcgatcggtgcaaggcgaagatgggccgcagaaggccgatcctgctggggctgtcgatcacgatggtgctaggatgcatattggtgcccttcggggagaacgtcggccgctggttcggtgatttgggggagattttcccggaggtgcccaccaacgtcagcgaggttttgaattccaacttgaccgctttcatgccgtatgatttctaccgggtagaaaaggagatcattgatcacgagatggacttcaagtgggccatcttcttcaccattttgggaacgttgctgttggacttcagtgcggatacttcgcagacgccggcccgtgcctatctgctggacatttgcttgccagaggaccatggccgcgcttgtagcaccttctcgatcatggccggcatcggaggcagcctgggttacgcactcggcggtttcaattgggacaataccgcgttcggagatttcctcggcggaagcatcaaaacggtcttcactttggtgggggtcatcttcatcgtgggtctggttctcaccgttacgagtttccgggagattccactgccgctgatggaaaaggacgaactgttgcgaccgctgaccgaatccactatcaagaaggaacgtgccaaattggacgataagatcttctacatcaaggacgtaagtcgggcttttgctctgcagctgcaaaccattgacgagaaatcacatccccctgcaccacagttgatcaataacgcactggtcgtagaagctgaaaggggtcaacagatggaggcatgctgctcgtcggactccgactcggaagatgaatcggagaaggcaatgagcttgaaagacttcttgaaaagcattttcatgatgcccaaatcgattgcgatcctgtgcttcacgaatctactctgctggatgggccacttgagcttctgcttgtactttaccgacttcgtcggcgaagaagtgttcaaaggcaatccggctgccccgtcgacatccgagtcctatcagctgtacctggaaggagtccggtacggatgttttggactggcaatctactcgttggcttgctcgttgtattcgtttaccatcgagaagttgatcaaaattctacgagcacgaattgtatactgtggaggactgatgatcgacgccttcggaatgatcatgatggctatgttccccaacaagattaccgtgttcgtgttcagtgcttccggtggaattgtctacgcactgctgttcaccatgccgttcctcttgatcggccagtaccatgccaagggacagttcaaagcgaacaagtctctggtagcggacaaaccggaaaagaaacgaggcctggcgaccgacattgccgttgtcggcggaatgatttttctcgcacagatcatcgtttctttggggattggatcgctgatcgaggcgctcggaacgacgtctgcggttatctacacggccggagtttgtagttttctggcagcactggcctcaacacaggtcgtctatatggatttgtaatcactcatacagtagcctaatcgcagaagccttatacttaactaaaatgcagacctccactaaaaaaccattagttatattgtgtaagtgccagttagaatattttatcggaaaacgtaaaaaaaaactataaaaacatcttacattactggtaatgttatgtgatatgtatcaacgtattttaaaaataggtttaaggtcaccaaactctagcgatatcattaaattaataaaaaatagccataaaatt

SEQ ID NO: 1398 - DNA, 2152 bp, Aedes aegypti
acgagaagcgccgagacgtcgaggaaagaccatcagtcgaaaactgctgacgttgtggtcaggccgctgatgcattcttgtttggggcagctcccgcatgcactttatcggtgaacacgagttggagataagctagattccccccccaacaaatcaacattatttgccaagttccctgtacgcgcttcgtaagttctcgtgtaccatttaagtgattgtaaccagagatgacgttcaatttgcggcaagtgtatgcttttgcccgggagtatcaccagaagcgggaagcccagaaggatgtccagtatggcacggccggattccgatcgcacgctgaccatctggactatgtgatgtaccgaatgggtctgctggctgtgttgcgatcacgtgccaagggaagccaggtgatcggggtcatgataacggcatcgcacaacccggaacaggataacggtgtcaagctgattgacccgatgggtgagatgctggaacaacgctgggaaaagctggccaccgacttggtcaacgtcagcgatgtcgatctggaagcgcaagtggccaagatttgcgccgacgagggtatcgataacaacaatccggccaaggtttacgtcggaatggacacccggtaccacagcccacagctggccaaggcagtgctgaatggggtggctgctatgaaaggcagcgttagagattttggcatcgtgacgacgccgatgctacactatttcgtaacttgctcaaacacagatatggcctacggattgcccaccgaggaaggctacatgaacaagttgctcacggcgttcaagaatatacgagggaattctttcgagaagggcaactatgtaaataaggtttattacgatggtgctaatggagttgggtcgttgaaaatgttgggtttcatcaagaaactcgacggatatttggacgtgaaggtattcaacagcaacgggaaaatcaactataattgtggtgcagattacgtaaagaccaatcaacgagctccggaaggcatgccggaattggaaccgaatgcacggtgtgtttcggtagatggcgatgcggatcgtgtggtatattactttacggatgaggaaggcgttttccatttgttggacggcgataggattgccactttgattgctggatacctcaaagacctagttgaaaaatgtggcgttgaaatcgaaatgggtttggtccaaaccgcctacgccaatggtgcttcaaccgactatatcatgaatcagctgaaagttccggttgcttgcgttcccaccggggtgaagcatctacaccacaaggcactagactacgacatcggcgtgtacttcgaagccaacggccatgggaccatcatctacagcacgaatgcaaaggccaaaatccgtgccgccagtgaggacactgccttaaccccggagcaacgaaccgcggcaaaactattactccgaacgattgatctcaccaacgaaacggtcggtgatgccatctccgatatgctgctggtagaaacggttctacattccaaaggatggagtctgaaggattggctcggcacgtacaccgatctgccaaatgtgctgatgaagatcaaagtagaagaccgaaacgtgataaccaccaccgatgccgaaagggtttgcgttactccggccggtgttcaggatgctatcaacgaaatcgtggcgaagtataacaagggcagatcgtttgttcgtccttcgggaacggaagatgtcgtgcgggtgtatgccgaagcggataccaaggagaacacgcttcagttggcgcttgaagtggcaaacgtagtgtacgataaggcgggaggcgttggccctagaccggaattgccgaaaatttaacttttttatggaatcgaggttatcatcactgccactgttcaagtagaatgcattggaaaactttgatataaagttcgagtgattggttttaagtcgtttttgagattatgctttaagctcaacaatagtatgtacactacattaagttcttaatagctatgttctaaccgttttaatgataaaatttagctttcgcctacatatcatgcttttatttcgttattgatataaatttgtatcatgaataaatatatttactagtattgatttgcata

SEQ ID NO: 1399 - DNA, 1438 bp, Aedes aegypti
gcaaacgcacacgactgtcaaagaacggtgaaggtggaaaacttttctgatgcaacatcatcaaattggagttttctgctagaaaaagtgctttttggtgcaaaatcccggtgtattttcgtgcaatctagtgaaaagtatattccacaatcatgtctgaagacgatgcgattttcgatccttcgttgatgaagaaaaagaagaagaagaagacccccttcgatttggacggtggaatggccacggaggaaggcggagatacagaggccccggccggtgaatcggcggcggccagtgaaggtgcgtcggcggccgatgctggaaatgacctggaggataatttggatctggacacattcggtggcaagaagaaaaagaaaaagaagaagcccttcaatctggatgacatcgatagtgccctggcgggagtggacgcggaaggagagaaggaatccaagggcggagacgatggcgagggtggtggttttgggggagacgatgggctggacgatgacatgaagatcgatttcagcatgaagaagaaaaagaagaagaagaaggatctgaccgagctgatggaggcggaagatgccgccagggaggaggaaaaggagaatgtggacgagcaatgcaccccatgggcagccacggatcgtgactacacttatgacgaactgttgcagcgtgtgtttgaaatcattctggacaaaaacccggatatggccgctggcaggaaaccgaagttcgtcatgcgtccgccgcaggttctgcgtgtcggtaccaagaagacgtccttcgccaactttacggaaatctgcaaaaccctccacagacagccgaagcatttgctggactttttactggcggaattgggtacgagtggttcggtggacggtaactcgcagctgatcatcaagggtcgcttccagccgaaacagatcgagaacgtgcttcgacggtatatcaaggagtacgtgacgtgtcacacctgccgctcgccagaaaccatcctccagaaggacacccgtctgttcttcctgcagtgcgaatcgtgcgggtcgcgatgctcggtggctagtattaagtccggtttccaggccgttaccagcaaacgtgcagcgatccgtgccaaaacggcttaagcgcgctgcttgtggtcatcaaaaaattgtgttctattgtatgcaaaaattgtttgttttgtttccttcagctattattccgtgttgcgtgggaaatttgttccagaagtggaaagttctgcggtgaaaaatactgtgtttataaatccataaaacagaatatacaaacacatagcaagcataatctattagacacaagtttgtatgtttaatcataatctttattcgagtagaatcacctttttacaaaaccttcaactgactcaataaaactgcacttatcttgtataattgta

SEQ ID NO: 1400 - DNA, 1387 bp, Aedes aegypti
aaaaaaaagtggtcccaaaaacgaaacgtcaaaacttttatccaacgaggaaaaatttacaatccgctgtgtgaaatctttgcgtcgtggaaattcttgaatttttgctagatttgaaacgtttttccgacttaaataggtgaaattattccagattgttaaagtggtgatacgaaacggtagaaattcggcgtgggtctcaccgttgaggactgcataaggtcgcgtgggccatcgttttgactgcaaagtttgagaacggtccgaaatcatccaaactggggggataagtggcccttccattttgttttgaaatatatagcagtataaggaagcaaggatattttgattcgtcagaatgagtgtcataattcgattgcaaaatttgccctggtcggcaaatgcactggatgttcgtaactttttcaaaggtctgtccattccggacggcggagttcacatcgttggaggcgaaatgggcgatgcgtttattgctttcaggtttgtatatcgttagtttactccagtcgtaatcttgtcgcaacaagaagagcattttccaacgctatcaattagtaccagaaacattgcaactgcagctctctcaagtctctttcgtacggtattgggtcacgaaggggttacatggcatagatccactccggctgtttattgcgtaatgcttccgaccagtataagcaactttctttcgaaaaataacgtacccagttttattctcactacttatcctgcattgtataactaggtgaatgtgatagatatcccaccttaacgtgtatccaccaaacagctcgaccttattggcgtatagtctgagcggtgctgaatgtttttgcacggcaatgtatgtcgcaacttttccggttactcaacatcatcaattaccgatgatgcacaagcctatccagcttcgcctgaatgtactaccaatcaaggaagcaatttcaagaagccaaatgtctacaattcgctagctggaaaatcttgatagtcatcgtgtacgcgcaaccaaatctgtcggttgcactgtctgatatggatgctgcattgcatgttttgcaccttgtcgttacgattgatagcgaccgtgtgtccagtaccggtttctggatgcgtattgcaagttgagctgtgcgctttaggtccacacagatgacttaatagcacgtttagctgggcatctattcgcgcgcggtttcactttcattcacgatcaagttcaattaacacttctatgccactgggttcgcgtctagggcattgaacgcaatgataccaattaaaattcattagagaaaaccattatgtactggatttactgtagatcacaataaaaagtttagaataaatcagcattggagttcaa

SEQ ID NO: 1401 - DNA, 1637 bp, Aedes aegypti
atggcggctgccatggagaatattacgaacgtgaaactgtatgatttgattaccagatggatagaagtgcaaaaactgcggccggactattgcgatggaaatccactgaaagttgacgtcatggatctaacgttgctgctcaaatcgatgggcctcaagctggaatacattgactttgagaaggaaaaactgaacgcggacactctaaccgtacaaatcgcttgcaataaatcaggcgttttggcaaaacttagctacgatttggtgaactgttcttgcccggataaaaacgacaaagaaacttcgttttgggaagtacaaggtactggtccatcggtattctccaaatttagaaatgacacctcttcgaaccttctcccggaaatttccgaaaagtgctctatggtttctaaggcgatgttgtccaaccttttggattactaccgaactaacattaaagctatcgagcgaggcgaagatgtcctgcaatctccgctgaaggttgctacccctacgatctgtgttacgagtccaggattgaccaatcatagtgccacaccatctgcagagggaaaaatagttatcgaggtcgaatcatctaatatcactgaagcaccaagaatcaaaaccgcaccagatggtagcattatcagacccaggtcattggaagaacttcaggaaagtccgcagaaagtattaagcgaacaaggggatactaaatcaaacacatcgtcggagagcataggaataaataacgcaacacgagaactatctggccacgggacagtaaacccaataatgattgaaccaactctttcgaactcacatgttcctgatgacagctcatttgccaacagcgaagccatgaaggcattgataacgtccagtcctaacgaaaaggtgttcgactcgatccttaacgccgaattgaaccaggaacgggacctcaacgtactccattgtctacaccaagcgcgccagcaaattgatgcagcgcttctagtcatgaagctgaacaacccgtacacagatcttagcaaggcgaccaccattaccaccacaccacaaacggtgattcggaacaagggagctgtgccaaaattaacggagcgaaacatagccgtagcgaggagaatgtctctgccaggtcgtccgtccgattctcccaggactgccgtaacgaacactcccggtatcccgaggaagaaacccacagttccgtcgcaactggctaaggcacgtggcgacacaccgcatcccggcacctcgaattacaaagccgtttcaatgctgcggaaaacaagctcgtctacttctgttgcgagcaccggttccgtgaccaaaacgtcaagtgcgccgacgatggcctccagaaaaccggttggcgttaccaaacccgtaggaagtgtgcggccaacggcaagctcggcgataaagaagactacgtccatcgctaggtccatcagttcgacgaaaattgataaaaagtgatttcaatcggtcgtcgttgggttgttgaagttgttgctgttgattgtttcaggagacacttttgtaaattttaattgctgttgaatcgctaggaatcgaaacgtggctcttaataaataaagtgattctttatacaagtttcgctg

SEQ ID NO: 1402 - DNA, 1007 bp, Aedes aegypti
cggcgaatgaacggatgaaaacaaaaagcgcgattccaattggattcggcgttggcgcggaaactatgatcagctgttgcaatttagtggtcgttctatttttatcctaattttacatggaattagaaaattgaaattaaattttacaacatgaatggaacaccagaagatcgtgtaaaagctgaaccagatgtggaggaggagattccacggtttgtcgcatcttcgtcaggcattcccgcctctgtagagctcgtagatcttaccaacgacgaattcttcagcgagttccaaaacttcctcggcaacctcaaagatcatcgcagtcaggccagcaaaaagcgatcccgtcagctgaagcacgtttcggacgtgattgcactgcaagtagcgcacattcagctgataagtttctatcaggagatgtacgttagttccttgttcggtatcgacttccggaacgtgatgatctacgggaggataatccccggcacggtcaagcacgagaacaacacacaaatttataagctggacgatgggtccggcgtcgtggaagttttctacgcacacgggttgaaacgggatttagataatctcactgcagtccacacctgcgagaacatcctaacgactcgcaccccgctcaacgaggaacaggttccgaaagatccccagcaagtggccgaccttaagctactcctcgggttggtaaaaacacgctgccagcaacggttgcagtattttcctttaggcactcggtgcttcgccattggccggccctttatgaaccgtcacgattgggtgtcgatctacgctcacagtatgtgcgccgatgacgacaggtccggcagatcggcagaaatattctggaagacccatctggccctgtgctacgagcagaggtacacaagtgatctgtttaggtgaagactaatttacacgtttagattagaaataggtacaccacgagtttgttaatttcatgcagagggaggtttactcttttg

SEQ ID NO: 1403 - DNA, 1084 bp, Aedes aegypti
cacaaaagttgtgttctccattctacttaaaggatcaaacccacccaccaacatgagtgacgccgtcccggaaacggatcttcccgctggaaacgcaatcggagaggacgaagaaacacttctcgcccggcatcgcaaggaaaaaaaggaattgcaagcgaaaattcagggcctcaaaaaggccaaggtagacaagaagaggaaaaaggaacagcaggacgagatcgcccggatggaagcggatttggagacaaggcatgccgaagagttgaataagttgaattctttgaaaataagtgaaaccgttgagtccgtggcggaggatttgggagatgttgccggaggggagagtgaggaaacgaaacagccaaaggtatcgaaagcccagcgaaggcgggagaaaaagtcccaggaggacaaagaacgggaagcccagatcaaggcagaagaggcactgaataagaattcccctcgaatcctggaggacaaaaagattgccgagcttctgatgaaacggggattggtgagctttccggtaccggccgacggagattgcctgtacaacgctgtgaaacatcaattggctcggataggggtccatgattacgatacggcggacctccggcagatgaccgccgattacatcgaggacaacaaggacagcgttattttctacatgaccaatccggacacgggagacattctggacgaggacgagtttcgcaagtactgccatcaggttcgaaacaccaaggcttggggtggagagatcgaggtcaaagcgttgtccagtcggttgaagtgtcccatcgaaatcattcaggccacaggaacttcgcctgtgcatggtgagggggaaaatccgagtcgaaagctggtgctgacctaccatcggcacatgtaccggctgggagagcattataattcgacactgccggctccggttgaaggtcaagaggaagatgaagtgggggaagacgatggctgaagaatgggagaaaatggagcaatgaggattttggaattttgaaattatcggtatatgtaaagtctcgcaataaagcatacaataatttaaacgagt

SEQ ID NO: 1404 - DNA, 751 bp, Aedes aegypti
cagtgattagctcgccagtcgtcatcaaatttgtgaaagtcgtcattctgccttcagcagaaaatcgttggaaaatccaggaaattgcaaattttcatctccctatcggtaaagtaattccaaaccaatatgggcaagatattcctcgaccacattggcgggcagaagctgtactcgtgcgcggcttgcgaaaccaatctgaccaacaaacgggaactgatcagcaccagatttacgggggccactgggagggcctacctgttcaaacgggtcgtcaatttgacctactctccggtgcaggatcgggtcatgctcaccggacggcacatggttcgggacgtgatgtgcaagaactgcaaggccaaactcggatggatgtacgaatttgccaccgaggaatctcagaaatacaaggaaggtcgggtgattttggagcacgctttgattaccgaatcggagggtttcccggaggcgtgaccttttctgttcgacccagtcgaattctaaaaatctaaatttaaaatgatacagaactgctgattaaattatcatcataggttaagtgactttcggcgtatgattgattataagaatttcgatatttgtgtgaatcaaaatgcgcataattctagtgttataagcaaatacggcaaatacccatcgtaataaattagtaataaaccacaaaattaatcataaatcatgtttattacaccggcaaatataaataaaatttaatacttaagcgaaa

SEQ ID NO: 1405 - DNA, 2457 bp, Aedes aegypti
cctcagacgaagaataccgtcgcggtgctgaacgagctaaagcggaatctggtgtacaacatggaatcgcagaccggcccggttcatgcgcccctcttcacgatgtctgtggtggttgatggccaaaagttcatgggtcacggtcggagtaaaaagttggcgcggatcgaggccgccgcggcagccttgcgaagttttatccagttcaaagacggtgccacactaaccccgatcaaaccactgcagaacgtggacttcaccagcgacgatccgatgatcgagaacagcattttcccgctgtcggatccgccggcgctaccggaatcggttttttctaacatttctctgtatctttcctcgcccttttcaactcgaaaatcgtcgcctactgcgtcagcggtcaacgcttcacgcaacgtcccggccggtcaaccgccaaagccgcaaccggagaagggaccggtcatgctgctccacgagctgttcaccgatgcacacttcgaatgcgtctcgaccgatgggcttcagcactccaagttcaccgtggtggtgacggtcgataaccagcgattcgagggcaccggcccgtcgaagaagatggcgaagaatgctgcggccaaggcggcccttgcgtccatgtgcaacatctcgttcagcccgctgcagcaggccaagttcgggcagaagaacgtcgaactgccgcagacgtttgccgacgcggtcggaaaattggtcatcgagaagttcaacgaagtcatgaagggcaacgatgtctactccagacggaaggttttggccggaatcgtaatgacccagggatacgacgccaaatcagctaaggtcatctcgctggccacgggtacgaagtgtgtgagcggtgagcacatgagcgtcaccggatcggtcatcaacgattcccacgcggaaatcatcgcccgccgagggctactggactttttctacacccagctggatctacactgccgacgggcggccggcaagaccaacagcagcaagtccagcatctttgttgctccgacggacggaacatcgctgtacaaactgaaggacggaatccacttccacctgtacatcaacaccgctccctgcggagatgcgcgagtgttcagtccgcacgagaacgacaacatggacgtggacaagcacccgaatcggaaagctcgcggccagctgcgcaccaaggtggaatcgggcgaagggacgataccggtcaagagcagcgagggcattcagacgtgggatggtgtcctgcaggggcagcgtctgctgacgatgtcctgctcggacaaaatatcacgctggaacgtactcggcttgcaaggatcgctgctcgcgtccgtgatcgagccgatctatctgcactcgatcgtgctgggcagcttgctgcatccggcgcacatgtaccgagccatctgtggtcgtatcgagaactcgatccaaggtctaccaccgccatacaggttgaacaagccgaaactggcgctgatgacgtcggccgaatcgcgcaaccagaccaagccgccaaacttcagcatcaactggctggtcggctgtccggatgtggagatcgtcaactccttcaccggaaagctgatcaacaacaacaccaataccaacaagatgtcccggctgtcgaagcaatcgttctatcggcggttcgcagccgtcatcgagaggcttccgcatgcgcgcttccacgagatcaagcccagctacggcgaaacgaaaatgtgcgttccggagtatcagcaggctaagaaggaactgtttgccgcgttcagcaaggaagatctgggcgactggctgaagaaaccgatcgagcaggatcagtttacgctgatggccccgaaaccggaggaactggccgcgtcaacggcggcgtcgaccgcctccaccccggtcaacaatggctccagcagcaatggttccggaccggtgtccggaggtaaatgacaccaggggaaacactccggtaagcatcagcaacaccagaatgggggcggattgtcctcgtcctccagtgcaaggctgttttgaaaacgcccgcttcagggcggcgtccgggagtccaattaggatgctcttgaagagcaaaagaagagaaaagcatgtgaaattaaggtagctttaagtccaagtggtagaatttcgtcatttcgtaccttatcgaaactgtgtagtgtgaagcggtttaggcgttacttgtttgtattttaaccgttttttttctgtaggctctaagttgaaagtagcgaacaccattaattttatgtttagacattgattttatctccatacttttaagcggtagcacgcttcacatgtgctaccaatcggataagagttgatcagtctgatgtgattccgacgggagtttaagttgtaaaaacttcacattacttttgatagcatgaaatataagacactgtgctgcct

SEQ ID NO: 1406 - DNA, 306 bp, Aedes aegypti
atgtctttccgtcgcggcaaaatgattaaatcttgcacgaaaagtgagtgttttaaaagtgtagcttcagccaaaggtaaatatgatcgtgatttgcctgcagaacaaaaagatccagagcgagacggtcgttccgctggacaaaggcgattcctcttccacacctccgaatgccgccgaggaagtgcagaagaagacgcacactttttatcagctcaacgggaccgtccgcatacacgaccgaacggaggccatcaacatcatggggaatccggaatccagcagtatatgccattccggagctga

SEQ ID NO: 1407 - DNA, 3279 bp, Aedes aegypti
atgctgacactgaccggagcactatccttatcgccggagagcaaaccccaccaccacacctccaccgccgggggaagtaatttcccgctgcaacggtacgccatgggcaagggtcggcccccaccgcctctgatgggacctggaccaggagcaggtccaccaccacgattgatgtcccgggcggataatccgatgccggcgacgccactcaacaacaatcaaaccctggaccgctaccggcggctgattccctacatgacattctacattccatcatctaatggcgacttcagcctgccaatcaatcaggcgtataattatatgcccattcgctcacagcgacctcaggaaccgcaacagtcacaccttcatcacagccaacagagtggcaaacagacaattttgtcgctacagcaataccagcgacagccaccgcagcaaagtggtttaggcggcgaccctccactggtttaccagtcctatcaaccgcaaatccatcaatcaacacgctatcagtcctcttcatcggcatcatcttcctcggcaggatcgtctcaaggaaactcatacaagaccatcctgataaataactccccaatcaagtacgaatactcccaacgtcatcaattagcaccgtcatcttcctcttcgtcgtcgtcgtcctcgtcctcgtcgtccggtagccgtgacccaaatctggccttgctgtacaaccctcgagcccagttacagcattatcatcatcaacagcatcagcagcagcaacaattacagagcccgccctccaagttgtatgcgattgaaattcagccacaggcaaccataccgaaaccacagccgtcgattcaaccgaatggatatagcagcggaagcagcagtgcaaacgaagggcctgatcacattcatctattgggggccactccggctccatcagttgtatccaccagaaatccaattaagtatcaacccgttgcagtttacaaaaagcatcagatcagtccattcctacagtcaaataagctaccgggaagttttactccactagcgtatagtaatggtggatctccaggcggtcaatacattgttcaagaagagattcccgaagaattagaagagaagcctctgccgcgtcctacaccatcgtcggtctatagtgcaccaaaacttcaaacgacctatgtctacgttaaaccacaacctgaaacgaatcaattgtactatcatgaaaaacctgctaaaccttcgtctacgtctagctcgtatgtgacttacaaagagaagccaagttacctggaagagcaagaacaggtctacaagccgaaatcaatccccaaaccaagttatgaacacgagctggaagtctacaaaaccattccaaagcctgtttctcaaccgaaaccaacgtacgtgaatgagcaaatcatatacaagtcacaatcgaagccaatatcaatccacaaaccaagttacttcgaagactccgagctctacagacctggtggcaaaccgatccctgttcccattccagtagctgttgactactcaacaccacggactgtcccacaacgagtcgagtacactacggcacgtccccattcccattcaatccccatagaaaccttcactgcctacaacccaactgcaggaagctccccggccccacccttagtctcaacaaccgcacacccgaagtactctgtgcgccataagtccccacaccacaaacaacttcgaggttccacgaaggcacctcccatccggcagcatctaaccgagaacctcaacccgtccgacatccgatccccaaatcccaactacttcgatcagtacgccgactacaaagcccaggtcaagcagaactactacactcaaaacaactacattccgctctcaaaacccccgaaaatcaccaaactcataccaacgcattccgaagaaaaacctcgccccgtctaccaacacaacaagccccgtcccgcaactccaacgcagatcatcgacactgccagttcaaccggatcgacatcgctcgctgacctgctcaagaaactccaggacagcaaccatctcccgaaaaccctaacccctgataacatcgacaattccatccgaacgctcgtaaaaatcctcaacaacctcaaaacctcccagcaagtgcatcaacaaccggaacaggacttcaccgcccccgaagagcctgaccacatcccacctcccagcgcaaaagccccacccaaacccgccaagaagccctcgtcgcaccatagccacgcccacgatgacgatgactccggcagttcgtacatgccgcaccatccggagttgggaccgacaccgccgggcccaaattccggtcgaccgggaatcgattatccaaatctggccgaaatccccgagaccagtttcagctgcaaggagcaacggtacaagggcttcttcggcgatccggaaaccaactgccaggtgtggcactattgcgaccttaatggtggcaaggcgtccttcctctgccccaatggaaccatcttcagtcaggttgccctgacgtgtgattggtggttcaacgtcaagtgttcgaccacggcgcagctgtacgtcctgaacgaacgactgtacaaatatatcctgccgttcacgccgaagttccccgaagactacagcggaccactggttgataaatacctcgccatcaaattccaagagatggaagaaaaaatgcagaagcaacgcgccaagggtaaaccggtgtcgaaaccccgaccggagatcgagaacgacgacctgaacggcaacaagctggaggacaacgacgaccggtacaaccagaaccagccgcacccggtgcagtacgtgacggagaattccatcgagccggcaatgcccagtgcggccagcatagtttccgcaacgacaccgataaccctggaggacatcaacgccgagtacgatcgggctagcggagcgggcaccgcgccggatatggacccgtcttctggagaaactggcccggaagcggcgccacacagtgctccgattgtggtaaccgctccgagtgctccggccacttcgacgggagcggaatacgaatccgatacgagcgttccggtaacggttttggcggaaacgatgtcccaagcggcacggtacggatcgaatgatcacagctcgatacgagcttcgaggccgaattctatgcaggccctacgagcggtggcaatcgaggtgaaaaacgacggaaccagtgggcatttgacgccagcccatggctacggggaataa

SEQ ID NO: 1408 - DNA, 750 bp, Aedes aegypti
atgacagtgtccattacgcagccccagcaaccgatggatatcgtgtcgtcctgcagtagttcgagtccggtcggaaaggttcctccagcgctggccactccggctgcagccaccaccatggccaccgccggtagcaccttcaccaccagtgcgacggtacacagcagtgccggaacttgcccttccagcccgtcggccaactcgagcggttcgtccgatgcggaaggtgtcgtcagcactccaccctcgtcctcctcgtccgcttcgacgcacaccaatccgagcacggccctgcggaggttctacttccagaaggcccgcatcagcaaatcgcccaaatcggcctcgatcgccggcaccggaccaccgtcagttactattccagttggacatcccggtgctccggtattgcagtcgtcatcatcggccgctgtgccgaaggtggtagtcatgggttcatccacgacatccgaagccacgattaacacgtccacggattcggcttcgacacacgtgactaacgttaccacgacgaccgacaccgagacgaacgattcgatcgatatgggtgaaacatcgggccaaagcgagccgctgctcagctcgctggacgacgaaagctccagcatcgtgatgaaccagagcttcgaagacggagacgatgagaacattaccgtaattaatggaccagacacgccgctgttaataagctaccaggtaagactaattaaaacgatgtttgctttgtaa

SEQ ID NO: 1409 - DNA, 917 bp, Aedes aegypti
ctgcaataagcacgacattgtttggcaaacacactaacagaatgacacgattttttgagaagtttacccttttttgtgtgataactgtgataactgcactgtcgctcataatcgttaccagtgtgcaattggcttacgagcctgaaacagtgataaatcgtgataacgacaagctcatggatcagctaaaaagcatacgccaaagttctggttggatcaacaacagcagtgaaaagtgccagcaacatatccatacgaagttattcatactagtgcggtcacccaaaagaaataggaaagtgcgccaaacaatcagagacacgtgggctctcactggaaactaccccaccgtacaaataaaatttgcattaacaaagctaccaagccagctaaacgagcatgaaagcttcattcatagacacctgaaacgttactatcaccaatgtattccgggtgactatctactaattaccaacgacatgcactttatcaacacaccgcaaattataactgccataaaccagcgattaccccgaagtcacacagcaatatgcgcaaaagcgtcgcccaacgaaaatgcgatgaatgaagttaaatatctagggcagtgcaacgtccaagcaccaatccttttctcgaaagacgcggtgcgtggcttattagatttaaatattcacaacggccgctcagcaatggcggagagcattatccggtatggcgagcatttatatctcacgccgaaagaaacactgcgaattatcaacggttcgatagatgccagcaatttgctgttctttttctccgatcgggtcgaaagcgcatccgatatcagtctgctgtggaatgcatcgagagattatacggctgtggaatcttgattagtagcgaataaaggaaacgatgtacttgtaccaaaa

SEQ ID NO: 1410 - DNA, 880 bp, Aedes aegypti
atgcagattgcggagaagatcggaaatccaactccggctttgtcattatgttcaacagcggcactattagctgggcgtccaggaaacagacctcttcccggaatgatgagtgtcgattacgctattgtgggaaataatgccagcatacttgtgtcgcctttttcacgtttcggtaacattctggacgtctgcaacgtagttaagcgagtgaccagcaaaaacgtcgatgaatttatcgccatggtcatcaccagtcagatactgtccattatagaccacctgcacagctgtatgatcatccacgccgacatcaaaccggataattttctgctaatgaatcctgttgatttggattctgcgataccgtgcgtgcaactgattgactttggtgtttccattgatctcaaattgtttcccaaggacacaaccttcagaaaagtcgtaacaacggaatgtttcacttgcattgaaatgctcgaaaggaggccgtggacttatcagccagacctgtacggtgttgctggaacgacacacgtcatgctgttcggaacatacatggaagtgcagaaagatatcgtcaattggaacatcaaggcacggatgccacggtatttccggaaaaccgtctgggacaactacttctcatcgatgctgaacatccgtgactgtaacgaaatgcccaacttgcaagcgttgagaggcaggttactggcagaaatcgaagaaaacagaaagtatattcgtgataaggtaagcgagttcaatcaagctattttatccgggtgaacacaaagtcaaccattgactacagatgtaaaagtattttaattaatggaactaatctttctaatcaaatacaaacaatttcttactaggactg

SEQ ID NO: 1411 - DNA, 1655 bp, Aedes aegypti
gccgtggatttggctggtgctaagccatccggattgttgttcggaagtgtatattgaaaataaccttactatcaagcagtgaaaaataagttcagcgcgttacgtgtgatcaaagacgccttcggtagaatgctttatgaccggtttcaattggctttgttattttttgtttccacgtgatatttttcgcactgtgtattttggctgacagtacaacgccgccggataaatcaaagaaaaaaaaacgtgatgttgtaaattgtgttaattgattgtattacataaaaaatgcgtaaaattaggcataaaaaatgtggtcaagaaatgacaagtggtattctaggttcggcatagagctatgtcatctcgagggcgcattctacgaaggctggccgtgttcgactttgaccacaccatcagcgagcacaacacagacattgtagtgcgtgatctattagatcagaatctgatcactccggagctgaagagcattgtgcgctcatgtggctggatcccttttatgcagcgtgtatttcggctgttgcatcagaatggtttcacaccttcggatatcatatcggccattcgcggaataccagaagtacctggaataaagtcatgtatcgccgaaatggctgtgaataattttcacatcatcataattagcgattcaaattcggaattcatcaaagcgtggaacgaatttaacgacatcgagaaatacattcataccacctttacgaatccggccaaattcaatgacaatggattgttggaggtgcatccttttcacaatcaaactgagtgcaatataagctcgaaaaacctctgcaaagggaaaatcctagacgactttctggaaaaacagttcaacgaagccgacacggagtatgagaaaattttctacataggtgatggtaaaaatgacgtatgtccaatgctaagactgaccgagaatggatttgcatgcccaagggacgggtacagctgttacgacgaacttagcgctaccattgccaaacgaacggatccttatgaggcaaaaatcctgaggtggaggaacgggagccatctgacgaatctgatttggcgagagctatgaattggagcagttgcggcgtgcctctcgttttactgaagtgattcaaaatgctacgtccacaaggtaggacccctccctccccctcgtcacacatcgtcacaaattcgtgaagcccccctcccccctaaaaagctacgtcatttatggacgacccctatgccggaagaacgacaagtaaagataatattcaacagagaacccggacgaggccaccgactttgtagtagaccgcacacacgatggctttttacatataaagaggacttaagggcacttaacggcgactggaagcgattggcccagaaccgagctcaaaggaaaaaactcataaattcggcgcagattcgtcgtagtcgtagtttctgaggtatcttcaaactgttgggattgtactgtcgcacccgtaggtataacagtacgggcatcggtagtgtttagaggtatgctttgttatgcttagtggtaaagaatgaattgtagatacctgaatgaaataaaaggagccagttgctagttgggttatcagtcagtagctgtctgcagagaatggact

SEQ ID NO: 1412 - DNA, 1967 bp, Aedes aegypti
atggataaactggaacaggaatatcaggatgcgttgaaagctctgaaaattgacgatgcagccaagagaggtctcaagtatttcatcgaaatgttggaccaggaaattcgtaaaaagcattcggactgtagcatagaagaagtatccgatattgtccagaatagctacaccaagttccaggaatatatgaacctggaaaatgccccattcataaacgtatcgcaggaaaccaaagagcaggcgctagactttttcgaaaagtgcatcatgaccatgaaccatagtcgattgttttcccctccgacgacaaatgacgaggagaaggattcgctcatccagaaacgcatccggcaactcagctggatcaatgccaaacatctggtgtgcagtatcgatgaggtcaattcggaggttcgcgatctggtgtacacggccatcacggagctggtgtcgatggattcgtttcattctcctcaggaaaaacttgaatgcatcattcgttgttgccggaatattttcagtctgttgaagcaatccgtgggtggtcccgcaagtgcagacgaatttctgccagcgctaatatttgtagtcctcaaagcgaatcccgtccgtctgcacagtaacatcaatttcataactcggtttagcaacgcatcgcgactgatgagcggcgaaggcggttactatttcaccaacctgtgttgtgcaatatcgttcatagaaaatctaacttcggaatccctgtcgatgtcggccgaggaattcaatgggctgatgacgggtgagaaagctggaccatcggcttgggagagcgcgctgatggcttgcgaaagcttacacttgatttcggagaatatgaaaacgatgaaaaaattaggtacccggaatgaagaaattttgaagggcatcgaaactctaaacgaagacatcgtgacctttcggaatgaaataagccaaaaagtgactgaggtcctagaccgtacaccgcttgtattgaaaccgattcgcacaccacgacgtctggagaaacgtaatgcacaaatttttagctcagctagtggccaccaaccagtcgatggaggtcactttcagtcaaatctaatgaccgtcatgaaggtaggcgacattgatgaaggaaaaaagtcagccatggatcccgctttcgcaccgccaaccaatttcgatgatctagttcgaaatctttccgatacgctggtcacgcctctagtttcagaggaaagtgataagaacttatcaccttctccgttgctaggagttagtgcgagtaattcgtctgatctgttgtcagcttcacctatttttgattacaagagagtttttgacacacctttggatgaaactgcaactccggacgacatggctcacacattcatcaaagggattcgtaacataaactacgattttgatttctccgaccatagcggcgagaacagtgcagccgacgaaattgatggaaaaccaacgccatcagctgcgcaaatgagtcgattcgatcttgaagagttcgaccctttaattgcaaaaaaacgcgaagagactgtaccatcgttaccactgcagcccacgacgagtggaagtaacctattggatgaggattcaccgcgagcgcttttgctagaatcgcccatcaaaccaaccgtggcagagtatcaaggcttttcactgcagggatgcaatatcccaaccataacgtgtgccgccggcgatatgggggcttcctgttccagcacgaaatcacatcagccaaagtcgtctctagataatgccctaggtagtggtgggagcttgatataaagttgaaccctgtcatgcaggtgagtacagcttgtatgtagtagttgttaagtccgttatgtgtacgtttgaagatgtttaaaatatttatcaacctttatcagcaaatattacaacgactataatatatagatgcaatacttatcaataat

SEQ ID NO: 1413 - DNA, 2679 bp, Aedes aegypti
atatcataaactataacaacaactgcgcacacaacaatataacttacagttagctttcaacataaacaacataaaaaaggaactaaacaattaattttcaatgcaaaatttacaacagatttgacggtttccatgtatcgttaagcctgttgataaactcatgaaactttacacctcggggccatgttttagtatccaaagcaacattatccatcgtttatttaaaacaaccttaaatgatatatagtccatatcattgcagttttccaacgcggtaccagtgttgttatatattcaggcattcgggttccagagcatgaagtgaatcagcaactaagcgagcgatatcggtttctgtagcactacaagcaatattggacaaaacaagcgagaaagattcatcactgcattggtttgtcgtacgatgactgctattgttcaacgttgttggtgttgaaacaggagttgaatgcggttgcgaggaagcggtggtgggagcagatcgatcgatttttttcgtttattttggatattgcatcattgattttcgccacttgaaattttagttcttctagctctgattgaattgttgacgtcttcggttgcgctcttggtgaattagtgatctctcttgccttgcagaattcaaacatgcattcgtcacatatccaaataatgtttttgaaaagtgcgcagaggtcagactcactgacaccaacacatgatgcgtgaaaccttttagcgcatcttccttcacagatcgtgtataagccgttcaaggtatcgatgtctgcagcacactgtttgcatacggtatccatgattgactacacaatggctttcagctacgcgttctgtgcagtgataatctggcaatttcagcacgatttaaagtcaccaacggactataacaatgaaatatagcggcacaccaacgttattgcttatgttttcgtgcgtgaagtcaaatttaagcagttcttcaacgtaaaatcggcattcaaatacggacgaaaacgacactacgttcaacggagcaaacaacgacaacgaagttaatataatcataccaataacgtgcttatctccttattgaccacaagctgcgatacgaaaccgttgtggtagtggaaaaaccacagataactttagaatcaatgataaaatgactgatataaaaccctgtctcactaacagttctccaatagtgcattgcaacgctgtccaagtaatgcatctctgctccagaatgttagtgaaaattttattctttatctgtgtagtctgtgcattgcattgtaatggggcaacggaggtgtccagtgagtcaaacattgccaaccgccccatcgatactagcgacagctttggctatgaagtcctacttgggaagctggaagatctggagagcaagttctggaacatgtggcttgagatgaaggaacaaaatgaacaaataatgcgcaaccatagccttctagagaatacccatcagggaatgctttggatgctgacaaggctagaacaagctgtgggccacaatatgaccaccgtgatggatcggtcatgggagattttgcagcagcaaatcagttgtgccaatcatgaaaattggaaacaatcagtgcttgaaatgctccagaataaaacaattataacttttaagaaacaattgcccactatgaaatcttatgaagattgcaccaaagttctagtgaatacttctggaaaatatatcatacatccacagaattttccagaaccattcgaagcatattgcgcacaggaagtgttcgaaggaggatggcttgtggttcagtaccgttttgatggatcggtcgacttttatcgcaactggactgagtacaggaatggattcggaactcttgacggagagttttggattgggttggagaaactacaccgtttgacgaaaaatggtgactatgagctgattgtagaattgaaagattacgacggaacttacatatttgctcgctatgatgactttgagattgacaatgaagaagagaaatattcacttaagaaattgggaagttatactggaagcgcaggagattcattgagttatcacaagtcaatgaaattttcaaccttcgatagtgataacgacctatcttcattaaattgcgcaaaaaactatgatggaggatggtggtataaagactgtcattacagtaatatcaatggattataccgaaaaggggataatacaaaacatctttgctggtatcacagaaaaaacaattatgatggattagcatattctcgaatgcttattcgaaaaaaatcataagcttctgttataataagtgagttgagttttcttgtgaaatatagtattcttatgattagtcgaagctggtatgttaatttcaaagttatcgaatttattttttcgaattccacattaataatttctctgcattgatcccctctttcgctaaaaactttgccaaattaaaaaaaaaaatcgggttctaaaaatagtaattctttatcatacaaccattgggccagggggcctggcctctccgaaacgtggacttgctctccctaaaaaaattaaaagtagatgatgagataattaaactgcatgttcaatatatattttccaaatttctggattttaatttttagaatgatatagcagtacat

SEQ ID NO: 1414 - DNA, 2726 bp, Aedes aegypti
atgtctctagtaatcaataatgaaatgctggacaaattatctcacgagatttatgaaatccgtgtccgggctttgcacgacattgaaaacaaggtgaagcgggccctttgggagcaacaggagatcaagttccgtcccacttcgttgctgaagaacctgattcgttggttcggtaacgttcccatttgcgaggagacgacagtgctggagctgatttcgttgcttttgaatagccctcatggtttggctattgtgagccactttacgagtaaacgtctcattaccgagatggggaaagtgaaatatctggttggtatgaaaccggaacttgccgaacttgtggacaatatcattcacacagtgagaagcttcgaaatcaaagaagcgtcgagaaaccaacagagtattgtagatagcttatcaagcctcaaacttgaatgcatcgatctgacagaatctccccgacaaagcttgggtaccacgcaggatagaggtccctattactacacaaattgttgggagataccactggcacctgatgccaaagttttcaacgatcttaacgaatcattagacgctaatggcgatgagactgcaatcaaacacgctttcagttatctcgcaaggtccatcaatgactatccaccggagtttttcttacagccaccgtatgtgttccattctttgcttcaattgttagaagcgaggcgagcaaagttgaccacaaccatcgaaatgtttcatcgtttgaccatttcaattcaaaaacgcttgaaatccctccaactgaccagtatatacatctacaaggatccaaaaactgattgtcctgagcaactgaaatgtgtgcaaatctccgttccagctttcgttcacgatctatgcatgttaggtataagccgcctgaaagaagcgtccgacgatagcgatgtccaagtgtcgaacaaaattttcaatttgctccacgagcttcttgagttggggcaaatgcacccgctggaagactttcaaatccgtcaaattcgttacgagttgggctacctgacgaagcactttcgtcaatcttgggaatcccacagtaaaagtttcgccacccgaacaaaataccttgtaaccattagtattctttcgcgattcttacaaataacacaagatgcccaatcacccgagcctatggatcaaccatctatttccaacgacacatgcttcccgcacaaacctcactacaacccggcagagttcgaaaccatcaactccaccgcccaaaggcgaacaaccatcgaagatgacgaccagaattggctccatgaactgcaactagcagcgctggattacccgatgaagcacatctacccatcgatctatgcacccgtacttgatctggctctgaaatccggcaacactcgtaagttgcaagttcttctcggtgccgacgaaattctggcaccggccgtggcaatcttgaggcagccatcagccatgtccgatgaggagctggtcatgaatggcctaaatgccgtcgatacactccatttgcaccggtcggtcgctatggttaaattgttggttcgagctgtgggaaatgccgcgtacgaccaatgcaatgccgtgatgaaggattacataagctctctggacgagggagccattctaactcaccgcaaaggagtgaacaagttgggagctggcaaattggcctcgcttggcataccgctgtcggtggaaattcttgttgaagttatctgcttcggatactgcagcgccaacagaaaggtagaaatttattattttgtttgaataaactgatcgatttttagagttgagcacattaccaggaaaatgtcttccatcttcgagcgctaccagaagggaacatcgttcaccaactggtccgagcggctgggctattttttcgatgccatcgaattgattgactccgagatgaaaaaagcctatctaataacgctgctggatgcggcgatattcagtgaactgaagttgctggtctccaaccgagatctgaaactggttccgtacgaggaaatagtccaacggctgcgagatcgatacgatcaaaaagagtgtgacttcattcagcgatacaaattcaacaatcgcatccaacagccaacggaaacggtgcaggattttatctccgccatcaaggtccagtccgagctctgtggtttcggcaatttcaaacattctgcgatcgtggatcgtgtggtaatcggaattcgcgacaaagttctccagcgacggcttctgtgcgaagaagaacttacgctgaaatcgatggaaaagatcatagccacgtgggaactggttagaccgaatcaggtcgagaagcgacccgtcaaagagagacttggaattttgccaatcagtacaacgtcagggacatattttgaaggtgctcaacgtaagcacaaaacgggatattcaaactcgatctgtggcttctgtggtaaactaggccacgttacaaggcggtgctttgagttgaatcgtttgaaggaagaaaaaatggtggatgttggcgccgaaatgagaacacctatcactcaagccaacgacgatgacagttataattggaaacgtttgaagaaaattcattgaaaaaaggtttcaaccgtttaaacggttgattgactttaatttattttattgttatcaatgtattgtgaatttaattggtagaataaatgattttactacgttttgat

SEQ ID NO: 1415 - DNA, 5585 bp, Aedes aegypti
atgttcgacgtggaaacaatcaatcgttcttcaggaaaagttcaatcaatcgttttgaaacatctgaaacaacgatcaaaactattttcaatcaaacaacaagcagaaacaattctcctgtttgtgttgaactcgcgctcatttctactagaacgatggaatgatcttctagatattattatccccgtactaccatttctgcaaacggctggcataataaaatcgcaatcgacactatcacgtgctatatttgccctactccatccggactctcaactctcagcgactgacttactccgaggaaatctacgctacctttttcaggacgacgccgatattcgtgaggaagccctaactcgagtgctgttcctcatgagcgttgcaccgaacgcacatcagtattcacctaacatagagcatatccgtgacacattgtccaatgccatttgcttgacgaaatccaagtatgacgttggcaagcacctttctacggatgtgtttgaaataagtgccgtcaagcccctgttggatacactggtgcaggaaaattccgatcctgggatcagacggagtgccctcgtccagctgaacgccatggctgaagatcccgttctttgcgagatcatccataaagctaacggatgggcgtttatattgcaggtgttggacaatgctttgcgcgagcagcacttcctcgactacccggacagtgcggtaccagcagttggtgttttgacgaagctttgctttgccattcctgagtttcggagatttttggcggacgatgtaaacgtatactatttgattgtaagatcattgttgagttttcatcatttgccaatttttaaaccggattgctgttcactcttgttcctgttgctgttcagtgaatacactttagggtgtgggaaaaccgtttcgctcccggcgatatgtaagaactacaaaattccgtttatttgcgagtaccactggaagtatagcccattcaacgagttgagctacttagaagagattttcatcgatgaagagcgggacgatcagcaatttactgcagaaaggaacaccattttacgattaagcagaccatgtggcatggaatgtgcaaccactcgaatgcaacaacaggacattaatgatttagaaagcatgaatcacaccgcggaaaacatggtctatttggagagttatcgtcaggtcgcttggcagtttttacgattatcgttcgcaagtcaatggttcgatgcatttgaaaatattatgataaatgctaaacgatctcggcaaacacttgactctggcaaagaagatggcgctcttgtggactataatgtgctgccccctcacttggtgtcacctaagcagaatgaggatgaggatggagttattgaactggatgatggctccttggaatttgatcgagtccttcacctcacaaagcaagacttgaatatgattcgaacatctcaaacagatgagatttttcgcaacagtttgaaagctatagcgacagcggtgtcccacgccgaagtgtccataggattgtcaggattagaaagtaatctaatattgccaatgagagagcaaattttacacaactcaatcgtaaagcatctaaaaaagttcattctaactccgcccaacactccagccgatgaacagctactcatcgatgtgctcagtttactgggagatttgatacaaattggatacgagaacgtattggtctggatagtgactctgttgtttgaacaaacgagcatttttattcaactgctcaaatcggaaacgtgttccgaagaactgttcatgaaaaacgtagacttcatccaaattgtcctgcaagcggctcttgcttgcgataacccaaatgtagcaagcctgcttatcaacgaagaaggttttcaaatgaaggtcaaacgggaacacaatttcaacttgttgaacagacttttggaaatcataacgaaccgtttggataatgacctacaaaagtgccacatcggaaatgtcctctcgttgatcagtttggcgagggtgatagcacttagtgaactgatcgaattcgagaacaaatttctcaaccatgtcatcaacaaactgtgttcgtacattgcgcgcatcggaatgcttacctattcgggttcaacgataataaagaattgcctgatggtcatatctttgctgttagaccaaatgagagaagttcacctgaaatcgaaacacttcaaggtgatcgcatcacagtgcagccatactagtatactgattcgatcgtgtgcctggaatgtgcttgcaaaaatgtcaaaatctttgtccggagcgcactcgataattaaggagtgtatctatctacccggtggaatgcacgcttgttgcatcaaaacgattctggatccggaagaagccagtctggttaaggaatctgctgctggattgctcataaatttactatcacacaagggggacaaagatgaacctctgcacaagtatgtaattccgtgtgacaaagtgtctagcagtgtgaaagatgtagatgccattgaaacacttttcacggtgttaagaaagcataggtttttcgagcaatctctggaatcccttcaaagcttcaccacccgtgatgaagtagaaattggagaactcgatggaattcaggtggtgacttgcgacgtagtcaaaagctacagcatgatattctcttgtttgatcgacctggcaccgggtttaaccgaacatctaatcgagaagtgctgcttgcagcgtttaatgaactgcgtttcaaatgtgcctttgcatccgggaaaatccgctctgttgatggtatcggaagtgtgcaatttgttaatgcgatgtctgacgtacaaagaggacgatatatgtgagctgatatctccctatcaggctgttattggcgggataatttatctactgaatggcgacttgtatcaaagttacgacgagcgtttacttcgccaggtcaccggtaatattatgcagcttttgaacgtactggtcgccaataagatcggtaatcaacttattaccggtgtactgtcggagttgaaactggagccacttctcagattgatcatgaaagcaatttcggaccacaaacagaaagaataccaaattgcatgcctccggtttctaacgttgctaacactgttgtcggataacacttcggtttgcgatttccaatcattcctcaatctcatggaaactaccccactccatcaagcgtcaaccacgtctacagaaaacttacctacaaaatccggaccgaagatgcgctacttgaccgataatttctgcatagacgacgacgatcgagaaaatcaggaccccaacgggttgaaaaagcgccaaacactgccaatcaaacagaacgaaaatgaaaccatgcaaacaggaagcgaatacatgttttctgcactgatggaacagtttcggattgcatgtttaaaagataaacccgaaaatggcgcactggtttccactctccaaaaaagaacactcttctccgcaattcaggtgatgctgcggcaatcggaaaaggctaggaaagtagcccgcacgagcaagtttctggaaatgcttctcgaccgcatggaagctatctacagtggaattggcatcaactatcagacttttgtaaagaagcatggagaagggcgaaaagctccaatcgtggaggagctcacgttcattgcggggattctatcggcgtggttcatccaggacattctagtacatcaggccaacatcaactatatatgtcgattgttcctgcaatattggccgtggatcagtaacaaccgtgatttggagatagcgttcatgaaagccttagtgtgccttaccgaaaattcgatcgtagtttgtaaaagtctgtgcataccgcacgcagcacatccccattccatattgaagcttacaatagccacggtaacgggtgaaacaggtaaagtaaaaggaccgaaagctgaactgacgttgcttcgcctttgcttgagagttctgatgaactgttgttcctgccatgaaggacgtgtgatgatcaccaagtttaacgtgctggacaatgtgagcaaattgcatccggttgttacaaaactgcaaaagccatggatcacggtgactaggctatggttggagttctgggaactctacagtcgacacaacgatgttagcgaagtcaaacatctcacagtgcttggagcgctcattcgtaagtcaacgccagagttacgtcgcttcgcgctggaaattatgcgtaacatgtcattcgttagcaacaatcgaccggcactgcttgcttctcaggactacatgtactcacttagagacgtcctggacggcacggatccggccgagcagttacttgtggtaagttctatatggaaaataattgctaacaatttcaaaggcaaagctgccatcaaaagcagcccactgccgaggcgattgaacgctttgctcaggcagcgatctttgttggaacgctgcgaagatgatgatctcttcaatgtgctcacggtagtggtgagcctcttaaatgcataacaattagaattaggatcgatttaaaatttattcacgcttttttgttaaaataatacaactgtacagctagatgaattctaaaaaaaaatgctttttgaacgtttgcgaaagaactatcctaagccttgagttatcctcgaattatgttgtaagcaacgaacagcatcgtcatgaaaatgttaatagtgataatggcacccttgttcgggtctacagttgtggtgctgatgcctgcacttgtgcaatcttcaatgttctcgaacagtcgaatgtaattctgtactgcatgacccagctctgcatgctgtggagagaccaatcccaacgctgaatcctcgaacagtaagttcttgacacctccaaagatgttgtacattcggaaatcgggatcattttgcaaatagatatccaaggagctaagggcgttgattataccagctgtcttggacgactgacgtcggacaactatttccccatcgacaatcgtagtaagataacattcttcatctacctggaatcctggataggctgcaagtgatccatttctgcaaagaactcgatagtcgtttggattaatgttcaaagcccgggcatgttccgccaagttttgaacctcgacgatcgctacttcaccctgcgtattaagacaattcagtgcaccacgggttccatagaacgggttattgacattggcagcacaattaatattcctttccacagtcgcgtcgatatcagccttgccctgaacctcagatggttggtcttccacttcatctggcaaagcagttgaatcttcttctccatcatcattgccactgtccctggatgccaatggtactggatcttggggtcgtactggcacattgcacaacgaacaaagcgattcaggattttcccctcgaggatcatgcaaactatcccgagaacctggagcacacgactcgctgaagaaatctcccaacagacgaccgtaatcacattcgtgctgatcaaaaatgcctcgagtttttcccacattt

SEQ ID NO: 1416 - DNA, 1143 bp, Aedes aegypti
cgaatgttttgcgtctgatgatcgctttttgttgcccttccacatcgcagtttttcataatatcgatgcgaccgatacagaacaaaacgaaatcgagtgacgattgtgagaaaactattaatttttaagaaaatggattcataaagtaagacagtttagttagtttataagtgtagaaagttgtgcacattatttgtcgcatccagtgaccgaatccgggataccccgagagcaaaatgactttccttagtttgctgagttacttctcgctgctggtgcagatctgcttcgtgaccgtgtccatagctgctggcctctattaccttgccgagttggtagaggagtatacggtcatggccaaaaaggccatcacatggatgatcatgggttccgttctgttgtacatcgttttcatttttacggaacgtttctcgtggacactaatactctgcggtcttggggcgcaggcccttcatgcagccatcctgaagaacttcccgtacgtgaagttcctatcgccctgcttcctaggtgctgtgatattactcctggccaatcattacttggcgttcatctatttccagcagcaattccatccattcaccgaggtaatggcatacttcacactgtgcctgtggctggtgccattcgcactgttcgtgtctctctcagccaatgacaatgtcctgccgacgagcaacgagaggacgcatctgttaagtgataacgacgtggtgacgaactacttctccagccgcaagaagatcggtctgctttctttgttcaactacgcgaaggaatcgcttctgcccgaacgaaacaaaaaagcattttagttgtacttaaatgatctccagttattacgtaaaaccacccgccagttggagggtgttaatagggactgtaaatgttttgccatcatttgtacgaccactagggtgtaagcgtgtaaggtacactgtgtaacataatgacgaaactacataaaatcttaaggtacgcacctcaaatgtgttcttttgaacccccataagctactgtgaatgtttgagcggaattcatccaatctgaagggtctaaacgagcttgaaacttgtatggaaaaccgttctagtataccgtgatgctatcatatttcgcgca

SEQ ID NO: 1417 - DNA, 1381 bp, Aedes aegypti
gcggtgtattggtgcagcggagataacggtattgttgtgcatagctaactgtggtagataacggaacatttggagcgaaacaatggctcacaatgtggatctggtgtgcaaggagatcatctacgacgaagtggatagtcagtttgccgaaccggacccgacgatgatcgcggatgttcgggtcattcagaacttgattgggctggaacggttgacgattccgtcgtgcaactacttcggctcggtacagcaagatatcaagccgaacatgcgcaagatcgtcaccacttggatgctggaggtatgcgacgagcagaagtgcgaggagcagactttcccactggcggtaaacttcttcgatcgattcctctgcgcatgcccgatcgatcgctaccacctgcaactgttgggatgttgcgctctcctgttggcctcgaagatccgccaatgtcatcctctgacggtggacgttctcagtgcgtacaccgaccatgccgtctcgccagatcagatcaggagttgggagctactgatgatcagcaaactggagtggaacatcacggccgtaacggcgttcgactacgtcgatcagattctggaacgcgtcaaatggggatcggacgactcgcggctacgggagcacgcgcacaccttgatccacgtctgcagcaccgaaaccatcttcatgcagttggaaccctcgctgctagcggcggcttgcatcgcctccgcaagccgtggcctcaacgtgtccaccaagatggccaccgggttcgatctgtgccggttgacgttccacgacattgccaaaatcgatttcatcgtcaaaatcatcgaagaaatcgtcgccaaggaaatcgccgacaagcaattgcaacagcagcagcaacagatgggcgccaatggggccgctgggggcagctgcaaggaacagtaccagcaagcaccgcaaaaagttggtggcgccaccgtcgagcagacgacgtcacaacagcagcccgaaacgcccaccgatgtgcagtttatctacttttaactgtaaacgggggacgctgcgtagtttaggaatttttccgggcgttcgtcgctgcttttcgcagtgaacgatcgcctggggaagctgtatctattttttctctctattgttttgagatatttatctgccaaaatttacgcatgttgttaagaaagcgaaagttatattttcgatgaaatgggaatgtaggcgctattcgtcatttgccgacccctccgagcaggggtgggttgattgaaatgtcactcggttgactgaaccaaaatttcatattgtataatatttacactgaaaacaaaaagcggaaaccagaatctttgaaaacttagttaattttctacaaac

SEQ ID NO: 1418 - DNA, 1448 bp, Aedes aegypti
acaaaatgttgaaatattctttagaaaaactattcttctccaacagtttctgtaaaagtaatcagtttcgatgcatttctcatttttctgccagtatttgggatgtcacaagtggaaaacatcgagaaggggaccaacttaatgttaagggttgggttaaatccgtccgaaagctgaaagagcacgcatttctggagatcaacgacggttcgtgcaacaaaaacctgcaattggtggtggataaagcccagctgaacggagctgcctacggatcatccgtcgacgcaagtggcactcttggcgttacacctaaaaaccaactcgaacttaaagttgaacgattgcaagagttcgggaagtgtcctctctccgaggggtatccattctaccctaagaaatcgtacccaccggactacgttcggaaccaccttcatttgagaccgcaggtttcttccctggcttccaccctacgagtgcggcaccacgcaacgaaatgcttcaatgattatctggatcgtgagggcttcttccagattcacaccccgattatcacttcgaatgattgcgaaggggctggcgaggcattcctagtgcgaccggccagcgcagatctgctcaagcaaatggccaagaaggacgtccctctggatcgagcttacttcgatcggcaggcttatctgaccgtgtccggccagctgcacctggaggccatgagccatgggctgggcaaagtgtatacgttcggtcccacattccgggcggagaattccaaatcacctatccatttgagcgagttctacatgctagaactggaggaggctttcatggaaaccctggaggatttgacgaatcggatcgaatctatgataaaacatgtcaccaaatccctgctggacgttgcttcggaagatttggccgccgtaagaaagctgaccgatgattccaccctggaggaaagcttctcgtggctggataaaccttatcctaggatcaccttcaaggaagccatccacgttctggagcaaaacaaatccaaactaaagtcagtagttcggcccgaagaaggcatcaacaaggagcaggaattgttcctggtgagtcacttccagtgccctctgtttgtaatagactggcccaaagcgatcaaatcgttctacatgcgtgagaatcgtactgaaccggcccttgtagacgcgatggatttcctggtgccacacgtgggcgaactggttgggggaagtgtccgcgagaatgaatacgatcggttgaaagccaaactgccggatcaggaagcgttgcgatggtacctggagctgcgcaagtttggatcggtcccgacggctggcttcggactggggttggagcggtacctctgctgggtgctgaacgtgcacaacatcagggacgtgataccgtttccacggtgggcgcataattgtagtatgtag

SEQ ID NO: 1419 - DNA, 4631 bp, Aedes aegypti
gttgagaacctctgctgcagtgtgttaggttagttcggttagcggttggttgattttttttctgttcctcctggaaaccagcgatggttacttgctccattgtgtggtgagatgtttgtctgcgaaacctatgctacgctacgattcattcgctccgacgagttcactcacgagctattcaaactcttcgatcgtttgctcgctctctcgagacttgtgtgctgcgattggttggaaatacctggcgcaactcgagcgaaccctctgtgccagaccggagtgaaccgtgcactggaccggatcgtctttggttagtgtccgtccgtttcgaagcgcttttggccgtgagtacgatcaggttgagggaaactttccgcggcgactcgcgaatccatcgattgtccacgtcgtcgagcaggacggtgattaggcattggagcggaattccaaggggttgctgatcctccgtcgatcgcgatcgtaatcggggctgacgtatacactacagacatctagtggaccggagttccctttcggggaggaatacactgtgaattgggggaaggggaacgtggttagcgatcagcgaggtatcggccgtggtagtcaaatctgaaccccgatgcgtgcgtacgtgcgtggaaaaagttcaaccgaatgtgaaattcaaacaatgtgtgtatccaatggttaatgaagaggagagagttttgacagcagcagcagcaaagcaaaagacaccgaaattcgaataaaattgtgtttttttttgttcggtagatacttaaaagtatacgcaatcgttaaaggtgcatatctttccatgcctgtcgcagacgaagaatcacgcttggaaagcaaccaactctcgtcgtcgagtcacgttgactaactaatttgagtgccgtgcgagtaaaagttttcggaatgggaatgtgattacgattgcgaatgaaataatgaagtcatcatcgtcattcaaaatgggttgatcggggttttcgagaaaacaaaaaatgcttcaaatctaccgccaccgtaagcacggaattcatatagatctcgttccggtcggacatgcgtcactaaacggaagatccatcaaagatcaatttcggtgcattcggcgcacgctgcttgttctgttctgttctgctagcggcgccgtgattgattggtagtttctgagcgcatcatcgaatcattacaaataactgacttgactatcggcgagtgaaggaagcactctggtgctgtcagaaaacggccagcaaagaatcaagaaaattggaaattaatacccgacgaaggatagacaaattagcaaccgtcggtctcgacggtcagtcggtcggccggcacttcaacggtatacacaaccaggaagaagctcgaaataccactcaaaacagcagaatggacgacaatgagaactatttggagtacccgaaaatgaatttttcgcagttctcgtcgccctttggcggtgccctggcagcgaatcagttcgcggcggccaagttcccgccaaatatcgccacggccaatgggcaggtcctcggattagtttccggtggtgatgcaggcatgcaattcctacggccgatggatggtaatgcgatggcagcagcgacagcctttcagcagcaacagcaagcagccgcagccgccgcggcagcagccaacatgcaacaagccacccccgcctacatcaccctaccaatcacgatgcccggtgcgaaacctggcgatgcccagcaaacggttcagatccaagtgctcaatcccaaccccatgccacaacccacccagcaagcccccaaatttcagatgggtcaaatgcagatacccattcagggatttcagcagggaaccacagtcctaacggtggcctatggtccccaggatgaggaaatcgtgcacaatcacggcatgggtgagggcatgacgatagttgccgcactacaaccccaggacctacaactactagcacaagctcaaaacgcctcgcttttccagcagcaacaacaacatcatcaacagcagcaacatcaaaatctcagttcgcccacgcaacccacaataaaagtagagcagagcttatccccaccaatcaggcccataaaacaagaagctgtgtggaacagcatccctaacctgacggctgccccagcgttcggcgctgacattgccgaattcctgcaacagcgaagtcaaggtctcaatctacaaccgttccttaaattcaacaacaacaacaacaatgaacctttggcccacggagatcacctgataggtggttccataccgaacatccccggtgccacctacatcaagcgagagatcatggacgaaaactccaatgacaatactcaatacggagcggacagtagtcaagcggacagcagcttccgagacgccagcagtatatcaggcgacacaaactgcagcacgcacaacgagtccgcatctactccaacgacaacggctgcggcagccacctcaacgaccggcacgccgagtgaagacggtgccccaaccggatccggcaaggcccggaaaaagagaaagtacaaatcgaaacctccgaagccgaagcggcaaaaaccgggacaagtgcatatcacgacggccatcgacgggacggtcctgttctgttgtccggagtgccacatggcctacccggagaaagagtgccttgagcagcacctggtggtacacaagatcgagcggcggttcatctgcgatatctgcggagcgggcctgaagcggaaggaacacctggagcggcacaagctgggccacaatccggagcggccgtacatctgcagcgtgtgcatgaagggcttcaagcggaaggagcatttgaatttgcatttcgtcattcacagcggcgtgaaaacggagatctgcggcgactgcgggaaaggattctaccgcaaggaccaccttcgcaagcatataaaatctcacatgaccaaacggttgaaggaggaaatggcggcatccaacggaggaggttctgccaactcgtcgattcgcaacagcagtagcaataactcccctatcagcaacgggccgagcaatcccccgaacaacaaccactcggacaacagcgtctcgacgacttccgggccggtgcatgttcccctatccctgccggcgggtatcccacccgggttgacaataactaccagtacaaattccatgtccaatcaccacaacccgccaccgcagccttcgcccttggcgcagggtatctgcctaccccagggcgttacgatacatgttcccacagcagacaaccaaaccctcccggtgcagatatccctacctcagttggtggcccagcagcagacggcatcggatggtacgaccagtacggtgctagttccggcatcggaagccctaccccagctggcaaccggtgctcaatagcagtagcacccgctgatggtcgtcggttactgaacgcagcgaccgagtgaccgtcagctaacaccaaatacctaataaaaagaaaacggcaactgctaaagggaccctaattcgaatactcattttaaacactctgttttctatttagcggtagataggacaattaacttttgcttgatcctcaacgttaaagagtacaggatcggcagcatgcagcagcgaatcccaaaagtcgtacgtgtagatcgattacgcccttgttttctgttgttgatgaaacatccccctggaacgacaataagccacaagagagatagagcacaaattattttgcgtattatgtatgattaggtagctcgccaagttttgaatcaatataggtagctgcatgaatgaatgccacggcggagggatgttctgaagcaaaaagacaaaacgtgcatttgttggaacaatttcttgtaaatgtaaattaaaattttacgcacctcgtctcggcaccgcttggacgtggcccttaggatctaatggaaatctttatgtacaccttttcttttaataagttaaatgtatgtatttgttgtttctttgtttttaaagtatatatatatatcttcgtaatatttaacggaacaaacttttaccctccactatttattacaccgcgctgtaaacgatcattattcaccaacctgttgttattgctagttttttatctcatcaaccacactattttaatctaatttaatttatttatttgcatcgaacaaagtctgcctgctagcaacagaagtaaacgtagaaaagttctctgttacagtgtacgaaaagtttttttttcgaatctccagtttgttgaatctattaggcaaatatagaaacaatttgagaccaacgaccattattttttacgcgcgcacattctcggataaggcaacaagaaccaagaacgaaagaaccttaacaacgcaaacgagtatacacagcatttcaaaacagacaggaatcaaaaccgtataggataaggataaaccacgaggaaagcacagataggtactgcggtatcgaaatcgttttgaaactgtacatatggatttatattttttttcttttctacggaaatttctcgaaccattgttgaacgcgtaacaattagaaccataaagaatacaaaattctatttttgattacaa

SEQ ID NO: 1420 - DNA, 1608 bp, Aedes aegypti
ctgaaatgcatttcaatttcagttgatgaccatatcgcgcttttagatagatcgccatcgttggaacagtttttcatttttgatagagtcaatgttaatttgttgtgttttaaaagaacattatcgccactaactgtcgtatatctgttgaaccgaaatgcataccatggaaccaatcaatatcgaaatagcgtgtacccgaggctttaacaaaaagtcgccccacgccgatctaataaaagcgattcacctatacctaacggagaataaaactctgcccaaggatcacgtcttcaaggtgacctatcccaatgtggaaagtgttacggtttgcaacaccgtggaggagcaaaacccgcgaaccgatttgagaatgtttacttacctgttaaacgatgagaccagtgaggaggaaaccattcagcaggatggggacgagattcaggtggccaaccattggctgctgcccacgagagatttccacggcatgtgggagagtttgatctacgaggatgatctgaagcacgatttgttgagcttcatgcagactacgatgctgttctcgcggaagaaggtcaacaccaatctgatcgcttgcaacagattgatcttgctgcacggcccaccaggaacaggtaagaccagtctatgtaaagccctcgcccaaaagcttgccgttcgaatgagtgaagattacaaccatgcgcatcttgtcgagatcaacagccatagtctattctcgaagtggttctcagagagtggaaagcttgtccaaaaggttttcgatcaaattcatagcttgtgccaggataggacatctttggtgtgtgttctggtcgatgaggtcgaatcgatcgccttcgctcgggatgcaatctccaataacgaacctagcgacagcatccgggtggtcaatgccgtactgacccagctggatcgcatccggaagtacccgaacgtgtttgtactggccacttcaaatctcactggaagcatagatctcgccttcctggaccgcgcggatattgtgcagtacatcggcaatcccagtctagcggccatctacgaaatctatcgtacgacgctgaagaacctgcaggaagttgggatcgtcaccgattcggaagagcttccggtgttggcagattccgacgcaactgtggtgagcaagaatctgaaatcgttggcagaactgagcgtgggtatgagtggccgcagcttgcgaaaggttcccttcttggcgcatgcgttattcgtgaaacaggagcagaccactctgctcaagtttctgggagccatgaggaatacggttcggaaggtcaagaatgacatgaagatgctcaaggggaaaagtacgatttccggtgctccaacgggagaagattcgggaaattacgagggtagtgtgttgaatggaggatgtagtgagtatcaggaatctttgggtcctctaccataatggttgggaatctctgtaaatttaaggtaatcagttaggctgtaaatattttctatgatgtttgtgagacctataaaatatattcatagcctcacggagaaaaataattagtaaaaacaaccaatttttagttaatttcaaacaaattt

SEQ ID NO: 1421 - DNA, 2079 bp, Aedes aegypti
atggaaatgaacgaaataggaagtcttcagctaccggaccaggttaaccttccctttgccatcaccagtaacggtgattactttgtcgcatggaccaagggaagcgtcgagtgcttccagctcaagtacaaacacgtcaacgaggacggtgcactcaactatgtcctcaatcgattcgagtgttccaaggaaaagcccaccggtcagctaatggcgaaagaaatcgaaatctacaacaacagcagtcggttggataggacgaaaatcatgctcgatcaaacgtttattccgaacatcgccacgctatacattagcaacgtgatggcttcggtgtctccgcaaggactcttccatgactacagcgtctgtctggtggccagtttgaccaacatggggcagctttcgctcttgcgatttgaccaactgcaaaacgaatggataccttacgtggatgtgtccgccgtttggattgcgcacttctacgatcacagcgtgatcaaaaagttcgatcaactgcaaatgtctgcctccaatgccctgattacgagcttctgctggcgagaacatgtattccaccacgttggccactttgccatcggtaccaaatcgggcactattgtcatctacagcttgatttcgaacagcgttaatgttcggttcatcgcatctgttaaccaaccggtacgaatgatgaaatggatcaccatttcggaggatcacaatctgctgctggtcggactgcagaatgggaagattgcgctatataaattcaaaactatgctagacgcgaacgtcattgacttcgagcagttggacaacgtatgggccgaggaggacaatttgatagtgggacaggtacagtgcgaactggactatgccaacggtcgattactgattttggtggttaagggaacgcacctgatggttttcttgtgcagtttggaaggcgaggtacgatcgacggcggtggagaatatgcacaattttatgataacaggtctgcaacagctaagcccctaccgttacatcgtttgcaccctgccaggaatggtgttttgcgtcgacatcaaagttgagaaatgtgatcaactgctaatcgagcacacacccgttaaaaccgatttgaatctcagcaaatactcgatatacggggtaacggcatcgcgtaatcgatcgagctggctctttgtgggctatccatcgaaaagcttcgatcgtctgggtttacggacaccaacggttgtatttttctgcaagttcagcgaatgcgatgcgatgcagattttattggataaccccacgcttcgaatgaccaactattacgattgtgccgaagtcgtaaggtttagtggcaatcgaactccggacgcggttaagccccttgaacagagagcatccaacaacgcaaacgttgacgacggatacgcctaccacctcaagctacagttggtccaactgggagcgagactaagccacttcaagaaacgatgccaagcaatcgccgaagtgctgcacaatcagttacagtttatacgaatggttattgaaatccttcacgcggcgaaagttatcgcgtactttttgcacgtgcgccatacctccatcgaactgagctaccaccaactgctgaccatacgttgtttgcgtaactttatccaagaattcgtggaagataactttccgggggactacgagcacgtacacctgtcgctgaagccgcccatggaggaagtgattgcccgggcgaacgaattgctggtcactgcccagcagcaactgtaccaggaggagtgcaccttctgtggtggatcgatccccgaagcgaaactaacctgcgtggagaaccatcaaacattccgctgctcgattacgaagcagcaaatcgcgatgggacacgtagaaacgatgtgcgaaatgtgcgaccgctgttcgctcgatgggcaactgctggcggaaatattttgcgccgacggtgggcagctcgtaatctactacatggactgctgcctgtgtgacatgccctttaggaagcacctgattccgtgaggtgtttggaataataaattgtgttaggattat

SEQ ID NO: 1422 - DNA, 461 bp, Aedes aegypti
gatcgtttgtgtcgttaagaatgtttgccatcatgtttgcgctcccacatcataattccgatcataattgtagtgtttagaagtcctaaattgcagtgaattaagtgcttgggaggtctaagactccagaaagtcgagaaagaaatcatcgttgatttgacttccgtaccacccgaagcagaaccttaccattcttcatcttccagtggaaaatcgttccacgcaatctgaacaagatgtttttcccgttggtgttccgttgcgcttacttcaatggattcgctatccattcgccagttatcgacagactattgaaacgaaatactagcgagtccccggaatctgcggtaatagagctaaggatcaactacgcatctaaagtgtatggcattagtggccccggaaacaccaattttggtttgcgatggaatagtatggattataaaaactttcgcggatga

SEQ ID NO: 1423 - DNA, 967 bp, Aedes aegypti
gacatggctcacatcttcggatttttacttcggtcacaataaatgctcacttggacaatttctatgttatacaaagtttacaccgggagaatttatattagtctcgtgcttcggtttattatgaaaccacaacagcagatcacctgcatagtacacagaacggtaatcatccgaaagagggtttgattcatgtaacacctaataaaatatgcaataaaaactaaaaaatagatcatcttcattcggcgtaagaataattatcaagagaaacagaacactcattaagcaatatcatgtaagttgttgacgatgacattcttccgatcggagtataaacagaactaggttcatgtatttcataaatttaatgatattcggtaatcccacaagtatgatgctctcattcaaatttgctcactttttgtaagcaagtagcatcctcacgggtcggattatcgcactgtaactaataacagcaaagtggtacagacctttcagtataggtttaggttccgatttcgttgggattgggaaacattaacattcggtaaaaatatggataattcaatagtgtagaaaatacgttcaacgttgtaaagatttcttcatcgtgggtgtatatagaaagggattttcctactttgttgcctaaatttcatactataccgtataaatacctaagattcatagataagacacatttttgcttgattttcagccatttttaactctgcaataaacgttggatgatagttgtgtgtatgagattgttgaaaagatctggaaagacttctccgcgtggtaatggtaggtacagcattgtcggttttctcggatacactgataatttgcctttgtagaagggacatacactccaggggtaggaatcgagatcttcgatagctctaaaatacatcaactctgactggattgcactattagacacacacatacattcggttctcgc

SEQ ID NO: 1424 - DNA, 492 bp, Aedes aegypti
gaaaataaccgcacgtgcgacatgcgtaagcttaacttccgcttacggaagctataaaaaacgtgacacctgtccggtgcacgttccaacatgagatcgacattggttgtgctattactcctaattgtgcaagcattcgaagcgagggtgtgtcctactttatgttgtgaagatccaaacgaagtgtacctaatatgtggatcgttgtgtgagagaacctgtaccaatctgtacgattgcgacctgtgtccggcggtttgtgtatcagggtgcttctgcaaagatggatatgtacgggattcacttgggacgtgtatcccggcttgtgattgccccattttaaccacgacgttggccccaactactaccaagaagaaaccactcaagtgcaagccacctacaactactacaacggaagctccttgctcatgtacaacgaccactgaagcaccatgcctatgttcaaccactactgttgctccttgtgcctaa

SEQ ID NO: 1425 - DNA, 288 bp, Aedes aegypti
atgaactttgcagtgattgtagttctagcattgattgcagctgttggcgctgtttctgttctaccatgtggtccaaatgatttgtacttggaatgcggctcggcttgtcctgaaacgtgcgacactctgggagaagtcaaaccatgtacccgtcaatgcatcagaggatgtttctgccagctaggctacgtacgcaataccgtgactggagaatgcgttaaaccatgcgattgtccaccgaagaccactacaacaacgccagtgccaactggtgctccttgtagttag

SEQ ID NO: 1426 - DNA, 390 bp, Aedes aegypti
atgcagcttccaatatgtgctataaaagtaactagaccacatcccaacggtcagaagcacttcaagatgaatcctgctacaatcattattgttctcgccatcagctccgtcgcgatcagcgtgtacgtgccttgtaaagaacttccagtgtgtctcgatcccaacaccgagttccgattgtgcggtgatgagtgtcccaggacctgtgaaaatctggacccgaagcctccgtgcactcaggtttgcgcacgtggatgctactgcaaaaagggattcgtccgggataacattagtggcctgtgcgttctgccctgtgactgtccaaagcctacgccgaagccgccctgtggatgtcccaaaactccgggtccttgtggatgcagagcgtag

SEQ ID NO: 1427 - DNA, 1321 bp, Aedes aegypti
agagatcgagacaaagaacatattcttaataaatactagattgaaaaccgctccattgtcaggaaagtaggagaaattataaacagtcagacgacatttcgtattcctactttattcagaaacgcaaatatctggtctagtatcctttgatattgggcatatcgacatatggaaagagaatcggtaatgaatgatatatggagatgggatatggagatatcgagataaggaggatataccatgattctttgtttgctcgttcagaaatttcctacgaaaacaaaataatactttactgaggctatactcaccctgatattttagattttttaagagtacttgagtaactcagtagtaagatagaagttcataaatttaactatattttctaggattgctgtactggttcatttagaaaaattattgatttttcgatcctttcacaagagtggttaaattcatattaggcagcgtcctcacatgacgtaacatttattggccaatttttgacaccccccttccccatcgtagcctatttcctcatacctaatacatgattcgtcacaaaatcgtagactaacacgccgccccccccccatccaaatatgttacgtaattaatggacggtccctaatttgttttcatcaatatgagctccacacctagaagatgtgatcacaatttaagaaatgtatgttatagtggaatagtcataaaacgtttcacttgtcttagtcaaaaatttgtgcacattcttgttatacaattttctatagattgtaattgcaatctaaccatcattattgagattgaatcacgttactccataaagcgcacgttcattaattctgaacccatccgaagatcaatgatcatataaataagatctcgttggcatttcatctcatacagtaattcacatccaagatgaaacgtgtagcaattctagtgcttgcggtcgttggggtgatctacgcagcttcatgcccaccatgtggcccaaacgaagtatattcggaatgtggaacagcttgcccggaaacgtgtgataatttgggagaaaatataccgtgcgtcctcatgtgcgtcccggggtgcttctgtcagccaggttacgtacgcaataatgtgaccggagcatgcgttaaaccgtgtgaatgtcccccaaagggtgcagttacaccttgcagttagatcgtgtaaagtaagctaaacaacttagcatgttggccttaaactagctaaacatagtgtgaaataagattatcaaaaacaaaaaataaaatatttttggaaatagtaaaacgcgattcatgcttta

SEQ ID NO: 1428 - DNA, 1073 bp, Aedes aegypti
atattattcaacttctccaacagttcaaaatgcaatatttggtccatagtgtaaacttctttctcttccagcgcaaatatgtttatgacgtcgcgcttcccttctgatggagcagaacaacagcatccagtcgcattatttaactgcaaacccttcatttggaagaggagtttttgtgcgtcttcttacattctaaaggcaaaaccagtggttgtttgtcaacaacggcaccgaaggactgccggaggtattgcgatgttcccgttcaacaatatgatttggacgaagggggttcgcaaacttgctatgaataatgtaaattcgaagctcggttcattgcatgcgcgctattatgttgctcatttatcaacaaaaccctgctctcgaataacgggttagggaatttcgcttatgtggttcaaggtcagttcgtacccgaatgaaatcagatcttgaagaggattcagtatgagtttggttgtttaacaatcgtgtggctccatataattcgcagttattttcaattatttagatacagattattataattttggcttccaagatggcggaatgtgtacgtgaaatcgacggagatctgttcgccgcccccaaagatcactctttggcgcactgcgttgctgccgatctgaaaatgggcggtggcattgccgtcaagttcaagcaagtgttcaaacaggtcgacgaactgaaggcccaaaaggttggcgtcggaggtgtagcggttctcaaggacggcgaacggttcgtgtactatctggttacaaagcgcggctcgatggacaaaccgacctacgccgatctgaccaagtccctggaggccatgcggaagcatatggctgaaaatggtgccaagaagttggcaatccctcgtattggatgtggaatcgatggactcgagtggtcccaggtaaaggaaattctcaactctacatttggcaatgagaaagacgttgaaattgtggtttataattttgttccgaaatgagcttgagttttatttcaataatttgttagtatagttcctttttagtgaataaattcagcactcattg

SEQ ID NO: 1429 - DNA, 1661 bp, Aedes aegypti
atggctggactgaacaagcagcagtgtgccggttcggatgccagctcgacgacctcctcgaaaacgttcgtggcctgcaaggtgtgtggcgataaggcttccggctaccattacggcgttacatcgtgcgaaggctgcaaaggattcttccggcggagcatccagaagcagatcgagtaccggtgcctgcgggatggcaaatgtctggtgatacgactgaaccgaaaccggtgccagtactgtcggttcaagaagtgtctcgccgttggaatgagccgggattctgttcgctatggacgcgttccgaagaaatcccgcgaagccggaaactgtgcggaagacatgaacgtttgtgtaaactcgaccacaccgactcaggtgtcgcagttgagcagctgtggcgggacacccacgccgacagcaccagtgatcaccatgaccaactgtgcggagatcagcacatcgaccgcggttgtaacgaccatcctgccggactcgatgacgttcagtccgccggaactgtccatctacgatatcatccactgcgttgcgcaagcacatcgaggccattccacgtacaccaccgagctggtcaaggagcagacccggatatcgctcgtcaactacagcgagaagaataatctcatcatgcagtccctggacacaatcgaggaccaacggatatggctgtggcagcagtacgccatgcggatgaccccttcggtgcagcgggtcgtcgagtttgccaagcgagttcccggcttcggagaatttctccaagatgaccagctcattctgatcaagctgggcttcttcgaggtgtggctcagtcacgtggcccgggcgaccaacgattctgcgctgaccttcgacgatggggtgtacgttacccggcagcagctggaagtgatatatgatgtggattacgcgaatgcattgttcagcttcactagcggtttgaacaattgctgtttgagtgataccgaaataggattgtactcagcgctgattctgatgaccgaccgaccaggactgacagagaccaagatggttctgaagacgagggaatgcattgcagaggcgctgagggtacaaatcacgaggaccagatcgaatggggtcagtgccctgcagataatgccagcactagaggctaagatccacgagctgcggacgctcggggagaaacatttcgcacacctagagtggttccgacagaactggagttcgatccgattgccaccattgtttgcggaaattttcgatattcctaaatgcgaggaagatttgcagtaggtaagatggaagacagggtctgagaagagtttgaacttcctccaaacattggccaatagttgtttaaggacattgtaactgatatttcaattaaggatcatacctatatcgaacgaaagcaagacttgccaaatctatatcaatgtgagtgttgacgtgtagcaaagattgaatcggtgaatgtttatcgaaacggaatttatttttgttagcttccattccgcaatcgtaccacaatctcgcggattgtagcaaataagtccacttatcgcatcttgtggatagagcatctagcctagactcattgtcatttacaagcatgcggaagtaagcgttagaacgataataggaaacaaaaatatcat

SEQ ID NO: 1430 - DNA, 1608 bp, Aedes aegypti
atgcgggcaagtccttccccatcaccgtatcgcatttcctctttcacaaaactccagatgcagcagcaccacataggtctttcggcagagttatactacgtacgagaaggtcaagtcaacgagtatgctctccacttcacagtgccagtgcctgcaaacgtacaagatatctccttcacatggcaaagccttgccgggaaaccactcccctacaagatcaacatcgttacatcagatccgttggccctaccgaaaccatcgatgaacatctcccgagtaggggagattcccacgcagatcgaaacctttgccatcgcgctcaaatgcgccggacgagaaccggctgaagttgaagtcacaatcaccatcgaagtcacactcaatcgagtcaccgggaacgctacggagttggtgtttcgaaggaagaagatatgtctgaataatgaacatccggatgccaatcaacctgatccgtacctcctggaaactgttacccatactcaaagcggcctaatcaccctgatcgtgggtggaatccttgcgatcgtccttgtaacgatcctcatcttcatagcgtactgcacacgaggttctctaaaacggaaacctcaccacgcccaaccaatccgaacatccagtttccaacgccttcaaacacatcccccatctgctccgtcttcaattgtatccccaccttccataactccaactatcgccaccctatcccgtaacaaaatctatgccaacgccgaaccagaggaactgcagcgtcgcatctccgaactcactgtccaacgatgccgcgtccggttatcctcgctcctccaagaaggcacctttggccgagtctaccgtggttcctacaacgacagccaggaagtcctagtcaaaaccgtcggacaacacgcctcgcaaatccaagtctcgctactcctccaagaaggaatgagcctctacggagcgcaacaccccggaatcctatccgtccttggcgtctcgatcgaagaccacacggctcccttcctgctgtacctcgcaccggacaacatgcgcaacttgaagatctttttacaggaaccggtcgctcgaaccatgaccactatccaaatcgtcaagattcagctgcaacttgcacaagcgctgggacatctccacagtcacggagtgatccacaaggacattgctgcccgcaattgcgtaattgacgaccagcttcgggtgaaactggcggacaactcgctgtcgcgggatctcttccccggcgattactactgcctgggcgatagcgaaaaccgaccgatcaagtggctcgccctggaggccatccagtacaagcagttcagcgaagcgtccgatacatgggctttcggcgtgctgatgtgggaactgtgcacgctggcacggcagccatatgcagaggttgatccgttcgagatggagcactacctgcgggatggctaccgattatcgcaacccataaactgcccagatgagctattcgccatcatggcctactgctggacgatgctcccgatggagcgaccttcgttcgagcagctccaggtttgcctgcaggacttctacgctcagatcacacggtacgtctag

SEQ ID NO: 1431 - DNA, 3563 bp, Aedes aegypti
ttcgtattgtatagaatagtgacttctcttttagtgtgataatttgttatcattttttacacttgacgttgcaataaccaaacatgagtaggtgataaaatttaaattgccaaacaagctccccaaatctaccgaagagagatcgttccatccttccataaaaatatcgttcatattcgaaaccaaaactaaaccatcaaaccaacaatggaggacgattccctgaagaaggacatccgaaaggattcggtgaaaagtgccaccagcaatggaacggctggcggtggggatggggaaattacgctcaaaccaaagatgaccctggtcaacggagtgacggtgattgtcgggtcgattatcgggtccggtatcttcgtgtcgccaacgggggtcctcatcaacaccggcagtgtgaacatgtcgctgatcgtttgggtgctgtcgggtttgttttcgatggtcggagcatactgctatgccgagttgggaacgatgatcaagaaatccggtgccgattacgcctacatcatggaaaccttcggacccttcctggcgttcatccgtctgtggatcgagtgcatgattgtgcggccttgctcgcaggccatcgtcgccctcacgttcagcgtttacgtcctgaagccattcttccccgagtgtcaacccccggatgacgccgctcggttgctggccgtatgctgtatcctggtgctaacattcgtcaactgttgggacgtaaagtgggcaaccgccgtgcaggacatcttcacctatgccaaactgttggccctgttcatcatcattggcgccggagcgtactttttgtttaaaggcaacaccgagcacttcacatttgagaacacgaaaaccgaggtcacatcactggcgctgtccttctactcgggtctgttcgcctacaacggatggaactatctgaactttatcatcgaagagttgaaggatccggttaagaacctaccgcgtgccattgccatttcctgcacgctggtcaccgtcgtgtacgtcttcaccaatgtgtcgttctacacggtgctgtcgccggaggaggtgctcggttcgcaggccgttgccgtcacctttgccgatcgggtgtttggaatgttcgcgtggaccattccggttttcgtggccctgtcgaccttcggtgccgtcaatggaattctgctgacgtcatcgcgccttttctacgccggtgcctgcgaaggacaaatgccggagattctcaccatgattcagatccaacgcctaacgccgacgccggccgtcctcatcatggcgctgctctcgatggtctacctgaccgtgtcggacatcttcgcgctgatcaactacgttggatttgcgacatggttgagcatcggtgtggccgtcctgtgtctaccatggcttcggtgggcccaaccaaatctggaacgccccattaaggtgaatttgatcttcccgattttctacctgatcgccacggtatttgtcacggtggtcccgatgatcgcgagccccgtcgaaaccggctacggactgctcatgatcctgaccagcattcccgtctactgcatattcattgcgtggcgaaacaagcccaaatggttcaaccacacgatgggaggattcactcagagtttgcaaaagttgatgatggtggtgcggccgaagcagaagtaaattccagcggagggaattttgtcaagatgtgatgaagtgatgaaaaaacaagtgggcgtcacacgattcctgcagaaaatgctcatggtcgttggtaaggccaaaccagctcaggtttagacagaagatgacagatttagacagaatcagcatccgctgacaaatcattcgcgcattccgtttgcgacccataaataccattttcaacgcaaatcagacgaaaatatttaacattccaaaagaagccattgagcatcacaaaaccagtcattccatgtagaaatcagctgtcagatgcagggaacagcaggagatagccatagatgatagttcagagaagttttagtttttcttgtgttttaaggacaagtcaggagaagtttatgacaagcatacattcctgtttgtgtatcgtttttagttttcatcagattgtgattgtcgatcagttgactgttttacgacattccctctccaagttaggttatattagatgagcaagaaagttaagttttaaacaatgtcctacaagtctgtttgtttcggtgttatgattgatagaaattcgcgacgagaaccgtagctgtacgagtgtttgttctatttttcaattatgtataattttagtgttacgatcctacgttcctcatatattaattgtctctgttaggattgatcaatgtaagacaaggcaatgctgaaagcaaagctccaataaatccgtataaaacaaaccgttacttttattcagatttgaatgcattggtttttattcaagcgaagactacatattggatagacataaaactttcaactttcacaaatatgttgtctttgattggaaaacccggacataccgtgccaacactaaacgaaataggctagagaacatatcaagcgaaaaaaacgtaaaatgaatctcaaatggtattaattagcgccatatcgcaacgaagtcaaaacttccaactccaaccaggtctttttcgactttctatttgcaattctttgttttgggttctgatcaagctcacgattactcttgcgtggttggcaaaagtgaaaccgtaatgtatgaattctaaacagaaatcgttcaaattattacatgtgtaaagtattagtcaacaaagagttccatcatattattcggtaaccatatgtataatgagccaacaataatgttttaaacgtgttttattgaatgtcctgcttaaaagaaagacatgttgacgaaagtcggtttgattaggaaatgaatgagttgatatactgagccgacactaagtgtgccacttagaaaggttaaaaacttgttgacaataatctaaagtttagtgtttagaaaaattttaatgtccatacatgcatattattatacatataccgagcgcatttaccagaaccaacaacataaataacgacagcgaaaatgcattccatattatatgcgagaaaatcacacacagaacatattcaatgtgatcaatagcacatcaaaataatagtcaaactgcataactataaatgtaaataactcaaacaaaaaaagaatagaaagtaaaaccggaacaaaacgaaacacaatcatcagtttatcacaagagcgaacccaaaaccaagacccaatacaggtctctaggaaatatccgactccgaaaacatatgccatttacacgaaaccagatgtaggaaaaaagaagtaaactggaaaatgctttcgcttgttggtctcagagcggaaagagtgcagaggaaagttaaaaaagagagaaaattggaaaaacacaaacgcagcctgagaagtcagctggcactgtgtatgtcgatgactttagctattagagaataaataaaactgaagtgtattattgcaaatg

SEQ ID NO: 1432 - DNA, 1438 bp, Aedes aegypti
tgtacacctagcgaagtcttatcattgattcccgctgtggaccgaaacgattcgcttggtattgttttccaattgagctattgttatctggaagatacccgtttgcaaatctactgggcgaactgttcatttctcctcagtttattacattgctcgtgcagtggacctcattgcagaaatggttccatcctttgcattactgactgtattgatttgtagtgcttgtgccgttgaatcagttgatccacttcgggtctggtttgatccacaggactacaccagcaccttcggggagtcagctgatttgtttctgtggattgacggcgttgtaaaccggaatgctacggtgaaattcaacaccgttgacggggggagtcatgtaagtgtaactcctgaccagctgtggatcaatggaggagtgaaatacaccgagactccgattgtcgtatcagcgaaaggtctccgtcaagggagattcatagtagaggctggtgtagagcccgaggggatcgctgatgatcgcaggttatttgttcggttgaaggtggctttgaatcaaccgctgatctacatttcattggtgatcggatgggcttatacggcatgttggtcaatcggatattatccgcaaattattctcaactatcaacgtaaaagtgttgttggactgagttttgatttccttcatatcaatatcatcggacatgtctgctacgcctttttcaactcttttatgtactggaacagtttcattgagaaagaatactttgatcgacatccacatggtttgaatcccgtgattggtaacgatgtaggattcgcagtacacgcatcggttgctaccgggtacaccattctgcagtgttacatctaccagagcaatggaaatacggtttctcccacggctaaggtcatcattgggacgtacctggtaatcattgccgtatcggccagtcaggccgtgtttggagcgatccattggcttgattttctctacattttgagctatattaagctatcgacgacactagtgaagtatttcccgcaagcgtatatgaactttaagcggaagagcaccgaaggcttctcaattttgaaccgattgctggacattgccggtggcctgcttggcattctgcagatggtgatcaatgcgtggaatttcgatgattggcagtccatcttgggtgatcctgtcaagtttggtttgggcgtattttcgatactgtttgatttggttttcatagtacagcactatattttatacaggaaaccaattcacaaggagccagtataccaaattggaaaacagacaaacgaacagacaaccaaactttgagttttagttcttttttaattttagacgaaaaatatgtaatgtctcgaaagatttataggacgattttaataaaatgtgattttaattacttttaaacac

SEQ ID NO: 1433 - DNA, 2632 bp, Aedes aegypti
taacgttacgataccctgtcagttgagatcattgcaaacgaattgaccgaaaaggtatttgggatgtaagtgcgctgtgaggttgttcgtacgtcccaaggaaattattgccgtaaaagacgaaggcctaagcaaggaacacacgatggaagaaccgcacaccactccgaagaagaaattcagcggcctggaacatcacgacgcaatctttaagaccctgcaaaattttaccgccccgacgagtccaaagcttccgacgatcaaggacttcagcatagtgaaaccaattagccgaggagctttcgggaaggtctttctaggatataagaaaaatgatcaggacaagctatttgctatcaaggtgatgcgcaaatcggagatgatcaacaagaacatggtatcgcaggtgatcaccgagcggaatgccctggccctgtccaggagtcctttctgcgttattctctactactcgctgcagacgatttcgtccgtctatctggtgatggaatacatggtgggaggcgatttgaagtctctgctggccatgtatggattcttcgaggaagccgccgccagattctatgcggccgaaatatgtctggccctgcagtacctgcacaagcatgggatcgtgcatcgtgacatcaaaccggacaacatgctgatttcggcttcggggcacgttaagctgacggatttcgggttgagccggatcgagatgagtcgggatctggagatttcggatctgataaactgctcgccgagtttgaatgctaggacacctgggcagttgctttcgctgacgtcgcatctgtcattcggttcccacgataagcgccttcaggaacagcttgagaaggaccgtttgcagcaatcgtcggaaagtgaactagacaattcctttacgcattccaagcagaacgagagcaaaatgtccggcgtgagtccgttcttttccgcggagcagaacgctagtttgctggaggaactaaaagaggtccagaaagtggtggacggcagaatgacggcggatatgtcctcgtcgtattatacgtgcaattccagcaccgaggggaagagcagcagcggaagctacacatctctcaacggaaacaatgccgagtgccgaatgacggacagacaaagctgtgatagtaaggaaggcgcggattgtgacaaagaaaaccaccagcagtgtggtaacattagatcggtaatgacggagaaatataaggattcgttcgatttcctattgcttccggggaaccacaagtgtaagacacacgtgagcaatgattcgggagtttccagtcggaagagcgacatatcgaacattccggccgagctgtcggccatcgagcggccgacggattgctccggccatcacagcagcggcaataaggactactcgtgttcggatttttctcgcagttatagtatgagtaacataaatgaatcctgcaattcgagacatcactatgattcaccgataaagaacggaatcaggtgcttcaagagaccggagtactttaggggtataaaacgcaaacggcacccggtgagccgggtcgattcgctaatgtcggacccggatggaagcactgccagcaccggtctcacccaggaaattgacgtgatggacatcggcagcagcactccgaaaaaacgaaaggcagcttcccccatcaaaggtgtcctcaaagttcgttctttgtccgacgacgaaatgccggttaacgaaaaccacggaaatgtaatgttctccacgccggtttcctcgcagaaaatccgccgcgaaggtggtcagttagctaaactcaaaaacacccgcttcgtgttgccatcatccgtcgagcagctgcggaaatcggaagccttcatcaaaatcaccgacgaatccgtcatgtctcccatctgtacaggtaattcgtccgtgcccaatgtaggaaccacgcctaaaactgtcaagacgccattcaggacaccaaaatcggtacgacgggctccgatcgagtccgatgagcgaatactcggcactccagactacttggctcccgaattgcttctccagcaaggccatggcccacaagtcgactggtgggcgttgggagtctgcttgtacgagttcatgaccggtgttcccccattcaacgacgaaactccccagaaagtattcgagaacattttaagccgcaacatcgaatggccccaagatgacgaatccctctcagtggaagcggtcgaagccgtggaacaactgctggatatggaccccaccacaaggcctcaggccgatcagatgaaggctatggcgttcttcgaactggtcgagtgggacaacatggaatcgatgccgccgccattcatcccgaacccggatgacccacaggacaccgggtactttgaggcacgcaacgtgatgcagcatttggtcttgtccaacttcgacatggatgcctactgacggaggacggagtttgagcccgaaaagcagacactgggatgtttgtgtgcgatggggtgggacgggccccggtaaaattacgcgtaacaattgtaacctgttatatcttttatttgtaggaataagaatttgtgataaataaactcggtattaaagactcgtcggcga

SEQ ID NO: 1434 - DNA, 1301 bp, Aedes aegypti
atgcgatcgttggtttcgcgtcgtgcggccataatttcgcgaccaatttttagtgtttttcgtgcgtaataaagtgctagaaatcatgaagttttcaacatccaacgccaaatgtgcgtcctacgtgggcaagcacacgttattcgtcggaacgcacacgggatcgttcaaaaagctggaaccatttcaggatcatccgtaccgacagacgaacctgcagcaaattaccgttctggataaaacgtccaaggtgacgtgcttggccttcggcaataaggaacaaacggaaatcctgctcgggagggcgaaccacttcgtgaaggtgttcgattgcaacagcgaggacaacagttccagcttcgaggtcggcggggaagtcgtcggactgggacgatccaatggctgtatcgtggcaggaacgtccaacggaacggttaaaattgtcaaatcggaatcgatcgaattttcagccggagacaacttgtgcaagctccgggtttccctggaagatccaaacatgatggtaaccggcggaaaaggtctcaagaacatcattaaagtttgggacttggaacaccagaaggttagcttcgccgcgaagaacgtcaaaaaggacatgctagagctggaacaacccgtctgggagaacgatgtggtattcgtggacagaaacaccgtagcgtcgtgttcacggcatggttacgtccgggtgtacgacttgcgtggccagcagcggcgccccgttcaagcctatgccccaccagaaggaaacgacgatcagctttcgttcagctgtttgaccaaccatggcgagtatctgtacgccggaactaccaccgttggaacccgtgcgtttgacatccgtcgcatgaaaaatcacattcacgtgtacaagggtttcaccgggacggttacgagcattgatgtggactcgaccggaagctacattttcacgtcctgtctggatagatatgtccgcgttcacaatacccagaaaacggccatggtttatcagtgttacgtcaagtccaaaccaactcagattctctgtacggattacaaggaaaaggttctcgccggtcaagaagaggacgacgacgatttagtgctggtcgaggatgccaacgaagaggacgtcgattcggagtacgaggatatgtttgcgaaaatgcaaaccgtgagtgaaaaggttgcttccaaaaagaggaagctggataacgatcagggtgaagggacgaaaaagaaaccgctgaagaagaaaggtaaaaaggttaaataaaacattgttaaggtaagtcatt

SEQ ID NO: 1435 - DNA, 2305 bp, Aedes aegypti
agtgttggtcgagacgttgcgggagtcagttgattgaacagtcccctcgtgcaccccaaaggcctgtggaacaatggcaaccgatcaagctaatcccggtatcgagaagctcctggagcaggatgggtatctgaagctgcacgaacgtgaaatcagacgaagaaacaccgagctgcgtaactggattaataagctgaatcagctcgagggaggactcgatgagttcacacagggatacaaatactacggattgcacattgctcccgacaacagtttggtggcacgtgagtgggcacccggtgcacaacaactgtacctaaccggagatttcaacaactggcaatgggaagcaaccccgtacaagaagctcccctacggcaaatgggaactgactctgccggccaacccggacggctcgtgtccgatcaagcatctttcggagataaaggtgatcgtgcgcaagcaggacggccagctggtggatcgattgtcaccgtgggccaagtatgtggttccgccgccgaagtcgttgggcgtcaactatcagcagcgcgtgtggcatccaccagccaacgagcgatacacgttccgtcacaagaagccggcccggcccagggctttgcgcatctacgagtgccacgtgggaatcgccaccgaggagctcggcgttggaacgtacaagaacttcgcggataacattgtaccgaggattaaaagcctcggttataataccattcaggtgatggccatcatggagcacgcctattatgccagctttggctatcaggtgacgagcttttttgcggcgtccagccggtgtggaacaccggatgagctgaagtatatggtcgacaaagcgcatgaggccggattgttcgtgctgttggacgtggttcactcgcacgccagtaagaacacgcaggatggattgaaccagttcgatggcaccaatgcttgctacttccacgatggttcacgtggagagcactcgctgtgggacagccgtctcttcaattactctgaatacgaagtgctccgtttcctgctgtccaacctgcgctggtggcacgacgagtacaacttcgatgggtaccgcttcgacggggtcacttccatgctgtaccattcgcggggcatcggcgaaggcttctccggcgattacaatgaatacttcggactgaacgtcgatacggaagcgctgatctatttggctatcgccaactatttcctgcacaagttggatccgaacgtgatcaccattgcggaggacgtgagcggtatgccgacgctttgccgcccaacggacgaatgtggcgtcgggttcgattatcgcctggggatggccattccggacaagtggatccaacttctcaagacgaagaaggacgaagattggaacattgggaacctggtgcacacgctgatcaatcgtcgctggatggagaacacggttgcgtacgccgagtcacatgatcaggccctggtgggagataagactatcgcgttctggttgatggataaggagatgtacacgcacatgtcggtgatgtccgagccgaacttgatcatcgatcgtggtctggcgctgcacaagatgattcgtttgatcacgcatggcttgggcggagaagcctatctgaacttcatgggcaacgagtttgggcatccggaatggttggacttccccagaattggaaacaacgaatcgttccactatgctcgacgccagtggcatctggtggatgatcaaacattgaagtaccggttcctgaacgagttcgatcgagcgatgcaccacacggaggagaagtaccactggttgaattgccttccggcgtacgtgagctggaagcacgaggacgataaggtgatcgccttcgagcggaacaatctgctgttcatattcaacttccacaatagcaagagcttcaccgattatcgtatcggggtcgagcttgccggaaagtacaaagtgattctcagcaccgacgataaggagtttggcgggttcgatcggatcgataagaacgttgaacatcacacattcccggagggctgggctggccggcggaactacatgcagctgtatatcccgtgccgggtggcgatagtgctggctcctcaataagcggaagctgcgctgatagcgaatgtgatgatatatattgggcattaattgttgaatatttagagcgatatatcaatttaccactttaggcattaaggacttctgaacacgggcagtgaaactgtgaatacaattgtgagcaatatgcttgtttaaataaatgcaatcagaaagata

SEQ ID NO: 1436 - DNA, 993 bp, Aedes aegypti
atgctaacatcctccgagcgcaagacgctcttctccaacatcaaggcgaacaaaatcgagtttaccaaaacgctactggaattgaaatcggacccgatttgctgtggcttcagtctgtcatccttcctgatgcttccgatgcagcgggtaacacggatgcgcatcctgctggatgctgtccttcaacaactcaaatcggtcgacgacgagttcatcagctggaaaaagaccttcgtactgatcaaccagatcctgaaacagtgcaacgatatggcccatcgtagcgaacagatattgtattcccgtcgcggaattggtccaccaggcagcatgatgcgtaagctggagaagaagggcgaactggtgcacttgctgtggcgcggcgccgacgccaaactcaccttcggcaagaagttcagcaagagcagcatccacgcgtttctgttcaccggtttgatcgtgctgaccaagaagaagggcgacgaaatctttctaaacacggactactgtccacgtgctctgctggcggtcaagtccggagatatgcttccgattaaggagatgcaagccatcggaaagcacctgatcataatgacgctgctggaggaccacgagggaaaaactatcgaaatgatcatcagctgtccatcggaaacgaaacgcgagcgttggttcaagatgacggaatccttatcctcggaaaatcccgacgagaagatctacgagcagtgggattgcccccaggtggtggccatccatccctatcagccactgcaaccggacgcactggatctggacatcacggaagtggtcaacgtgcacagtaaaatggcggaaggctggtacgaaggcgagcggatccggaacagggccgtcgggtggttccccagcaactacaccaaggaggtacatgtccgtgccaagcacatcaagcagcgccacgtgctcctttcgcacactgttgaaatcgcagagatcttagttagaccgtaa

SEQ ID NO: 1437 - DNA, 3643 bp, Aedes aegypti
gcctaaatactgaaacgttgatattgggacagaacaactgagaagtccactgaattgtaagatgacaatttaaatatttaatatgacctccttatgaactgctcaccaatattttcagctttgaagcaataaataaacagctctcaaacatcagtgtaaaccttcgtcctatatcaacatcttcaaagaattcatggcgaacgaaaacgattccattggcacgccagatccgatcaactcgggatgcattgcttgtagtagatctcatacggtggacgatttcgtgtgctgcgataaatgtaaccgctggtggcatttctcttgtgctggagtgacagcttcagtagagaatcgcgattgggtctgcccgcgatgccttccggatccagacgtcgtagcatcgattatctcatcaactggatcagttacttctagccaacggcgacgccatgaagaacatctagctctcctggcggaacaacaacgattagagaggcaacaattgcaacaggagcacgaactgcaacggaaacatttggaacaaaaacgccaactattatcggtccaagatgtatatgagaaccgcagtattcgtagccgccgtagcgctggtaattcacgtaccagtcaatgggtagacaagcacgcagacgtcacaccggcgtacgtagaagaaggcgcagtgggaggaattctggcccagcaggacgccaaatcgtcaccggtgaacggcaagcagcgattagaaggtcagaacccttcggagtcgcagatcgtcctagatcttcaaaataagctcaaacttaacgaagccgaatctccatgtcatcagatgagcaacgacaagtacgccaccgacataagcaacgacgctcataccaccgaggtgtgcagtaattccaactatactttctataggaaagtagaatgtggcatatcagacattcggttacttcccagaaagcaatcctatttagacccgatgctgttcaaggtgccactgaaagacgtcgtgtgctatctctcgctgctggaagccggccgaccggaggacaagttggagttcatgttccggctgtacgacaccgatggcaacggagtcctggacacaaccgaaacggacgccatcgtcaatcaaatgatgtcagtggcagagtacctcggctgggatgtgtccgaactgaggccgattctgcaagacatgatgacagaaattgattacgacggcgatgggtgcgtttcgttggaggaatggcagcggggagggttgaccaccattccactactggtgctgttaggtgtcgataatactctcaaagaggacggctaccacgtgtggcgattgaaacacttcagcaagccggcctactgcaatatgtgcctcaacatgctggtcggactgggcaagaaaggactctgctgtgtcctgtgcaaatacacggtccacgagcggtgcgttcagcgtgctccggcttcctgcattgccacctacgtcaagtcgaagaaatcgaaggccagttccgtgtttcagcaccactgggtcgagggcaactgctacgggcggtgttccaagtgccggaagcggataaaagcgtacaacggcatcaccggactgacctgccgctggtgtcggatgatgcttcacaacaaatgtgcctctctggtgaaagcggaatgctctttgggtgaatttgccaacatggtgctgccaccaacggtgatatgtcccgcggttctcgaccgacaaaaatccatcaactacaccaccagccgaggcaagaacgtcccatcaacgattcactttcaaatcaccgccaccgaaaacatctgtcccctgttggtgttcatcaaccctaaaagtggaggccgtcaaggtgatcgaatccttcggaagttccagtacctgttgaacccacgtcaagtgtacgatttgtccaagggcggtcctctggagggattgaccatgttcaaagatgttcccaacttcatggtgatatgctgcggtggcgatggcaccgttgggtgggttctggaggcgatggattccatcgaattacagtgtcagccatcggtgggggtgattcctttggggacggggaatgatctggccaggtgtctgcggtggggtggtggctacgagggggaaagtattcccaagatattggataagattcaacggtcttctgtagtgatgcttgatcggtggagcatcgaggtcaagaaccatccaacgatcattgaggatacgccgataattccgactcataaggtactacaggtcgtgatctcaacagttggggttgaatgggttgattattctaaatttgtttcatatttgttttgcttccaacaggtgaccctttcggagaatgtacaaaaagtgatagaactctcgcataggataatagtggaaaaatctgtgattcaatcgtacgacgaaagcaaaaatagtacaaaaactacggagttatcgatagagaacacaaaacgagtcgttctgagtgacaataatggcacagccacgacgatgcaccaacaccagcaccaagaattggccacggctacgatgacaacgtcgatgtcctgctcctcgtcgaaggaaattactcagcaaacaaccaacacgaccagcaacggggacattggcagaactctggcatcacactcagaaacagtcgttaatggcaccagccagtgtgaagcggaagtcatcaatggtgaccactcgccttccccttccccttccagtggtggtgagcataaagacatcgacggaaacgacgataagacacgtgctgttacccaccatcataataatcacaaccattcggacggagcgaaaccggaagaggaggacgacgagaaaccgggagagaccccagcggttccgccagccaaggagaaaattgttgacctgcccaagctgataaagccacaagccgcgtcggaattcaccgtgccctataacattgtcaacaactacttctccgtgggtgtggacgctgccatctgtgtgaaattccatctggagcgcgagaaaaatccccacaagttcaacagccggatgaagaacaagctgtggtatttcgagtacgccacgtcggaaacgttcgccgcatcgtgcaaaaatctgcacgaaagtctggaaattgtgtgtgacggagtctcgctggagcttgccaacggtccccagctgcagggcatagctctgctcaacatcccgtacacccacggcggatcgaacctgtggggcgaaaatctgtcccagaagcggatgcgcaagggcccatttcggaaaaagctgaaaaactccgacaaagagctatccgccaacagtttcaactcggtcgatctgtcgattgccattcaagacattggtgaccgacggatagaggttattggattggaaaattgtctgcatatgggtcaggtgcggaccggcctgagagcttcgggtcggcggttagcccagtgcagcgaagtggtcctgacaacgaagaaaacctttccaatgcagatcgacggcgaaccatggatgcagggaccatgcatgatacgactcacccacaaaaaccaggtgcccatgctgatggggccccgctcggagaagaccggtggctttttcaacttcctgaagagatga

SEQ ID NO: 1438 - DNA, 797 bp, Aedes aegypti
ggatacggaacaggcaagcacaagctccatcaactgtgagaagaaagcgtaaaagtgcttccagcttcactcgtgacgaatctgatgcaatggacgaacttttggaactggacgagactgccgattattcaatcgtcgaacaactcatgcaaacaacattccagtaccgagaaggacttcgcaaccggaacacatcatgtacagagattctgaatcaatttccttatttcctgtattatgatggaaaattgattcataacgaatttgaagcgatgttcccggataaacaagcctcccaacagttctcaaccgtcgttcctctatgcctcatgttaaaccacttctataatgaaattgcttgtgtcggtatacaggcgctcctgaaaataatggcggagctgacacaccagggcaacgtccgaaaatcagaaccttcaaacttaccgcctttggaggattatgcttcagtgttcgttaaatggaggcaagaatcaccaaacgaggaaatggaagtgtcagaagttcccttcgtttattgcgatgcgctacctttcgctgaaggaacatatttcgtggtcatggagaaaggagcaatcgattgtggggaagactttttcttagcgttggatttgcttctaaaggcgtataaagtgctgaatatcaatattcccagtaaagctaagaagacaattgactttttcaatgtttttgtatataaaatcatcaaacgcagccgagtaacacgagttaacgacctctgtgctcatttgtccaaggctgccaatgcacttccataa

SEQ ID NO: 1439 - DNA, 657 bp, Aedes aegypti
atgggcgcaatgctgtggaagtcgtgcaagcaacatgaaagcgtcaaggccctcatcggaacggacagcctgcgggacttcctcgggatggccaactgcgtgctgagcagcttccttgcgcgccagggagcgggcggagcagccctgtcatccgacagtgaggattacaagtttttggccacgatttgcgggtgtctaacgaacttggctgcgttcccggaagggaggacacatttggccatcgaaacggacgggttgctgtttgccaataatctgctgctggcactggatttgtttcggatgcccgagggcagactactgaagcggatgtcgttgaccttcgtgttcaacatttgcctggagaataacggagcgaaatttgtgctgggcgatgaggcccgacttggaagcatagtgcgatgcttggatcagaacaactcgcaagacgtgctgaccctgagcgttagcctgctggtaaggttgatcaagtcggtgcccgaataccgaacaagggcggaaatcgctttgcagattcccagggtaatggtgaagcagattaccagcactagcaatcaggagctgaaagaaacggcatcccatctgttggagttggtcgagttcgattggatcaaggctgcgattaataacggaaagtga

SEQ ID NO: 1440 - DNA, 542 bp, Aedes aegypti
gtgctgcgtatcgcaaattttaaatcggacgaaagaaactcgctgctaaataagcataaaattacgctttaaccatcaataattaaaacttattcgcgatgtccgacgacgactgcagcctgatggacgatctccgagtcggggtgtcccagttcgaagccaatgtggccgcactggcgcaggtgctggagggctatgcaaccgaggtcaccgagtttcaacatctggacgatgatatccgccggttggagaccaccagcagattgctttgcggctcggtggaaaaggccactcaaatcgtagtccccggaatgctggcggatattgaagcaaagaatcaacagttggatcagctctgtttggccagcaggaattgcgaggccacggttaaagctcagagagagaagatttcccaactggaaacggaactgaaggcagttagagagtaagatttagtacggcagggctggtagcgagtgttggtcactatttcaatgcaagtccctaaaaagtctatctctaataaaaatctctaaggcctc

SEQ ID NO: 1441 - DNA, 1462 bp, Aedes aegypti
cacgcagcgaaaagaaaacgaattccgattttgaccaacaaaaattcggctaatcttgcggtgccaatctattaactagcgatatcctgtgatggccggatacagtgaagaacaattctgggcaaaccaaaacaatcaatcgacggcatacgatggatttggagatcagtcgcagaatttcgaattccagtcattcgatcaaaatgccagctttttcccgccgaacgcatatccttcgccacaacaacagcaagcttacggccagccgtcgattttcaccccagagattccgtccgctggaatgagtcaagctttcggcgttccgggcgacattccaggtgctgcaggagtagaacccagtgaatttgatgaacctccacttctggatgaactggaaatctatccacagcgtatcatggacaagtcgatggcagtgttgaatccttttcacaagcaaggcctcgtagacaatcctgagtacttcttcaaagaaacagacctcgcgggaccgatcgcattttgtctgacgttagctgcttgcctgttcgtgtccggaagcaaagcccagttcggctacatttacggtctctgcatcatctccgatggggtgatgtacgttctcataactttgatgtgtaattcgacggagaactatgtcacgataacggccgtggccagcattctaggttacagtattttaccgatcgtttggctctcaatcgttggggtcttctttgctttaaattcgacgttcggaattatactcgcagcttgtgccatcttccttgcaaccatgagctgcagtcgtatcttctgcattatgaccggcgatcaaaatcagcgctatttgattgcttacccatgcgctttagtttatattatttttacgcttttagtgctgttctgaggaggcaaatgtatgtatttctttttgtcctacccagtaaaatgatctaataaaagaattacaattactaattttcgtaatcacgattttatttctttttatccatattcccttagctacggggtggccttgtttaacggtgacacatttttaagtaataatctatgcacattttcacgttagctaattacaaacacacattggaaaagttgttgatgagaaaacaagagaagagagaagagaagagacttctttctaattagtgtcggtggcgtgtgagcaaacgcaatagtcgttttgagagacgaggaaaacaatgtgaaaatacctacgcaaactgaaacagtctgtttgaagattagttttaaaaaacgattaatatttcaaactcagttggattcacttgaactgctggtagctcatctgactgggtttcttctccgagaagaaattgcgtaacacgatgacttgcccgacagctatcaccagaatggcaacggtttccgtcagcgaccaccagaggacacgttcgttcagatcttccgctcgtttgcg

SEQ ID NO: 1442 - DNA, 1500 bp, Aedes aegypti
atgtcgaaacaatttgttggtttttctgacgatgatatctacaaaatcacccggcaaactaatggcaaagattcagcaaaaaacatttcgcgtccccatcaaaagcctgtgcggctgggcgaaaagaaacctcccacgaagtcggttcctccaaaagagcatgtgcagacgaacgcagctgatagcagtacagccaccagttgcgtcgattccagcatttacccaaaccatccgattcaacaggcggttgcatttaaaccactgcccgcaatgatgaatgccccggaggatgaatccattttgatactgccgaagaaaccggtcctgggaacgggtatgcttccggacagtatcggagctgctcacaatgcgctgccggattgcccagtactggaaggattgcctgcatctacccctatggtgaaaagttccggacccgatacggttaccccgttcaaaggaatgtccctgaaggacttcgagcagcaacgaaaactgatgcaggagcagaatcgacaaaaacgcaatatgctgcagaaagttatagaacaacacgcgcaaaagacagcagctgaagcaaacaaactacaagaaataaagacggaactaggcaagttggatacggaactagcgacagatgtagccatccttaggaaacagattgatgctgccagcctgcatttttccaacgttgagaaaaattatctcaacatagaaaatctcttcctcaaagctaaggttgaactgcaccaagctctcgagcgcaaggaaatgctaacggagcacctctgtacgattatttcgcacaatgaagaacgcaaagccaaaagactgtcggagctaatggagaaagtcggcctctccttgaatggtgaatacgacgatagcagcattaacggggattcaactgcgtcaactgtttcatcgacggttgagacgccgcaaaagtgatcttcaatgcgtgtgaaactgcaactgccttaatgtgacgtactaaacgatgataagcaacaaataaccaaaaacaaaaaagcaatatgcaatcttgtattatccttgcatttagtatggaaggtgttgtccttaagtatttacttattccaacaatattttactgatcatgttatgtttaattttattgaatcttcgaatagcttacgattgtgtagccttttaacttattgctcatcgactgtaaaagttaaacttccatgagcactctgaacaatttttgctttctactaaatatgtattaccctttaaccgttcaactatatactacgaacgcacaaatgaacaaaacatcaattacaaattatgaatagattgtgggaaaccttaacaaggtgctaatgagaatgatattttaatgtttacaaatgtgttatactgaatttacaatgacagcgttacatgttacgcaaaaaattgggtatatatttaactattggagatgaccaattttatacagtaaataaacaataattttgatatatttgc

SEQ ID NO: 1443 - DNA, 856 bp, Aedes aegypti
aactgtgtggtgtttacaaagtcataactcagggcgcaattgacgtcccccagtgttcgccagcatgaggaaaagaaaagtcaaatgacatcccccgtcacaactgccctcaatatcaattcccattggtcatcacaagaagaagaaaaaaataccagtgaaattcagtgcagattgttaagtgcaatcgaagaagaaaaaaagtgaaaaccaaagtgcagtgtttaaaatagtcaaggcctcgcttccagtgcgcagcgatacagttgtcgatacgaaatattgcgcctccattaggagcgctttgaacaccctacggatacccaccacgatgaagtggaacaagaagccaaaacaatcgatatcgagcgtcacgtccatgtcctttctgtcggacgagaatctgacattccaccgcttctctgatggcacgatttcgttcacgtcggagcgcaaaaaatcggccgagggaatgctgggcaaacccggtcaggcgctaaccatcgaccgagcccttcaccttcggaaacagtcatcatacaccccgacggcttcgacgccaatctggaccacgcacacggcgttcaacaactacaccagtaataccattgccaacagtaatcacagcgggagtagtattaccgataacaatgccagtacgaccacggccggaatcccgacggccagcgacctgcggtacctgtcctcgccgaccaatgccaacaataccagtgttatgcacaacgggtccaccgtgaaactcctgtcgaccaaagtcacctcgcagacgaacgtcgccgccgagagcgatgatcacacaaacaaacaggtgagtcaccaggtggaattttcttga

SEQ ID NO: 1444 - DNA, 1518 bp, Aedes aegypti
atgtggtggtattcctggttgacgtatctgtgcgcaagtgtctgcatggtgatgaattttctgcaatggtcccgtcgaaaaacgaatgccaaatttgccaaaatgtcaggccctcggaggctgccgctgataggacatgctcataaatttttcagagctacgccaggaaaaattgccaacaccctcaaatacttcggtagcttcccttccccggtgtgcatatacatgggacccttgccacacgttgccattttcgatccggagcagcttcaggtgattctgaattcgcagaactgcctagacaaatccatacagtactcattcctgcgggtttcccgcacgatgataagtgcacccacacatctctggaaaaatcaacggaaagctctgaatccatcgtttgctcctgctattctgaacaactttgtaccgatattcaacgagaaatgcgccatcctgacaggactgttgggaaaatacgtgggacaaccggagcgtaactacactcgcgatctttgcaagtttacgctggatcaaatctacgctaccgcgttgggatgtgacttcgatatgcagcgatcaccggatggagagcgttctctggatttgattgaatcgtacataaaagttatggtagccagaatcttcactgtgtggaaatatccggaatttatctaccgtatgactagtgggtacaaacgagagcaggaaatccttaaaacctatcatgaaacgataatttcaaaactgttgcgagcgattgatttcgaagaaaaattaaagctatcggacgagaacaacaatgaagctatgaacgaagacactggctctaaaaaacccaatattttcatcgatcgtctattgaaacttatgcgcgatggagatgaaatcgcgaaggaagacattttccaacaaatcgatatgatcttatttgctggcaatgacacaacggcgaaaacaacgagtttcattttacttatgctggccatgcacccggaagtgcaggaacgttgctatcaggaaattatggcagtttgcccgggagaaaatcaaatcgtaactgccgaagatgccgcagagttgatatatctggagatggcatgcaaggagacgatgagactcttccccgttggttccgtactggccagagtaacgactgcggatataaaactgaatgatgaacataccattcccgcagacagcaccatcataatggggatctatcaaatccaccgggatccgaaaatatggggtcccaaagcggacgagttcgatccgaacaacttccttccggagagagccgaaaagcgccatccgtattcgttcctcccgttcagtggaggtccacgaaattgcgttggtatgcggtatgcgtggctttcgcttaaagttttagtcgtccacatgttgagaaagtatcggctcagcacttccctcacaatggatcaaattaggatcaagtacggtataatattgaacatagccaatggttgcttgctgacgcttgaaaaacgatag

SEQ ID NO: 1445 - DNA, 1515 bp, Aedes aegypti
atgttgtgttgggttacgatgctgacgtatatctgtgctagtgttattttggcggttttctgcttacgaagcacccgaaggaagatggattgcaaattggcttccatgtccggtccacgaaggctgccattgctgggacatgctcaaaacttttacaaatcgacaccaaaggctatcgctggcacgctcaaatacttcagtaaatttccatcgccagtgtgcatacacatgggacctctaccgcatgttgccatcttcgatcccgaacagctccaggtggttctgcattcgcagaactgccttgacaagtccgtccagtactcattccttcgggtttcggaaactttaattagtgcgccaggtcacttgtggaaaggacaacgcaaggcgttgaatccttcgtttggtccggccattcttacaacttttgccgagatcttcaacaacaaatgtgccattctgacgaagcgactggaggagtacgcgggaaagccggagcgtaacttctatcgggacatttccaagtgtaccttggatcaaatctatgcaacggccttcggctgcgatttcaacatgcagacctcgctggacggcgaacgctccctagatctgcaagaagcgtacatgaaagtcatggcaaacagatttttctcggtttggaaatatcctgagttcatctaccgatggaccgcaggttataagaaagagctggagctacgacgaatctatcacgaaacgattacgtgcaaacttgtccaacaggtgagcgttgaggaaaaacttcacacaaaggaagatattgacttcaaaaccgaagaaacgggaaaaagaattccggaaaacttcatcgagtgcctggtgaagtacttgcgtgcggaaggcgaaacgtcgaaggacgctgtttatccgcacatcgatatgactgtcttcgctgggaatgacacatcggcgaaaaccatttgttccatactgctcatgttggcgatgcacccagaagtgcaagaacgttgctatcaagaactgatggaagtttgcccggaaaaggatcaacatatatcctacaaagatgcagctaacctcacgtacttggaaatggtgtgcaaggaaactatgagattgctaccggccgttcctttcatggcacggataacatctggagacatcgtacttaatgaccaacacaccattcccgccaactgcacaataataatgggcatcttccaaatccatcgggaccctcggatatggggtccgaatgccgataacttcgatccggacaacttcctgccggacaacgtggccaaacgtcatccctattcctacattccattcagtgcaggtccccgaaactgcatcggcacacggtacgcgtacctttcgtcgaaaatcatggtcggcagcatattgaggaagtaccgcctgaaaacgtcgctcaccatggacaaactgagaatctcgtgcggtttgttgctgcacatttccaacgggtgccaaatggcgatcgaacatcggtag

SEQ ID NO: 1446 - DNA, 3612 bp, Aedes aegypti
atgtccaaaaacaaagataaactaaacagctcgaacacgctgttcaattatttcgcaaagtcgccagccacaccaaagatcaaaccggtgtccggatcgtcgaatcccggaacaccggtgagcagttcgaatggtggcactcctaagggagtcatcaagcaggagaaagttacgccgtcaccggcggcaaaggacaagccgcttaatggcaatgatgacgaagacgaggacgagatccagcccatgaagaagcgacggcggatcgtcatgatggatgatgaggacggtgattcggacagcgagaatcgccagaagaacgataagacgccaccgaaggccgagttgttggcctcgttcaagcgggtggaaaaggacgaagcttcagaatctccagtgcagaagaaggtcaaaaaagaggcggaagacgtggccgaaggcaaaccagatctggcggatttgggcgcggaggagggtgcttcggttttggacgagcctaccgtgtgggcccatcagaagctggacttcttgaagccggagaagatcaaggacattcagggaaacaggccaagcagcgagaagtacgactcgaggacgctttatgtgccggaatcgttcctgggcacgctgactccggccatgcgtcaatggtgggagctgaaatgccgccacatggactgtgtgctgttcttcaaagtgggcaaattctacgagctgtaccacatggacgccactgtgggagtggaagaactgggattctcctatatgaagggtgagtttgcccactcgggattcccggaacaggcgtacgagaggatggccactttgctcgtggataagggcttcaaagtggcacgcgtggagcaaacggagaccccggacatgatgcaggagagatgcagaaagaacaaaaccaattccaagtatgataaggtggtgaagcgagagatttgccaagtttcgctgaaggggacggaggtttttggtcagcaagtgcacttgaccctcaaccatcagccgaagtacatgttggccattactgagagaatcaagggggaggttggcagtcggtatggcgtctgcttcatagatacttccctaggggttttccacgttggagaatttgaagacgattcgcaaggttctcgactgttgacactgctgtcccattacgctccagctttggttcttcaggagcgaaatgtggtttccgccgcaactcagcagatcttcaaaaccgttctggctggaatccgaaaggaagctctgactaacgaatctcaattctggtctgcggaaagaacgttgaaatatcttgcggagaacttctacggtggttcgacggatgatcagaattccaagtggcctgaagtgatccgttccctattggacaagagtgatcatctagggctgaccccggatggaaacttcaaattggcgctgaaggctttggggggttgtatttggtatctgaaacgttgcttgctggatcagcaaataatctcgctggctagcttcgtgatgtacattccgccggatgatgtagagacatgtaagaatctcaggatcgtcaacagcaatcgcttcatggtgctcgattctgtgacactgaacaatctccgcataaccgagggcgagcaatcgctggtcaaccggatggaccattgctgtaccaagttcgggaaacgtctccttcatcactggatctgctccccgagctgcgagagggatgttattgtgcagaggcaggaagcggttacggaattgatcgaggacgtatcgctgcttcaggacgtgcgtcaaattctcggtgaacttcccgatcttgagcgaatgttggcccaaattcatacctttggcaatgcggagcgcagcaagaaccatccggacggaagggccattctctacgaggaacaaacctacggcaagaagaaaatccaggacttcatcaacaccctaaagggattcgggacgctaactaaactcccagaattgttcggaaaagtttcttcaaagcttctggttcaactgactcagacatccgaacggggcggatctttcccggacatggccgacaagattcgattcttcgacgaagcgtttgatcacgaacaagctctcaaggatggcgtcattgctccgggcgaaggtttggacgcggagtacgatgccgtccacaaagagatcaaaaacatcctggaagaactcgaagagtacaaacgcaagcaggaaaagtactttggctgcaagatagccttcttcggaacggataagaaacgcttccagttggaaatcccggagagtgctgccaagaaggccaacagcggctacacgttggagggtcacaaaaaggggaagaacggcgtcaaacggtaccacacggacgagacgcgcgaattcctcaagcggatgatgcagaccgaagatcagcgcaaaatggtgctcaaggatttgtccagacgaattttcgaaaagttctccagcagctatgaaatgtggagaacttgtatcgatctgacagggacactggatgtcctgacgtcccttgcggagtacgcccgaagcgagggaaacatgtgcgtgccggagatcttggatgactctgctggacaggtcttcgagttggaggaaggaatccatccctgtgtgagcgattccgagaactacatccccaatggcgtcaatatcggaggagagggggctccactagttctgctgaccggtccgaacataggcggtaaaagcactatgatgcgtcaggtcggcatcttggccgttatggctcagatcggttcccgaatccctgccgaaagctgtcgtatgacgctcatcgatcgcatcttcacccggttgggagccaacgatgacattatggccggacacagtaccttcctggtagagctgaacgaaacttccacaatcctaaagcacgccacccgcaaaagtttagtcctgttggatgaattgggtcgaggaacggccacctacgatggaacgtcgatcgccggagcggtggtcaacttcctggccgatctcaagtgccgttcgatgttctcgactcactatcacaacttggtggacaacttctccacggacagtcgcgtccggttgggtcacatggcttgcatggtggagaacgaagacgacgaggatccgacacaggaaacggttaccttcttgtacaagtacgctgatggagcatgtccaaagtcttacggattcaatgctgccaaactagctggcatgccggcttgtatcatcaagcgggcccatgaactctcgaaaaccgttgaagcggatgcgttaaaacgccgaatcttcaccaattcgcttctacaagaagatcctcacgatctgaaagaactgctgaacaagctgaaggcgtgtcggttctaagttccgaaggtggcggtaagtattccattcgctacctagcttcccaaaatttcctgaatgtacaacaacttccatgacgcgaatattgagtcagaatttcataattgttatccctctatcgtttgacaaaccgaaaccagtatacgtatagataggacgttaagttttatattgcttctgtagagtaggtctcaataaattcctggtgataatcagagt

SEQ ID NO: 1447 - DNA, 2573 bp, Aedes aegypti
atcgaaccggcaaagtggaagtggctttatgtgtgtcgcaccaatcaagttgctaagagttgggttctctaatgcagccggagtttaaatgatagtgcgatccgcgagtagtgtagcgcagatagtagcagttgttagtgaaacggcgtcgcgactggaaggatactagctaaagttcaaccgtgatttgttgcctccgatcggtgattttgcagcagcagcaaaagcagactagttcgtgaccagtttggaagtgacatgtgttttcagcgaggataatgttacgcaatcctataattacaatgacgataaaattactcgtgttttttctgctcaccatccaccaagttattccacaatcaccgttcgaaaacatcttcgacgatctaagtttcctcttcatgtatggtaaccggacgtctcgtatcccagatacaacggtgttccgaaaggagtatgatttcatcgtcattggtgccggatccgggggttccgtcatggctaaccgcctcagtgagaatcccaaatggaacgtgcttttgctggaagtgggaaaagaggaaaacttagtggttaacgtaccactgaccgctggtttgacgaccgctactaagttcagttggggctatcgctctgctccaatgcgaaacgcttgtaagggccttgaagaaggcgtctgttattggcccaaaggaagaggtttaggagggacgagtctcataaatttccttctctatggaagaggacacaaacgagattacgacgaatgggaacaaaatggaaactacggttggagttacaatgatgttgttaagtactttgaaaaagcggagaagattaaaggacgcaagccaaacccagaagggtatgtccatatcgaacaaagttcctttgaaactcccatgttaaggcgttacatcgaagctggaaagtcatttggatacaaagaaattgatcccatggcgcctgttcagttaggattttataaagcagtggcaaccatgaagaacggagaacgttgcagtgcatctagggcatatctcagaccagttgcagatagaccaaatcttcatatatcgatgagctcttgggctaccaaaattttaattgatcctcaaaaaaagacggcacatgcagtggagtttacgaaggataagaaacgatatcaaataaaggttacgaaggaagttattctttcagccggagcaatagcatcacctcaactactcatgctttcgggagttggtccgaaagaacatcttgaatcactaggtattccagttatacaagatttaaaagtaggatataatctgcaagaccacacaacgctttctggattagtgtttaccgtgaacaaacctgttaccatccgtgagcaagacatgcgacgacctgaacactttctgaactacatgatcaaccgtaaaggaccattcacggttcctggtggtgcggaaggtattgcattcgtaaaaactgtagattccgacttgcctgctgattatccggatatggaactggtactaggaaccggtgccgtcaataacgatgaatccggatcccttcggcataccttcggaatgacgaaggaattctacagcaaaacgtatgggccagctagagggcagcatgcttttggaatagctccggtgttgatgaaacctcgtggcagaggccgactgtatctgaagagcacaaacccataccggtggccacagatggaagggaacttcttcgatcatccgaaagatatgtcaacgatgatcgagggaatcaaactggctgtgaaactgggagagtctaagagcttcgctccttacggagccaaacttttgaggacgcctttctacggatgtgagaaagaaacattccgaagcgatgactactggaagtgttgcctgcaacaggtgggagccagtatacaacatcagtccggtacgtgcaaaatgggtccatctagcgatcccgatgctgttgtcaatccagaactgcaagttcatggtattcgaaacctgcgagttgtggatgcttctataatgccattcctcccggcagcgcacaccaacggagtggtgtacatgattggagaaaaggcggccgacatggtgaaaaaatactggtcgaataatgtcgatagttgatggaaacgttaactatgaagggtctccaaataaaacagggtggtatttaattccaggtgaacattttttttaatctagtcatttaaaagatagctgtaaatatagaatgtcagaatcttcgtacccatgtgacagttattgattttatgttcgttgacgaaaataattaaaattgtataggaatctgaaactgttcaataaactcaacgtgaactgccttaccagggattgtaagtgacaaaaatatgtcttccactcataattcaaatatcatttggtacagtcatgtatcctataaagcgttgccacctgcattcctcccaccttaacttcagactattgcttgtgctgaaattttgatcggtttgtcactcactgctggtgcccaatgcttttttgaaacgccctaacctcgcgttcagtatcgtaagg

SEQ ID NO: 1448 - DNA, 2676 bp, Aedes aegypti
cgaactatcgtgcttagcatttcgaggttttattttagttaaaattgtggaatatttaagttaatttatctctaaaattcgtattacttgtgctgttgaaccatggcggacgaagatcagcgaattcgtgatgttcagcgggaatatttggactttctggatgatgaggaggatcaaggaacgtacacggcacacgtccgtaaaatggtcacggacaatgccaaacgcttggttgtgaatgtaaatgaccttcgccgaaagaatcctgcccgtgcccaagctttgctgaacagtgcttttgatgagcagttggcattctcacgtgccctcaaagaatacgtgtccaccgtggaccccagctatgccaaaacgcacgaggatttcttcgttgcatttgagggcagcttcggaaataagcacgttacaccgagatcgttgacttccagattcttgggaaatttggtttgcgtcgaaggcatcgttacgaaggtctccctgatccggccgaaggtggtcaagagtgtccattactgcccagctaccaagaaagttatggaacgtcgctatacggatttgacatcgtttgatgctgtgccttcaagtgcggtttatccctccaaagatgacgatggcaatatcctggaaacggaattcgggttgtccgtgtataaggatcatcagactttaagcatacaggaaatgccagagaaggccccagcgggacaattgccgcgatcagtggatgttatttgtgacgatgatttggtggaccgctgcaagccaggtgatcgtgtccagatcgtgggtaattatcgttgcttgccaggcaaacagggaggatacacaacgggtaccttccggacgatcctgatcgccaacaatatctcccagttgaacaaggaaagtaccctgaacgtgacgcgggaggaaatcaacctgtgcaagaagttggcaaagcaccacgatatcttcgacgttctttcgaaaagcttggctccttccatccacggccacgaatacgtcaagaaagccattctctgccttctgctcggaggaattgagaaaaacctggccaatggaactcgccttcgaggagacatcaatgtgctcctgattggagatcctagtgtggcaaagtctcagctgttgcgctatgtgcttaacacggctccacgtgccatcactactacaggtcgaggttccagtggtgttggtttgaccgcggccgttacaacggaccaggaaacgggcgaacgtcgcttggaggccggtgctatggttctggccgatcgaggtgtggtgtgcatcgatgaattcgacaagatgagtgacatcgataggacggccatccacgaagttatggaacagggtcgagtgacgatttccaaggcgggaattcatgccgctctcaatgccagatgctcggttttggctgcggccaatcctgtctacggaaggtatgaccagtacaaaaccccgatggaaaatattggcctgcaggattctttgctgtcccgtttcgatttgctgttcgtcatgttggacgtcatcgatagcgatcacgatcgaatgatttccgatcacgtggttcgaatgcaccgttatcgcaatccgaaggagcaagatggggatgtccttccaatgggtggtaccgctgtggatatgttgtctactatcaatccggaaacacgcgatgagaaggaaacaccaatgtacgaaaaatatgatcctcttctgcatggaaatactcgcaagaagaccgatcaaattttgtcggttgatttcatgcgaaagtacattcatattgccaagtgcctaaagcccaaattgacggaagctgcatgtgaattgatttccaatgaatactctcgtcttcgctcacaagatatgatggattctggtgtagctagaacacaaccggttacggctcgtactctggaaaccttgattcgtctatcgaccgctcacgccaaggctcggatggccagaaccgttactgaaaaagatgcccaggctgcgatcgagttgatccagtttgcctatttcaagaaggtgttggaaaaggaaaagaagaagcgcaagcgtgccgaagacgattccgaaggcgaagaacaagaagaggatgacgaagaggaaacaccatcaggaactcaaagcgcacgtgccagtcgacgtgcgaagcgtacccgtaccgaagatcaagaattgtccgacactgaggaactggtgacaccggcaccggatgctggtgatctaaccaagagaccaaccatctctgctcctcgaacaagcggcagcacaccctcgacggttccgatggaaaccgaagaagtcgcggaaatctccgaggacagattcaaaattttcaagcagggcgtttcacaagcattccgtcaagctcgggagcaatctatggcagtgccccgtctcaccaagcacattgacgaaaacagtggtgcggaggcattctccgcaggtgaagtgaaagcagccatcgctcggatgaccgaccataatcagattatgatgcacgatgacgttgtgttcctaatctaagcatttgattttttttactttacatatattttgtaccttactacgtttactgttaaaatttatcattagcttaagtatcgtaaaattgttcaataaaaacaaatttttaggtcacacaac

SEQ ID NO: 1449 - DNA, 3045 bp, Aedes aegypti
attgtgggaatctgttaccttgcttacaggtactttgcctctccgcctgatgaacaaagaacaaagagctggatgtgtacgtgcatatacaattcatagttgtgtgtgtgtatcctgcatcttctcccgccaaaaggaaagtaaattcggtgtgcacctcgcatggcaaggacgacgaaagtgctgaagtgtggcataaaattatagtttttactaatttcgtgttatttttacgtttcggaacgtgttaaattaaatatagttgtaccctagataagttgcattgttgcgaatgcgagtttttctgtggttttaaattgtgagaaaaaaatatagagaatagataaagagtaacatggtgaaaattttgagttccagtgcaagcaagatgtaccgaaattccgaacaatacagcgattgttcgaacctgttaatgaaagaagatgatccttcgttggaagaacttgatcctgccatcttgagctgcggtttgccggcgatcattctgtccgatgtccagccggcagtttatgtgcctccgataagctactcgatcgaccagctgctagccattagaaagtcctcgctctgttctcgacgcccggccgcagcagacgatcccaaggtttcggcattagctgtttggagaaccaatccgaatcctccctcttaccgtcgtggcaagaggaaccccaccgtcaacccacagcagaacaaccagagcgatcaaaacagcggaaccagtaaagaacagtcgccggaacaaatcggcaagtttagacatcatggaacggaaaacggattcgttgggccacgattcagacgaaactacgaattcagcagcagtaatcatcatgtcattgttaagagttaccgttccgatagtgaccagcaccatctccaaaacaccgttatcgaggaagaacccgaatgggtatcggctggtcctacctcgcgcttggacacaatagaactacgcggcttcgatgatgacctgtcggtttcgcaagcgtcttctgacaagactagcaatggtgacggcaaaaactccagcaagaactcgggaaagcacatctcattctacgacgagcttcaccattatgagcatgttcatgcgaagaaaagtggcggtggaattctgaagccacacgattcatctggccgtgaaaatgacgttgaaagcgtgaccacgtccaataccggttcccctccgccggctcgaagtaccccaacgaagcacatggccgagttcaaccatatgatggaagacgcccaaagacataacagcggagtcaatgtgaacaactttgaggagttcatgaaatttgattcattgctcgggtctgattcatctcttgcacctaatgtgccgtccggatcgcgattcagcaaatggttccgccgtaatggaaattcgttcaacccttcttccgttggcaacggttatgagtcccgcagacattccttccatttcccagcggacaacgttgctccggccaataacagccgttacccagtggaccgtaactatcctcagcaatatggacctcgttttaattcgttccccaatcaaggaccaggaggagatctgccgccggattcgaactcggcctttaagcgtctggtagatatgatggctcaaaatcgtgccaacaacaacctggtagctcaacaacagcaatatctactgcagatgctcaacaagaatcagcaaagcgaaattctgcgtcgtatgttgatcaagaacacggtggacaatgcatccgacgctaatcaacagccagcaacgcagactccacgtgttccgactcaactggagcttcagttgcacacgcagtccatcatgcagaatgcccttctccgcaagaagttgcaggaccagcggaaaatgattctcgatcagaacagccaaatggctgaaatgatgatcgcatccgcgggtaaatcgaaaccgaatgccgaagttcagcagttcgtcaaatcagtgtccccgaacattcagcgcagcttgtcgcttctgagtcaaacgaccagcaataatggtgcaggtaatcagtatcgctcattcaatcagacattcccggggggcaattccacaatgaacaatccggccttcaacggagcatcacatcagcagcctgatctgtcggcttctttgcgtcaattattgctgccccacaatcagcagcaaggatcgcgtccttatgggaatcgacgtcggtacgaaaagcgttccgtcacatggaaacaccccaactaagcgaccgaaggccgcgcattccacaaaatattatccctcattgatgcaactgatgatcctttagttggaatactggtatttcgagcatcatcttcaaattcgcaattttcgtttctcatcatttatgcgtgtcttgtttttacttacctttaattacttaaaaaaaagtgtcgcgtttgtttttttttttctgtatccaacatttattttacaccaaacggcattattcgacttcagcgttgtcggtaaagtcctcgggcacagatatttgctatttccttcatacacattaggaaagtagttttaagacgattgtgtgtactttgcaagaaccaacggtagttctatcctaaaatcatattccttcatattttttcctaagaacacttatcattgtttgctcacaaatttttgtcacatgattgtattatttcagcaagaaacagatacattagttttaacagactgaattggctatagtggatttacattttgaatctaagacttaataataaaatattgaattgtgcaatttgtgtgttataaattgagtaatcgaaagaacttatcatttcttcagtatccaatccagagtgtcaacgattaccgtaaaagagaatgaatagaaaaaatagggagaataaaagaaaaacaatctactgtctgaaatacagtgggattccgttcttggcaacaaaatcgcaattttcagtgtgacgggacaaatgctatcagatagcatatttttccgaagaccctctccttggttatgcgaccttgccgcg

SEQ ID NO: 1450 - DNA, 702 bp, Aedes aegypti
atgcatggaaaacacaacgatgattcagaagaaaactctacaatcagatatagaaaaactcaggatacacccataacagggaaacaaattaaggaaacaggaaaattggttcaagaggaaggaaagcagtggcaatggaataaagaaagaaataaccaaaagaaaagcgacgacaaaaaagcagtagagaaaaatatggatgaaaggggaaacgagacacggaagataacgagagagaaacataaaccaattaacaaggatagagcaataacgaaagacttcataacggataatagaaaagaagaaattctagacttagaagaaaaaagaaggagacaaagaagtaaggaaagggaagacagacttgaacaactcgcgacacagattaaaacaaatgaagaaagatcaatgttaataaatggaagccagaggcaagggtgggaagaaaacgacagtcaggaaagattagatagagagaaacaagcaaaaacagataaaaataccagaggaagaattcagatggacctaggggataaaaaggaaaatccaaggatatcaacaaaacagagaaatgataggaagcgagctaaaaatgaaagagaatcacgtagcagaagaaagaggagaaacaagaaagggacaagtaatagaaagcgaagaatcaagagcaacgggagtaaaagcaacaggagaaataagtga

SEQ ID NO: 1451 - DNA, 700 bp, Aedes aegypti
tcggagcggcatctcggcagtgattaggttttaggttcctgctcaaaaatcttaccgtttattccagctcatcagatggaggcaaacgaagaaatgatagacgactgcgaggcgagtttttctggtcagttgcggggttcaaatggtcccacgcttggtgcacaaatggatgagtcactcgatctctgtgtccatcgccattcagatgctagttctctggttgtgctacgtgactgcaccaacgctatgagggaagaccagcttgatgaattctttgtttctccgccaactccaaagcgcaacccaacgcatcgaaattatgtcaatcgcacacatatcgtcttgacggctgccgaaaggctggaagaaatgcggcttcttgaagaaaaaaaaagcaacaaacagaatttaagaagaaaaaagcggaaatgcgtgaaattcgtaagaaagaaaaagagaaggaggcagaagaaaggaagaagatgaagttgttgagggaaaaggagaaacaactgatgattcagctgaataaagagaaaggattgaaattgattattgagcaacaaatgctgaaggaactcgtagatcgagataagacaacacagatacaagtaaaaacgttgtttcagaaataataaacattacaaataataaaaaaatcagaaaagaaaaactagcaaaatgataattcgaacattaa

SEQ ID NO: 1452 - DNA, 537 bp, Aedes aegypti
atgggtgtcggatcgtctaatccaggcaaaagtagttcgtcccatcgcggaggaggaaatcgtcaccgtggttacagttcgcagaaatctagctggtcccaggctcatatggttagttctagacctgcagcgccaactaacttaaatgttaatcgagccctcggaacggcactctcaacgaacactggtcaacgccggcatcagcaaaaggcgaccactcgatctacagttcatcatccatcgaattcaagcaaacaagttatcatcttacaaactgatcaacctattgcgggcgtacaaatgaaccgacatccgaaaaacctgccgaaatcagcaaatagtaatggtgccgccgtgaagtcgaagcttgataatcgcaacaaagaatgcggcgtgtgtggccatactgggcacagtacggaacggtgccgccatcgtcacaacagttgctacatctgtcatgagccgggtcacttggcatcggtgtgcactcaaaaatcgcacaacattggcagtcgttatcgaccgcgcgactga

SEQ ID NO: 1453 - DNA, 1481 bp, Aedes aegypti
agagttgcttttgttgtgaatttgttgacaatgttatgaaatttaggtagaaaaaaaaaatttaatttttctaccaaagattttgtgatcgtttgacgtgtctccttgaagtacgcaagaagaagtgaactgtgaagctcattgacatcgaaatcaagtgtttttgtgaagaagaaaattgcagtcgcatctaaaaatgacaacgccaccaggatacaatgaattattacaatgcccttacgaaaaggcacatcggatacaggctcacgccatgtcaaaacatctattcaagtgtcgaaaaaatcatccgaatcacaagttcgtttcctgcccatttaatgaatctcaccgggtagcggcaccggagctaaaaatccacacccagaactgtgaagaccgtgcgtctttcgacacatacaaatactgtatctcgactggctctgggaacgttccagaaagtatgaaagatccggtactcgtttacaacaccagcccccctaaggatccgtttaaatcgtatcgggataaaacgagcgatgaggaaccggaacctgagcaaaaatcgtcgctattagatgacgatgaatgttgggatgatatgaacgttccggcatacaacccgcaaaaatactgcgaaaaggcgaacgtgataaggaaagcaacactgaaaactccgtccgagaagaaagcattctacgaaagtgagcgacttcgcttgcaggatttgaaactaaaagagtgatgttatggttataagtctggctgttgctggtggtcatcgatggcatcagaattgtgctccgggtagataacgaagagactttaccccagccacgtattgatttaccatactgtctaactgttgctgtacaagtgataagctatcaaagatcagtttcatattattaaaatcgttatcgacgtaatgatattagtgccgaaataatcaattacagagtttaagtattcccaattttactattgttgctaaacagctatttctttaatgctttgatgcaagaaaatgtattcagtaacttcttttataatttgatgtgtgttatattcattttttatattgcaaatatattaagcagtatattaaatttatgttgtgtaaagaaacaaagttcatatatctatatcactctttgatcaaaaactaaacacgtaaaaccaaacatattttcatttaaaaaaagcttagttcattgaatattaagaacgcataccacagctgttgggaactttcaacttttgccatagaatttttcgatacaactttagtaatttctgtaattctacacagaaaaaaatccgttctcgtatccgtgaacagcagacgtgaactcgtcaacaacaaaaatacaccgtgaactagatcatgtttatgtgaccatttgtggtagttcatggtgtatttttgacagttcacgttttccagaactcttttttgagcgtgtagtaattcattctagtaa

SEQ ID NO: 1454 - DNA, 4728 bp, Aedes aegypti
atgaatacatccgaatttccgacctccatcaatcgaaactcgtcgccgaagcatgatttccccttgcacaacaattactccaacactaacaacagcaacggtggtctcgattatcacaattaccccagcggaggtagcctcagtggaacaggaccaccgccacctcccccgggaggatcatccgcccagcagcaggatctaaccatcgatggcatcccgaacaacttcccccaccggagatctcgggcgtcgcgaaccttcaagaatccaccccagccgcacatgtgtatcaaggagaaaaccatcgacgggaaggaggtgtttatcaatgtgctcagctggacccgcattgccaatccggacaacccggaagcgccaatccccctgtacggggggatgaaagtcggcaagattccgcctggcagtccccgtatgccgccgctggtatacgccgtgatggccagccccgaggtgctcaagaaggccgggagaaagtgtccggatacgccggaacgaatgaacctggttgatcttatgtgtgaattcgtggaggctatgaacccaaccttgcatttatctcggaaacctgaaattctcaaagatcgtgatctctccggtgagctgaaagacgtctggagcgcggtgcaggcttgccgcgataaaggacgcgtcgatagtggcccaccggaaaatctagtctacgacctccagtcggcgccatcaccgtacgaaccacaaatgcagtaccatcatcatcacggtcgccatatagcaggggaccaaccactcaaccatgaccactacaatagctctaacagcaatttgcaacaggcccataagcatcaacaaagtgcaattacaaacagtattgaaccgaactcagagaaacagcatccgtgcgatgtccctgatagtgccaccagtgaaccatcatcactgaacagcgtctgcagcgtcgaagaattgaacagagaaaccgaaagtctgaagttctcatcaccgccaaccagtggaaagaaatcgatcaaatccaatggtctcacactgccaaccgggacgacgggcggagacataccgccttcatcatcagagaataccgcagcgacctcgccatcatcattatcgtcatcgacaactgcagccaccagcgaatccagtaacccagtgccagtagcttccaagcaacaaccatcaccaacctcgccaacactacaacaacaacagcagcagcaaacggcgacagttagtccaacggtggcaacgtcacctgctcctccccagaaagaatcaaagaattcctccagccataacttcttcccgatgttccgatcttccaagtcgtcgtcgaacagtgacaagtcctcgtcgcaacaccatcaccacaacgacaaggacaaagacaaggacgggacgggcggtggcgactccactacggctcctgacactccggtcaagaccagtagcaaaaagagtgggttgaactttttccggcggaacaaatcgtccgacagcaagaaggagcaaccgtcgacaccgacgaagcaggtcacaccctcggtggcggtttccgcgcagcaacaacagcaacagcagcaacaaacgacggtggagaacaacaaattgaacctgttggtggacgaaagcctgatgcatcaccatcatcatcaccacatggaaggcagcaccgggacgggtgagatcatcgagaacagttctgccaccattgcggccaaatagacaggaagggcgggcaaagaggtgcgagacacatttgtgataaggaggggatggattgcagttgactcaaggcggtgtagtaagtgtgtgtgtaaatagcctgattgatgcggggatgacaaggtaagtttgattgactttatcattggaggtcgcgctaattgcttgttttatgatgttggacattataagatgcatacttgagggcgtgtgctctgagaatatggttacatgttttgttttggacgcaatcacgatgcagtgtttgaagggtgtccgacatcgagaagcatcacggaaaatacgctgtagaaaattacttagttcttcatgtcttcctagaatttgaccccgttgggatgcttccgtagtgtctgcttcataatagcccagttttttatgggcctttagaggtcaagtccttgggtacggaagtagctctgtcgcacgaagcatgcagctagatctggccagaagatcgcagggccctcgtattgtttcaacacaggaagcagacacttctgtagatactccttgaggtaaatatccgtgttaacagtcccggtagtcacgaatagcacactccgtttgccacatgagcagatcgattgccaaatcatgtagtgcttggcatactttttccttacttcttccggaacttcaaacttgtactggacggtaaagaacagaagccctggaagctgccggaagtccgtcttgacgtaagtctaatcatcatgatgagacttcgttagcttctgggtgtacagtttccggctccgtgagattcccaccgtatttgccatccgtcatgatttggagccttttttactttatacgtatgcagtctctcccgatgcttggttctctgaaccctctgaacggggtgtgggacatttcacataaggacgtttggcataatgagaatcatatgccttctttgaaatgctacctgttcttatatgaaactgctttatgggaaacgtccattatgccaaacgtccttttgcgaaatgggtcaccccttctgaacgaaagacttggacagattcaattttttggccacacccctgatcgaagcattgggattcggcttaaacgctttcagacacgtttgtgatcctgattactaatagaacatccattctgatcgcatttcttcttccgttcgatgctcagagtttcgtagtaacgttcagtcatagggctctccgttgaccatactattccgagctgttttccgatgtttcgatgagagtgttgagtattttttcgcaggtgcttgtgcaaaaccaaatcgtgacgttgtttttcaggtgacgccattttccccagttttcaaaaacggccggcttttaaaatgatgtgtaaacaatacactgcaaattacaagaaaaaatacccaatgggtaactttatattcttccgtgatgcaatttgatgtggaacacccattaagattattcaatgtggagagcggctgtggaaaactttcggtattgtatcgtatagtttctaagagaatgaaaccgtaatctccaagagcatgctacctcaaacaggtcacacaatgaaaatgcaaaacatttacacttttgaccgaattgagagagctttttctccgacaactttttggattatacaaatacgagcagcaaggatcacaaaagaaatacacgcaactagctatgttagctacgcgattcacttctttcaacgatcaacccaacaaacagcaaatacaaaataacagcaaacatatagaaaacaaataggtatcgaaactccaataaaccagtgagagagaatgcaaatatgactgtgcatgtgagattttaggttcaccttctcatccgacggtaacaaatagcttgtaagcaagggaaatagaatatcaaaagctacagcaaaatgattgatcaaaaagcagtgttctgggtttcgccgagcttattctaccgcaaagatggaaaggaagaaccgcttgtactgacttggtttagaatatattcgctgagtaaaacgtttcttaaatgtgttctccggtttcgcttttttggcacatttctacacaagttttttctcgatcaggcgaaatcttgtaccatatttgtgtttagaaattagttgcgggtgtaatgttcggaatagcgagacgacaattggtaaggatggaataggtagctgaaagtattgagtttcgtgaatcaacagtcatctttctagggttagtatgaggtagaaagtcggggagacataagatgaggtaaaagctgtatctctagtgaatgcgactttagaagtagattcctaggccaagcatagccatggcgaagtttcttacgtagtatatcgcaattgattgctctcacgttattagtcaaataatcagaatccagtgctgaagaaactgattatttttcactcataccctagttactattaggtattgctactgctggatactattgtactaactacgacttcacaagagttctgcttttttaggtatattaggtgaattctgtaggttaactgagaaacgatgcaatcggattgcgtttcgatcactgcctattttatatcatttagtccgatgactggggttaacgattcagttctaaagtggaacaagaacaaaatatcaagaatgtttgtggttggggaaattatggaggaaccctcaaacaaaattttgtagactcaatactaaagaaacattttttcgcattgaaaatcgtttttgattaaatggacaacctaaaacccttatttcgctccctacaatttgtccaaaggtgcaaataaattgaaatacaggacgaagatattggctccaaagttatttttaccaaaattcgaggatattatgtgtttttagtgtattacgtactttctaagtgtgtttttattgtagttgtacgtaacaagctgcagattgatgatttttacagcacgtgtcgtaaacttatcctacgaggcttgccgagt

SEQ ID NO: 1455 - DNA, 1802 bp, Aedes aegypti
ctcaggattcaatccctggtgtcaacaaatcggcgttattaaatttgtgaatgcaccctcaccaaaaataaggctcaagatcacttgagcccttttctaatgtttatccaggcgtgattttgacagaaataatgacaagtttctgtttgcttgttttttttttggttgagctcttctcaaatgttacacatcgctcaaactagcagcttagttctaaaaaagtcgcaaaacagtaaatttccaaatgtttttattatttgcagaactgtgaaacgagacaaagtacctaaacgaaaagaaatttgtaattcaattggatattacatacatggaagtagaaatgctggatgtaacagaatcctcctgccgtttgtgcttggtgccgatcacgaatgctgccgtagatttgtacgccgaacagctgatcgaaatggttgaatctgttttccgcataacgtttgtacgagcaaaatggtttcctcaaatgatctgcaaagattgtcaagcattagtattgcaaatccatgattacatgcaaaaggttcgagctaaccaagattatctgcaatcggtgaactcgaatttaccaaagacaagaagtgccgaagttaaaacggaatcggatagtgaacaaaagtatgaacccactatcgaacaaccgaaatcgccggaaacaaaaccgatagaagataaggaagagaatgatcaattacaaccttctgaagaagacgcgggaaatgacgattataaagaacattctattgaagaagttatccctaaaagaagacgaaagataaagaagaccaaatcgaccgatgaaactcgagccaaggaagaggaactcatcaaacggtattatacgtttagatgtgatgtttgttcaaaggaaacaactaacttcaaggctctgttggatcatttccgtgaatcacataaaacatccggttacatcaagtgttgcaacaagaagctctatcgtcgatgccgcctattggatcacatctccaagcaccaggatccagacactttccgatgtgaaatctgcaacaaaacttacgcctgtcggaccagcctggagttgcacaacatgcatctccacctatcggaaaacgagaaaccccacaagtgttcggtatgttccaagtctttcgctaaggactaccagctcaaatgccacatggtgcgacacgtggccgttgaatgtcccaaatgtggacgaatcttgtccaatcggctatctctacgggatcatttgatcaacgtacacagcgaagtcggtcagaagcagtcggtatgtgacatctgcggaaaaggattccgctcaaaggtctcgttccagcgacatgtgctgatgcatcagggcgcggcaccggacaatcgagtccagtgccatctgtgtccgcgctggctcacgaataaaatgggtctgcagaagcacattcgcacccagcacatggagataggaaatcagtttgtttgcggcgattgcggaaagatttcaccgaattcgtcagcgctccagcaacatcgaagagtggttcacgcggaggagaaattctcctgcgaggtgtgtggaaagcgtttcaagagagcaatcacattgaaggaacatcgcgcgatccacacgggcgagaaactctattcgtgccggttttgcccgatgaccttcatctcgaacgccaacatgtactcccatcagaagaaaatgcatccggacgagtgggagaaggcacgagtgggtaagctgaagaaataattttctgttttggaatataaatttgtcgaacttcgacttttcgaaa

SEQ ID NO: 1456 - DNA, 3434 bp, Aedes aegypti
atgagttgcccaatgccggagatcggttcctgcatatcgctgatttcgaaagccgacatccgatatgagggcttgctgttcaccgtggatccggaccgttgtaccatagctctagcacgggtaaaatcttacggtacggaagatcgtgaaacgcagttccctatcgcaccgcagaaccaatgctacgattacattctgttccgtgggtccgacatcaaggacatccgcgtcatcaacaacaatcctgtgccgaacgatccggccatcatgcagatgcatttgccgccacagcagccacttccgccgatgcagaacaagctcggacagcccggattccagccgcagccgggcttcatgatgcctcccattggtcccggaggacccggtccgatgggcggcccaccgcccggtcatcaaccgataggtcaaccgtactcttcattcggtggaatgaacaaccttggagatttgattgggggcggagctggtggagccggcggtgccggaggagccagcggatcccgctcgacgactccgagcaacttgctgtcccgtaaaagcccaaccgtcgatatgggagtacaaacgaaccagcaacagcagggagctggtcaacagaacaaccgggacggtaaccgtagcggaggcgatggtggaaatctggatcgtggtaacatgccaccgcgcaataggaacaatagccagcgcagtcagggacagcaacagcagcgcgagagacgcgattctggcaaaaccgatggccaaatgaaggataactataacaagaacatgcagagacaaggaggtggcaatcagaaccgtggctggcataataatcgtggcaataaccagaatatgagcaataacatgcgtggccgtccgcgtggacgtgggggtctaccgcagggtggcaaccgcgcaaagaatctgctcaagttcgagaacgactatgacttcgagcaggccaacagcaagttcgaggaactccgatcccagctgtccaaactcaaggtgggcgatgaagcaaagccagagcagctgaacaccgaacagctggataagcaaaaggacgattccggcaacgaaacgggcgccggagaccacgagcaggaagaggaggatcttgtgtgctacgataaggccaagtcgttcttcgataacatctcctgtgaggcgatcgagcgagccaagggcaagcaacagcgcaccgactggcgacaggagcgaaaactgaacaccgaaacgttcggtgtcggatccacccggcgtggaggctacaaccgacgcggaggctactacaaccgtggtccgcacaactaccgcaacaaccagtaccgtggcggtaacaattaccggggacgcagcggtaatcgccccaaccaacccaacggtcttcctcacaacaccagtcgcctaaacaccaaccagcagcaacagcaacaagcgcaacaacagcaagcgtcccaacagcagcagcagcaacagcagcaaccagctgttatagaggttgcggcaggcaaataatgctgtaaaacaaataaggatgtacttttacttttaaaaagctgaccagagttccgtaaaagcttatcaccaaatagaagaagaccaagcagtaacagaaaattgatagcatgatgaggtcctgctgcggagctgtgctccctggaagcgttatttgcaaacctccaggccgattcgagggtctccggaaaaaacgcgtccctttgtaaagccctgaggaaacataataaaaaagatagaaagtaatgaaacagaccaacagtgtgaatcgcaaaggactcgagagaaggcgtaaggaattgctcacctagggttagaggagatactgtaatattcgaagtgccactcgctgcaacagcgacggagagtgctcgaatctgaaagagacacctacgcgtatttatctggacgtgaacgcttatcacacgcacacgccggttccgtaaccgagcgcgcatcagggaaaacaaaaaacgaggacaacgtcgaacgtgtgtccccaccacaaacttccctttcccacgaatcgatgccaatcggaacgaacggatccgcgcctgtggttcgctatcatggaatgcaactaaaaaaagaatctagaataatctgtgaactcaaattgaaatcgccttctttcccttcgattcagtcccaccgctgcgtgcaaacatttgtgtgcccgttaagatgagatttgtttttctattgctggcaacggaaaatttgtgtcatcgccgtcgaatcagggaatatgaaagagagggagtcatcccacaaagaggaaagtaaagcgagtaccgagaccaggaggataccggaactacaaccgtgtacagtacaggaagaagccatcatcacatgtggagcaaatggacgtgaatagagtttaggtgaatttagacttatggtagtattttgatgctcgggagagtcagggcaccagcaggacttctatttgaatttgcaatgcgaggagataggaaaagaggaactttgtagaatttggaaatcgcgagagcggaacgtgaagtgaatgagcaactttttttgcattaagaatgaacataatgattaagctaatatatgaagagctggaaactaatactactcccctagaacaatagaggagatcaaaaagtgtaaagaaatgacaaatttaggcatggagcaaacatttaggattatttaagcaagagaacatcgaaagatgtcatcgcgccagaagcgcgaacccgttccaggaaatgagatgagagatgaagtagagaatttcatagaggagagcccgtgaatgaacaccgctggagttgtccgagaaaatcgatcaaagattaaaatttatattattcaagccaatatagaaacgttactgaaattgatattcaaactgtgtgtgatagagtacttatgaagagggcgtttaggagacgaatgcgcggtgcggagatttttctttaatgtttactgatttcctcactacacagcttattttcttaattattattttctttttttaatttctagttttttttaacctaaccaaaaatgcatgcattttccttgatgcgaggaaactctggtgcggttgagagtttagttttcgtttgtttcctacgacttgttaagcaaaaactgggatagtttgagttaagtgcgatgttcaggtctctggcgggtaaattgggctctctctctcccgacaagcaactcgcaaacgatagaatgttatttcaacaggtatacccgtaatctcgcatagcatttcgttggaggagaagattgtaaacccgattttttgttctggaaaaggattttgagatatagtgcggaggaataagggaactatgtaataattatgattatgctaataatattgaatgattataaatattatacggaggaaacgatgg

SEQ ID NO: 1457 - DNA, 864 bp, Aedes aegypti
atggaaccgtcttactcatccagcggccagcagggaggggcagcagaaacatctagctccgaacagtcatcgccggttccgtaccagattcacaatctggaaaccgtggccgaggagaacgaagctacgaaaacccctataaccgatctcaatgtggaatttctcgtcgaagacagcacaaaatctcagctatcgaagtacctggcaagattgctacagcatttcgtccgtcgttatccgaaggaaatcgagattagcgcgttcgatttactctttatgactgtctacagcgtagcactcgagacaggattcatccccgagggacatcgcattctgtacatgtccagtcgcttgcagcccatattcgcctcctacgacagcaacgttagttggcttttttccggaattgttccggaaaattactacagtcgttcgagtcgtagctatcgattggatcttcatctgttggggtccgatgagcgatgctccctagtcggtatcaagagtggcgatttgctcattctgacctttaccgctccctaccggaaggatgttccgggccagagtatcatacttccagtagcccgttacatcccgttggtgaacctctacaaactcgggctatgcttccaaaatttgaaagaactttcgctcaaactcaaaaacagtctcttcatcccgattcgagttactctctgtgaggatcagaacgccataatgtatccctccttcggtggattgccggacgaaattgtagcaatggtggtgaagtatctcgacaagaaggctgctttgcgactgtcagccacttgcactaggtttagggagctaacgaagatatactgcgcgcagtactttgcttaa

SEQ ID NO: 1458 - DNA, 2148 bp, Aedes aegypti
ttttttttcttcggtaagctgtcaaacgcgttaaagttggagagaaacgaacaaaaacaacactatttttgatttattatggaccgaaaagtgaaaatttagccaactaccgtcgaaaattgaagaaatcgtgcgtcaactcggatacggtaattttcaccgttgtagttcaactagtggaaaacatgttcgtgtgctgaaccagcaggaaaaactacttgtggaaaagtgctcaacttgtactcaaccaactcaatccacaaaaagggaagtggaaaaaaaaatcaacatgtctgtggtttgatgtagttttgtgggatttttttcacaatcgggacaatcgtaacttattttgaaacaaacggcgtaattccgtcccgattgtttgtggaaaaccagggtgttgcaacaacgtttttgttcggctacgttcacacaatagggttctaaaggttaacgatgagcaactctgccggaggatttcgaggtcccggtagtgccgggagtggccgaccggagcctagtaagcgtttctcgattcacgatgccttcgaggaggaaacggacgaggtcatcaaagtgtacggatcgactgtgatatcgacgcctatgcgggccaaggccagatctccggacgatgtgtccatccgggtgcaccacgaccaaagggacagtgactcgctgatacaggaatacggcaacctgtcgtccaacgacacctacacctactgctggcgccacccgaaggttcgggaaaattggcgaaccgtcctggcggcagccaccctactagtcatcggaaccggcctgatagccatgggggcgtacgccatcgccgaaccacacaacggatcccaggcagcagtcttcttcgtagcgggattcatctgttttgtgcccggagcataccacgtggtgtacatctggttggctgcccggggctaccggggattcgacttctaccatttgcctttgttcacgtaagatcaattctaatggctaggaaatgtgctcgaaattatacgaaatagacaagtttgctcatgaatccttccctggggagaaggatccgtagaagggcttgaaagaacactagatagttcgacggtaggtaactcgactagacgagatgtgattaaattataagttatttaggtaccttttatttctttactgttttaatacactgttagagttacgctgctatatacactgtcctttgtatagtcacttttataactaaatatatgggataattttataaccaccccaactaaataaaactaaatcgaattggcgattttttgaccacttttaaatgaattctattgttttgattaaaactaggcgatgaaaaattgaagaagtgttcattattgctcgattgaatagtcgttaccttgttacatcttccgaatgaacggaaaagatctttgaaccaggtaatagatcttcctttgcgagagagtttgtcttcttatattgtcatatacgccaggtctggcagcagggttctttttagatacttgatatctattttattgctagtcccaaaaaaaatcattattttcaatggaaggtcttaaatacctaattaggaatatttacaggggttacttcaaaaattttccaaaatgcctttccagaattgccttcaaaattgtttccaccaattccagtttccacagtttttccagtaattacttaagcagatcttcacatttctacaagactccttcggagaaaatacccccttcaatttttgttgtaaaaattcttttaatgtatttccaggaactctttcaagtattgctcaagaagtttctacgtcgatttttagttagttctccggccatttatcaaggttgagaaacagaactctaaataacattcataaacggaaattgcctcaaaattcttgcagagattacaccaggaaatgtattaggatctcttctagatattcttccacgatggcgtttacagtttttttttcttataaacaatactcgagtaattttaaaggcaaagggttcatggattcttcataattttatttgaggtttcacatcagtgaatactaaagaaattattccgatcatttctaaaagtttctgcagggattctgttcaatgttttttttttcaa

SEQ ID NO: 1459 - DNA, 2052 bp, Aedes aegypti
cggcagatgtgattgttcggtgaaattccggcgttgttccagacggaagtcgttccatcctacgacggatttgattccggaacgaccaggcgactcaaaaacgacaaaaaatccggtataaaatggagtagtgtttttcaaacggtaaaaagtgtcatgtcaaagaaggtgctctcgagagtttgccaaattttgcgtcgccatttgacctacaatcagccgaagcgcttatcagacgatcttgcagcagcctagtgcgaataaagtaactgagcactccggttatcgaaatctgacaacatggcgttgcttcctccggatccggtctattgcctcaaatcgtctgacctcggcgcatttcattcgctgtgtttccacacatcggaacggctgtatgccggtaatgtccgtggaacggtgcagctttgggatttgcagacgaatcgctcaacgtatcagctgtcggtgggcaagagtcccatcatcggcttggcccacaccgaagatgccttgataactcaggaaaaggagggcaccgtaaagttgtgggagctgaccaactcggcgtacgtcctccggcacgaatccgccaccgaccacgtcggtttctgtcgtttcgtgtaccataacgatgctgtgataatgccccgcggggaagctaacattgccgtcctctgtgggcggacattcaccgagcggcaactgctcaatccgactaaagccgatcccaaacttccgcccctgggaacggtcatgtgtatcctgccggtggagataaaggacaaggcttaccttttggccgcctacgaggcgggaatgctagtgctttgggacctgaccagctcgaaaccgatcagccatctgcaggtgtgtcaggacgaatgcctgatggccatggattacgatccgtttactaatcgtggcgtttgcggcggaacttcggacaagatctttgtcttttcggtggaccggccgacgatggaactacgcaaaaagtctgaaatagcaatcaagaacgccgggattagccgggtgaagatccgcaaagacctgaaggtgtttgtcagtgccggacgggacggcaggattcgcattttctcgtggaaaagtctgaggccgttggccgtgttgaccgagcaccggggagaactgttggacgtgatctactcggacgagaaggtatcgatgtggaaggctgtcatcatggccgcggccggatcagacggacagatttccctgtgggatctgtacaactgacgatccggtgccccggtggatgaatgaaaaggcagataagtacttctgtttgacgatggatttacttttttgaacgttgactttcactacttgcgttctaaggaattaaatcttattcggatgaaccttcaaaagcttttatatacaactcacatttacacaactggcaaattataagaatcgccatgttacggttccttagctgttccttatcgttcttttttaaaccttaatttattatgttacacgtatacttattaacttacactgttgttggtaatcactcattcgcgaacacattttatgctactaagtctctacttaaacgaaagtttagttaaatcccggatcgtgtttgttgaatttacaatttgtaacaactatgaatctactacgactagaacgaattatgaaaatgtaagaataaataattttttgctacatgttttacaacaatataataatatatacatcaaatcgcaacgattggttggttttgcttgaatgccgaaatccgtgttaatggtgttaccctgggaatatgtatactaacctgtgttattcaaatgtacgacaagatatccatgacataatcgcctgaaaaactgatccgaggttcgattttccatagtagggtcagtgttcccttagtggacagtcccctatagtcgcactagtggattttaacggccgttttttgacatgaaggtcaggagctatttatctaagtaccattgatacacagcttgattttgtttaaaaaatgatcgaaataattagttttgcttaaaattt

SEQ ID NO: 1460 - DNA, 2062 bp, Aedes aegypti
gatcttttcgtaatggaaatttccttgactttcctgggcttttagtatcatcgaacctactacactttgagagtataatttgtattgtgttcccaaaagttcaccgactgtctggccgtgaaatcattgattactactcaaaaccataatgctcaatcacagtttgaagctcatatcccgaaaacaatgactatgattatcttcacgcaacaaaaacgccgaagaaaatgctgaccaacggaaacggatttaaacctttcccagagtcatacccggtctggtcgaatttggcagtctggagcaggtttatcccttggtaatcacgctgctgaaacgactcggagcctggggaagtcgtcgccgcctatttggattgtacggtttcttcctgtgtcatttctttctacgcctactgccttctgtactttatctggatgcaggggacattcattcactggttcgccatcttggagagatcgtgttcatctcattgctctatccggtgttcatcgtgtacgtttggaaacttccgaagctgatgctgatgataaagatcctccagcgagcgtttgccgaatattgtggccctaatcaacacccagtctatcgggagaccatcgccaagacgaatcggttcataaggaacatctgccggttctatttcgcttacactgggttgaacattcccgtgtacattatcatgccccctgcgctaacattctacaagtatttcacgtggagcaattcaactgagccgttctacttcaactttcccaatgaacttccgtacatggaccacttaaacatgggccactacatcgtcgtccaatcgctgattgcgcccattttcttctgcagtgccctattcttggccatgaaatcgatggtgtactacagtctgataaagtacgtatcacttatgttcaaactggttattaaacgcatcgaactgttggacaattctattacaatcggcggagggtcccgtctagagcacgccgttgacgatgtaattagagcccactatcttgcgttacggtgtgcgcagttactagaggaattgatcagcccgattctcctggctcaatttttgggatgtgtcatcgtgtggtgtttactactgttctacattacattgaacgcaagcggtgtcggagcattaaccacgctaattttgtgtgaaattgttgcatttgaaatgctggcattctcatttttcggatcagagctgactgaaattagcgaatcattggcacatgagatctacagctttcagtggtatgatgctcccatgactgtgcagaagaaagtgctgctgatgtccgttcgcgctcaacaaatcgtcggaatcaccgcatttcggttctactacgtgagcatcgaacaatttggcaaggccgtccaaaccacttactcattctatctcgttatgcagaagctgttcgaatgattggtgattcaaattttcattacagcagacatagtttgtaaagaagcgtcccaagtgttcgcgtgcgaaacgtgaacgaatgcaaataaaagtatcattcaactttagcgaaacgatctcaacacagtaggcgagtggccctgagtgacaatcaaagatcaatgcgcacacttggtttgtttgtgttgtaactttactgcaaccgctcttctcctggtaaccgtcatagtaaacaaaactgccggtcagtttcgactaaccgtaaggtatccatcatacaacttttcttcagtcaatgcctttgtttactctaactgtttctctgactactagtgtgttgaaggaaatggctcttaatgtcactcggtcatataagagggtttttattaggaaattcgtaattttgaagtcaataaaagatctgtttcaacgtgaaatttacgtaaccatttgggcattctggattccacaaattcatgccagtaatattcagttgttattacttaaacatggaatataatcggttcctgtacaagaaatacatcaagaaatgtgatagagaaaatttattttagaaaataaatcgtaataatgcgtctccataaatcagac

SEQ ID NO: 1461 - DNA, 2765 bp, Aedes aegypti
agatttccaaaataattaggtacgaagttttccgctcaattatttgcgggtatgaaggaaagatcttcctttgatcagcagtatgaaatggctctcaaattatttatgagcatcataagatatgaaaaaaactgtgaagcaaaacgatcttgaagtagaaacgattatttccttgacttgataaaaagtgtaaattaacaagttaccgtaagaatatataaacaaattacaaatttaaattatataaatagtttaattatcaaaaatgttgtaatgtgaaattatgatatttttatacggcccgtaaactgagaaaagagtgccaaaacaggcactcgatcacggttctcaaatgaagcttgtatgtccactgatcgcaagtactcactgatttattatgtggtctacaacaaaatattattcaatactcttgcgccacaattgatcagttctcaccgagcacgcgagaagatcacatcgtaaagtgcacagctggaagctctagattcccccaaatgaccaacccaagatgccgtccactcgcgtctccattttgatcgtactggccacgatcggcgtcctccatgctggaattgttcgtcgcggtgcttccaacgacattctacccaagaatgaagccaaggctctgcaggcgttggaacggtgcgaaaaacgcttccaggaggccaaggccaaacaaacgatcgccgcctgggactacggatccaacttgaccaagttcaacgagcaacgcaagatcgaaacatctgcggagtttgctgaggtggcaaagtcggtagctcgtgaactgcagcaatacaattatgactcgtttcgaactgaggacttgaagcgacgcttcaggaagttgacaatgctggataaggctgcgcttccagagcataagtacacggagctgctggaggcggtttccagtatggaagctaattacgcgaagattaagctctgctcgtacaaagatcgcgcgaactgcactttgtccctggatccggagattaccgagattattgctaccagtcgtgatccggaggagctgaaatactattgggaggaatggttcaataaggccggtaagccgacaaaaccggcttttttgaagtatctcaatctcactaaggaggtggcgacgttgaacggtttcgacgattatgctgatctttggctgaaagaatacgacgatcccacctttgagcagcaggttgaacacgtgatcgaacagatcaaaccgctttatgagcagattcacgcttatgttcgctacaaattgcgagaaaagtacggacctgacgtagtttcggaaactggaccgattccaattcatctgctgggaaatttgtggggacaagtttgggagaacatcgctgatttcacgacaccattcccggagaagaagcttctggacgtgaccaaagaaatgaacaaacagggctatacccctctgaagatgttccagatgggtgatggtttcttccaatcacttaacatgaccaaacttccacaagacttctgggacaaaagtatcctcgagaaacccaccgacgggcgcaatttggtttgccacgccagtgcctgggacttcttcgccacggacgacgttcgcatcaagcagtgcactagggtcaacatgagggagttcttcgtagtccatcacgagctgggtcacatccagtactatctgcagtaccaacatctaccggtcgagtatcgtcgtggggccaatccaggattccatgaagccgttggcgatctgctgtcgttgtcggtttctaccccgaaacacttgaagaagatcggactgctcaaggactacgaagaggacgcgcaaaccaagatcaaccagttctaccgatcgggcgtgaccaaatttgtgttcctcccgttcgcgtacaccttagacaaataccgctggagtctgttccggggagagatcccgccggaggagtacaactgccgtttctggcagctgcgaagccaattcagcggagttgaaccacctgttcggcgtaccaaggaagacttcgacgccccagccaagtatcacgtgtcagccgatgtcgagtacttgcggtacttcgtgtcctacgtgattcagttccagttccatcgggcggcgtgtcgtctggccgggcagtacgtaccgggcgatccggagaagacgttgaacaactgcgatatctacgagagcgtcgaagctggaaataagatcaaggagatgctgtcgttgggatcatccaagccgtggcctgatgcgatggaggttttgactggggagcgcaagatgaatgcggatgccattttggagtactttaagccacttcatgattggttggtggaggagaacaagtttttgggggcccatgtcggttggaccgcgacagacaaatgcggcgcaccgaagcacgattttatgccctgattgagttgataaacttttgttcgttatgttgatatttatttgaacaattttggacatgatttattataacatttgttttattgattttacattgacattattaaattgagtgattttgttgttagtttgaattatgtttcgagttatttattgaaaagaaatggcagctgatgattttttgaattaatttacaaaaatagctcttgtagaagtttgtaggggtgctcaaatataaaaaaatcacgaaaattccagaataagtgcagaaaagtttatcagagaaattgaaaatttcaagctaacatatcttgagtattgtaaagaaaat

SEQ ID NO: 1462 - DNA, 1104 bp, Aedes aegypti
tggtctatgtcgacgatttttttctgttgtccaacgaccaagagttggttgccgctataaaacttgaaaattatccccatgaaatgaacagttctattgggcatgaactctaactggtgaaaagaaactattgtctcaagccaaaagaatcgccgttatctcacctacatgtttgtcttatctttgtatgctttgataatgcaccaaccgaaccgatgaggattcaatagcaacgttcgatttcacaaacggcgcgcattctacctttcacattccattcgagaacattgttaactgctatggatcgctggtccggtaaagtagccgtggttacgggttccagttccggaatcggtgccgcaatagcaaagaaactggtccaagctggtatgtcagtggttggtttggctcgccgagtagaacgcacagaagcgttgaaaagtgctctggatgaatccatccgccatcgtttgcatgcggtgaagtgtgatgtcactaaggaggaagatatactcctatcgtttaaatgggtcgaaaaaacgctgggagggatcgacgtcctggtcaacaacgctggaatttacagagcaacgaagttggtaaacgtcgacaacagcaaaatgatacgggaagtgttggacacgaacgtgctagggctgatcttctgtaccagagaggcctttcaatctatgaagaaacgatcgatggatggtcatatattccatatcaatagcgaggcggggcacaagagtggtttgccagatttgaatatctacggtgcttctaagtttgctgttacagcccttacggagataatgcggcaggaatttgcagcagaaggaactaaaatcaaaatcacgagtatcagccctggaatggttagaacggaaattttacccgcatccatcacatcgcagagcgtaatacccttgctggaaccagaggatattgctgatgccattatatacgccctgggcacaccaccgcgcgtccaggtgcatgagctcacgattaaaccagttggagaaagtttctaataatataatgttgatgatttgtagtttgtgagttcaatggaaaataaatatttgtaattaaactgat

SEQ ID NO: 1463 - DNA, 1353 bp, Aedes aegypti
gggatggattactgtgggccgtttctcgtacgtccgttaagtggtcggggcgcgtcggtaaaagtttacgtctcgttattcgtgtgtctcgtggtgaaggccgtgcatctcgaagtcgtcgcagatctgtcgtccgccgcctgcataaacgccgttaaacgcttcgtggcacgtcgtggtcggttactcgaactacactgcgacaacgcgactgctttcgtcggggcagatcgagaacttcgtaaaatgcggggagaatttcgtcgtcaattccgatcagaggattggaacaacttctgtcagaagagcggaatcaagtttcgcttcatcccggcgcgttcaccgcactttggcggtatctgggaagctggaataaagtccttcaagcatcacttccgacgcatcatgggcaaccgctcattcaccgtggatcagctgcagaccgtcgttgcccaaatcgaatctgtcctcaattcccgccctctttctccgctttcagattctccagacgactgctctgctctggcacctgggcattttcttgttggtgaacctctcgtggcaatccctgaacccgaccttctcgatgtcaacccgaatcgcctgtcacgcttgcaggagatgaagaaatccgtccaagacctgtggcgttgctggcagctagactacgtcagtcaactccagcagagaacaaagtggaaacgatctcaaccagatgtacgcgttggacagttggtggtcgtcaagcaagcaaatgcgcccccgctacaatggccgttgggaagaattgtcgaaaccgtgacagggaaggatggaagagtccgggtggtcgttatcaggactgcctccggacagtataagcgagcggttaccgaaatcgctatcctgccgataactttagatgacgaaaactcccaggacaacaacgttgtagccaccacctgactcggaacctgaccggatagcttcaacggcggccggcatgttaattgtaaaagtttcgtaaatagtgaactacaaactagcattataccaattacctctaaacacatacctcattgtattccacacaaacactcgttagcgaactcagagcatatgtaccctcaaccttcaacaatacagcactctacagttagtcgaataaagcatttcaaatagaacgcacgtgttctgtctttctcgcgtcgtgtcggtcggtcattccgaatttgcccaagtgccaattttagtgtcccgttttttcgctactttcgccgtcgtttttttcctccctaaagctgctccgttgtgatcatatcacaagccgtgatctgagccaatcgccacgagtgatcgtttaatcgcaaacat

SEQ ID NO: 1464 - DNA, 1326 bp, Aedes aegypti
atgcccgacaaaatcggtatctacgacgtgggcgatcggtacgacatgtccgagtcggagaacgagtacgacgaacaggagaaaaaacttctgcggaacattcgcaccggcaagggtaagagagatgaagaggaagacgaggaagttctgggattcgatgaggacgaagattatgaagatgaggatgaggatgactatccggatattcggaagttcgagcacgacagtgacatcgaggacaaggaggacgatgacgacctaccggatcggaaagcgtggggctccaaggccagggctttctacggcgcggattacgtggatcaggattacgacagtttgaccgcgcaggaagaggaaagagcgcgattggaggagatcgaagcaaaggagatccagcaacggttggctaaggagctgaatgaggcggacttttcgctggatcaagaagtggtggaggagaagaaaggcaagaagaagaaggaaaagacggagattaagctgaaggcggatttgtctgatttgagtgagcgccagaagagggaattgttccggaaggaagctccggaattcgacgggttggtggaggatttcgagaggaatctggaggagtgtcatgaagtgttggaaccggtgttgaagtatttgacagaaaagggcgtgaaggatcacccgtttatggaactgctgatcacgagatataaactgggactgagctattgcaacaatatcagcttttatttgctgctgaagtcgaagaagatcaaggtaaagaaccatccggtggtgaagcgaatggtacagatgaagcagttgctgctggagttggaacagaagtatgagaactcgatcaagtcgcaggtggaggaacttctggggcatatagctgccggtgatgagttggtgttccaagagcaatcgactgcggtggaagtggcagagaaacctagaaagaagaagctgtcgatgttggaggatatggaagacggtggagatagggattatgatctgtcgggagatgaggatgacgagagttctgaagaggaacaggaacatgcggaagagatggcacaagatcaagaagatcaggaagcagaagaaggcgatcgtaagcgcaaaatcacctaccagatggccaagaacaagggtctcacggcgcgcaagaagaaggatcagcgaaacattcgggtcaagaaccgcaggaagttccagaaggcccatgtgcgccgcaagggaacggttcgaccggtccgaacggaaacgacacgatacgctggggaagcgaccggaatcaaggctttcatcaagaggagcatcaaactcaagtaa

SEQ ID NO: 1465 - DNA, 1104 bp, Aedes aegypti
atagaaatttcaacacaaaggggccgtcttcactcgggtggtgcaacaagtgtttcattccgaatctgattcatttttgtttgtaataaattttcgttcttcaattttgttggaatggcccgttacttcaaagagcaagacatcgatgagttccgtgagtgtttctatctgtttgcccgcagcggacacatcaccaccctggacgagctgaccgtgataatgcgatcgctgggactatctcccacaatccaggagttgacctcgtatctgaaaaagaaaaatggccgcatgagttttgccgactttctggaggtgatccaccagcactcgcgggtcgagaatctcccggaggaggtaatcgaggcgttcaaggctggggacaagagcggtcgtggcaccattccggcccggcagctgcgccatttgttgcagaactggggcgaggggttgtctttcagagaggtggataacatttttcgggaagcgaatgtttccagcaatggtcaggttcgctatgccgatttcgtacgggttgcttgtgctcctgttccggattattactagtggaccgatgaagagttctttgattccacaacgcacattccttatttttcgtacttttgttttttttttaacaaacacataattttatagtatttatttttttttatctagcccaaggcaatgtttaggtcaaaacctcaactgcagttggctctccataacacgatattgaagccaacatcgggttgtcgaattatagatcacaaatacagtttaattgtggctcggatctaggtagccatgaaaaccaacgtttactatggttttttcaactctatatcgagatacggaatatcaagttctggagagttgactgtaatgttaaactggtacaatctgcatgagacccagttaagaaaataatactgtcattcccgtagattttgagtttatttattcaatacagctatgttctcaacagttcgggacaattttgatgagaactagatctaggaattgtcgtcgattcagtatttgcttgctatagcttggttgttagttgcatttttttaaaaggaaaaataaatcctttttataggt

SEQ ID NO: 1466 - DNA, 927 bp, Aedes aegypti
aaaacttgcacacagacagcatcgcgcaccgaaacaacatagcaaaacatacctacgtggatgatatttcagccgagagccagacgaagaagtacacgttccagattgtggttttgttcttccgtagacaaatcctggaattgaagacgtcgtcggaaggattcgaattgcgccgcccgaagtgtccagtgcggagaaagtgaaagttagccgaaagaaaccgacgaaattatgaaacagcttgcgttgttaaccttgacgctgctctactttgcggcagtggccctcgggcaacgtgtggcccccggagtgaatcccggccattatcagcagcaacagcaacaacagcctcagtatcagcagccacaggttccggttcagccgcagtaccaacaggcaccggttccacagcaacagcagcagcaacaccagcagcctccacagggccatgccccccaccatgggcagcctcaacaggtgctgaatgccaacaatatccaacaggaaaaagcgcacattgctgaacatatggacgtgccgatcgacacgagcaaaatgagcgaacaggagctgcagttccactacttcaagatgcacgactcggacaacaacaacaagttggacggatgcgagctgatcaagtcgctgatccattggcacgacgaagaaaagcacaaacatgccgaaaagaacccagatgagccggacaagaccatctacaccgacgaacagttggaaaacatcgtcgactcggtcatgcgcatgatggacgccaacggggacggatacgtggactacgccgagtacagacggtccggggtggaggaaaaccgccgcgatgactacccgaacggtcgaccttgatcgtgtgcgcttccattttgtttttctgttaataaaaacactttctctaaccttggtgaaagg

SEQ ID NO: 1467 - DNA, 2545 bp, Aedes aegypti
acggctcgcagagagaaagcgtgaatggaagtaacgacgatgttagcctgcttatgctcacggtttgcctttttccttccgaaatgttcagtctattatcaacgctgagcgtagatgaatgtgcaattgtctcggtcgtggattaggacagctgccctgctcaggacgtacaattcgcgggttgacgacgctcttcctcaagtttcgtgctcttctcgtgtgccctcgtgtggtggatttgatgcgttttttccctgcgggttgaggagacatcggaagagttaatcgagtttcctatttcccgatgctgtgtgccaatcaaacggatcaatgcaaatccatctcaattaagttcaattagtgtgcggaatgtcccatgagtgactgtaggaaggcagcgagagtagaatcgcttcatcattctaccaacttgtatgccacctgtgcgtgttgccgtgagggaaactcagagtttggcgtctagcagtgctgtagtgaggccttgccagggaatcccaccgagcggatttacgacgtcgaatttccgcagtgaagcggcagacaaaccgtaaacattaccacctcgccatcagctgcgaagcgggaggccaaagttcgtccggtcgtcgggtccagtggatagttggttagtctggtagcgtgtgtgcatatcgcgggaacaacccggaggggacgctgctgttggctgggaagatatataagttcgtttgttttatttggaagtcattaatcacagcaggaagcaaccgtgttttgccgggctcgttctcccaaagggaggtgatttacgcggatgttttgttacagttaaaatacccgtggaaaataccgcaacgtatgtacctctaggtgtgtagccctttctcggtacatctcgacgctaaggtcgaggatagaagagggccatcatcaagtgcgagtgcaactgtgctatatacgtattctattcgcaggcagcacaagtgagaaacgtagaattttgccaagtatatggtgcatcagacacatctagtgagtggagagaaaaacggatgaaaatttatatgtgatacctgacgtgatcccggtgcacttaatttccaaggcaactgctccaaataaccgtgtgaataaagcgggaaaatcgtgacgtgtataaacaaatgtgaaaatctcagttcccgacgtgttctgatcaaaacaagattacaaccccccctttccagctggaatccagtttatcgcagtcgataaaaattccctcgtaaaatcccaagctgtgaaagtaatgatttattttacacgcctctgaaagattaaatcaatcttcattatggtggcgaaacactccagcaatcaccagctcgatcaacagtgaacgtatagtagttaaccacagtcgaataacgtaatacggaagacggaaaacaaaaccggctaagaggcgaaaacgacgagttgttcgaattcttccaatcgtaacaggcttcgggaaaacggaatatgaaatgtggtatttgctagtgttgctgcaaatttgttttgtaaaagagacagccttcggaatcaagctgacggaggttcgagtgcctaaacacaccgtcaaggatcacccggtacgactcgagtgccactacgagatggagggcgatgcactgtacgcggtgaagtggtacaaggacggcaacgagttctatcgctacgtgccaagagataatccgcccatccaagttttcgacctgaaaggaataaatgtagacgtacaaaattcatccaacgagcaagtcgtcctagatccggtcgaactggcttccagtgggaagtatcgatgtgaggtatcagccgaagctccatcttttcagactgtgtccgaacatgcagagatgactgtcgttgtgcttccggacgaggacccccacataacgggagggaagcctcgctaccagattggagactacgtgcgggttaactgcacttccggtcgatccaagccagcagttcacttgacctggtatatcaacagtgaggaagcagacgacgggttggtacgaagatatgagcccatcgtttctggcgcagaccgactcgagacctccatcctcgggttggaattccgcgtcaagccaaagcacttcaagcgaggtgacatgaagctaaagtgtctggccaaaatttcctccgtctattggaagagcaacgaggaaagcgtcgaaggcgataaaccgcagaaggctccaatgctcgaatcgcggaaggccgtcgcttccaacacccgggcggatcgcgttcaagcctcttttggagggcttccatttgaacgccggaatgcgaaccatcttacggtattaatcaaataagcatgatataaaagggaaacgaatgcttccgtccggcattaagcgacggacgcaatgtcaaagacagacgaagttttttctcttaaatttggattaaagtatttgttccgcggaagttgggaaaattgccagaaaattaatttggtttcatttcgttttatttatagaatttgaacaatgaatttttg

SEQ ID NO: 1468 - DNA, 1464 bp, Aedes aegypti
aacgctgatccaactggacacggaaaccgcacgagcatttgaggcgaaatgacgataagggctatcgtactcggaattttattcaactacattgttggtagtcatcagatatcttcgccaaacgatgaccactactgggcaggagtggtggagttcagcttcaaagagagatccatgaacaatgagtcaggtttgatcagcacaccgaagaatctggaaaagtataaggagatcatcaactctcctgaagctgatccgttggatatcattgtcttccccgagtatggcttgagtcaagtggaaacggcttcgtttgtaccaaatccagaagaccttattactccttgtaacaatctggactacgagccagtcgtgcgagatctgtcatgtatggcccgggctcgccagaagtatttggtcgtgaaccttgtggagaaggccttttgcccagagaaagacgattggcgtccttgtgcaccgaatggcctttaccattttaacgccaatgtggtattcgaccgacatggacgagtgatcgctcgctaccgcaaattcaatttgttcggagaaccaggtattaacatcacaagatggtccgatataaccacattcgatacagatttcggagtcacgtttggtacgtttatttgctttgatctgatgtttgacgaaccggcattgcagctcgttcgacaaggaattaccgatttcatctttccgactatgtggttttcggagttgccattcttgaccgctgcgcagatacagcagtcttgggcctatgccaacaacgtcaattttttggctgctggatcgagtttcccggagattggcagtactggcactggagtgttcgccgggaagcgaggaagaatcgttacggtaatgaaccacaatgcagactctaagctgtacgttgctcaggttccaaagatcagccgacctcaggctacgatcagtcgtcaaccggttatcaaatattcatccagtgagatgtctaaccttaagttgaaacgagaccaaatcgatggctatctgatgtcaacacttcctctgaacgtgagtttctatgaagcttcactgtgtcagggctcggtatgttgcaacttcacattgaactacaccgttaccctaccaagtggacctaatcagtcctattacagctacgtgctcgccgtgagtgacatcaagcggacattcgacggcttctccgatggaatgatcacaacctgtgccattttcgcctgtaccgacgccgaagatcacaagacctgtgcaacacggttcaccgatccagcgacaacggtggccgaagcagtccgcttcaactccatcgacattgtgggagaatttccaggtggattcaatgttttcctgctaccgaacagtgtcgacaccagtattctgccactggaggttgatgagatcgagtacaacgagagattattccagcaggaagagtga

SEQ ID NO: 1469 - DNA, 2474 bp, Aedes aegypti
agttctctctttcattctcccgcttcggaatccgtctttcaagaaaatccacagtaactgctcgaataaataacaacccattcaaaaatcccggaatacccccacataaagcaaccttaccattcgaatcgagaaactttgctcttagatcactttcggccgcaatgacagctttcacctcgcgaaccgtcatcggttttgtgttatctggcaaaaccgagttgacacgcagtcagaaaacgtcgaacgaccaatcgagcaaacgcgaatccttcgagtgcaaacaaaattcccctttctcttgtgattgccgtgatttctgttccaatctcgattagaatcacacagtccggaggggacaaagtgaccaccgccaccgggaagaacgttacgttacgattcttctccgttgcctaccggattgattgggtggatagacgagaatggccgaagtcgtggaggaaatcgtccagcaggtgcaggagaatctcaccgaaagcgccaacgcggcaccaatcaatggcacggccaaagtgccgtccacaccggagggaatggccctggcctacgggacgctggtcgtgatggccatgctgccaatcttcttcggttccattcgttccgttaagcaccataaagaacagaagtctaacttccagaaaacgggggaaaaacctgacacgatgacctcgaaggacgcgatgatgttcccgattatggcttcctgtgccctgtttgggctgtacatcttcttcaaggtgttctccaaggacaacatcaacttcctgctgaccggatacttcttcttccttggcgtgatggccctagcccatctgctcagcccggtcattggctctctgattccgtcttcgattcccaagatcccgtaccacttgtcgttcagtcaagggcccacggaaggcgtcaaggatgataaaaaatcctatctgattgactacaagttcacgacgcatgacatcgtttgcttcatcatttcgctgatcatcggcgtttggtatctgctgaagaagcattggatcgccaacaacctgctcggattggctttcgccgtaaatggagtggaactgctgcacctgaacaacgtcgtgattggatgcattttgctaagcggtcttttcgtttacgacatcttctgggtgtttggaacgaacgttatggtcaccgtggcaaaatccttcgaagctcccatcaaactggtgttcccgcaggatctcattaccaacggactggccgcttcgaactttgccgtcctgggcctgggcgacattgtcattcccggaatcttcatcgccctgctgttgcgattcgacaatagcctcaagcgaaagagcaatctgtacttctacgctaccttcacggcgtacttcttcggactgttggccaccatcttcgtgatgcacgtgttcaaacacgctcagccggcgctgctctatctggtgccggcctgcctcggaacgcctctgctgttggcgctgcttaagggcgacatcaagaaactgtttgcttatgaagaccatccggaagagaagccaaaggacaccaaaaaatcagacaaggcttccggcgatgaatccaccaagacgaaaaaggaaaccaagaagaaggagtcgaaaaaaaccaagaatcaaaaggctcaaacaagtctgataacgaagcgatgaaatcaaaaccaagattcactacctaaaatgaatcacacaaatcacagacttacaactacaacagctaaaacagtgagggtcgaaatccttctaatgaaaagcggaaaaaatacaaacccagaagatgaaactgccgtttcgtcagcacaactttcagcttgctggttcgtttagaaaacttgttatctctttattttgtcaggcaaaaacatagttcaaaatgacttactaatgatagatggaaaaaacagtactattgctaagcatgcttgttttgcttatggagtttttgttttaagttttatcgactgaatttgtactagtacggtgagagcgactttgtcgctttggatgaaaaaaaatgaagataaaagaagatagttactatacagccgggcgatttagcaaaatattgtggaaacaactattgcttgggtcgaatgatggcccgaaataaatgataataagtaatggagtatttataaaattcaatttcaaaaccatcggcagatacagttaattgtcagaaacatgtaaaacagctagggaagattaagacaaacattgaataaaaagtcctataccttgatacaatagctggtaatgatttgtttcattgttaaaccaaatcatatcaattttcatacttgttttccatcatcatcccactgtaatttactttgcttagacatcgtttagaaaatttgaaacttacaacccataactcatatatcgcttgtaacagtacccaacggataccttggttcgcagcacttaacgctcgaaaacacc

SEQ ID NO: 1470 - DNA, 996 bp, Aedes aegypti
atgtccgtgaaagctaagctgatgaaggaaatcgccgagccgatggccacctctggaaacaaggtcaccatcgtcggtatcggccaagtcggtatggcatgtgcctttagtatcttgacccagagcgtgtccagcgaggtggctctgatcgatgtcaacgccgataaactgaagggagagatgttggatctgcagcacggttcggccttcatgaagaacgcccaaatcaatgccagcacagacttcgccgtctcggccggatcacgcctgatcgtcatcactgccggtgttcgccaaaaggaaggcgaaagccgtctgaacctggtccagcgcaactgcgacatcctgaagggcatcattcccaagctcgttgaactgagcccagactgtatcctgttggtcgtttccaacccggtcgatatcctcacctacgtggcctggaagctctccggcctgcccaagaaccgtgtcatcggttccggaaccaacctggattcgtctcggttccgtttcctcatgtctcagcgactgggagttgccccaacctcgtgccacggctggattatcggtgagcatggtgacagttcggttccagtttggtctggcgtcaacgttgctggcgtgcgcctctcagaactcaacccgtccattggcaccgccgatgatgaggaaaagtggggcgaactacactacgaagtcgtcaacagtgcctacgaagtcatccggctgaaggggtacacttcctgggctattggtttgagcgttgcttcgctggcctcggctctgctcagaaatacttacaacgttcatgccgtttccactttggttaacggcgagcaaggaatcaccgacgaggtgtacctatcactgccatgcgtcctcggcaggaacggcgtcacgcacgtcgtcaagcagattttgactgaagctgaaaccaagaagctgcaggaatcggcccgcatcatggccgaagttcaggccggaatcaagttttaa

SEQ ID NO: 1471 - DNA, 1980 bp, Aedes aegypti
atggtgatctaccagttggaccagttcccgaatgtttgccgcctgtgtatccagccaaagccgaacgatcagctcatccccattcaatgcagcactttggagcaagggaaccaaacgctgcaggatttgcttgatagtctcacatttgagattcctaaggatattgcagaattggtcccgaaagccatgtgttgcaaatgttttaccgagtttgaatttgttgttcagtatcaacggagaatgaccttgctcacaaaatttcaagttgcatttgctcgggtcaaaacgggtgataatgctctcattgaggatctatggcttaagaatcgatgcgacatagagaacctttttaaagaaataaatatttgcgaggctgaagaagatttactacaacgaatactcgaatacgatcctgggaagtccaaagaaccaaacactcacagagttctgaaaacggaaggaaaatcagaaatagccgagcaggttaatagaaacgaagatgttgaatattacaatgtagagtatattgaggatgctgaagacggaaattctcgagagaagcaaatagaagagaatcaagcgccagcagagtccattgaatctgtagtggagtttctgcacgaaacggaagataactcggagatgttctacttgatcaacgaatgtgaagagcaagcagtgaaatccatgaaacaatcctcagagccggagaatagaatgcttcaatgtcctcattgcaagtatcaaacgacgtcacagaacagctatgcatatcatgtgaatcgccacaagacttccggagaagattcaacagagcccacagaaaaatccccaaagcaaaagcagaaaattaagatgctccagtgcctttattgcaagtaccgaaccacctccaagagcatgtttcaaaatcacgtagatcgccacgaaaatcccaacgatgaaaaaccatggaaatgctccttcgccaattgtagcgaagcttacgccacgaaagacgatctgctaggacacaaaaaagaaatacattccaagtacgtgtgcgacatttgtggcctggtgctgaagcacaaatacaccctggaagtccacttgcggcggcacaatggcaacagcaagtatccctgccggtactgtgacacatcgtattttaccgcgaacgaactgaaactgcacgtgacggttgtccatttcaacgccgcagagtttcagtgcaatgagtgcgggttggcgttcaaaaacaaaaaatcattgtctttacacaagagaacacattccgagcagcgtagttttccgtgcgatgagtgcaacatgactttcaaaacatccgcccttcttcggaggcatcacaacagtatccatcggggaataaagttctactgttccatgtgcccaatcagttatggacgaaaggacaaacttcggatgcacatggaaaaagttcacaaggttcaaacttattttccgtgtgaaatttgcctcaaaacgtttgcaacggcgtttgaactgaacgagcacattgagcaccatcgcaaccccaaggatctggaatgtgccacgtgtctatccgccttcctgaacgcaaaggaattcgacgagcatttgtgcatcagttatcgagatgactatttctgttgcgatcgcgatttcaaataccacctgcagtacaacaagcacatgtttctggtacacggcttgaagaccaacgcccgcgtccgactaacggccaatcaactgctgggagcggcaagggcttctcgtaaacagattgaacgatgtaccaagtgcgagaaaccgtttgccacacgaaagctcaagaaagatcatatggcgctctgtttgcggggtgacatggaagtcgattcggagcagcatcgacacgaatttcaggacggattgatggcacattcggtggatgagagtcatcggataatatctttcgatcgtgaacctcatgttgtgcttcagtctggtagttga

SEQ ID NO: 1472 - DNA, 1718 bp, Aedes aegypti
caacaattgtattgtgagtggcgtttattatttcgattgagtcgtgcgattaatcaatcgattccggttccgtgccaaaaacccatatgaatcagtgaactggtgaaattaattattgcgacatcgtttttgcgctttaggaaggatttgcctaaaaaggaaggattccaccaaaaaggacaatgtgtcgtgttggattgttgctggcggcgtttgtgattggattgtgtcaagctagaacactgccgaatcgtagcaaacaagtgaaagcatacgcgtacgtgctgccagccggtgccgaggagatacgtgatgacattaaccattcatttgtatgtgcgaatcgaaccgacggattctacgttgacattgataatgactgtcagatttttcaccgatgccaggaccgagcccgtttcagtttcatttgtgctgagaagaccgttttcagccaaatgtatcaaacctgcgtgcacgaaggacagctagggttcccctgtgaagactcgggtatgttcttcccggatgcagaggaatcttcaactgccaattctgaagcagagtcgtccagcgaaggagaaagtacaaacgaagagcagcagcctgctgctgaaccaaattcggcagcagtcatgatgcctgctcaggtcctgttgccaccggaagaggaatccatgatggatgcttccaatgatgaagagaaactcataggttctgtagttgcaatgcccatcagcgacaactatgtgaacatgttcgatcaccagcaaatcaacgatgataagttcgaccctgttgaagaagaggaagccgacaacacggcccaggaaatgctggatgagcaaactgatgttcaatcttcggaaactgcactgcatgaagtcgttgatagtactcaggaagtggaggttaacgatgttagcaacgaaagtaacaacgttggggaagaaattttagctgaaacttacgaagcaaatagcgatgatgaacatgagcatgtagccgatgacactaatgtacagagcgaacatgaagctgcattatcagaagaggtgcaaccaataatgcagttacagctacatcatgacgtacaagaagtcgaagaatcggaacccgtagttcaggactttcaggaagaagagcacacaccagaacaaaaagtttcagatgtacagaacacacaatcagttgagccagacaacagcaataacatcaatgatgaagatgattccaatatcattgaaaacaacatagtggacgaccaattagtcaatgaaccagtacaagaagcagaagcacatgagtccgttagtgatgaagaagcgttaccaagtttggaaaacattattgctgaagcagaattagaacatgacgacaaagaagaaagtgaacaaaaggtagaggaaatctccgctaccattgaacacgatgacgtcactgaagaaaaaatacaagaaccggaagcagctttgattcagtcacagtcggtttcgcatgccgttgagcaaacgcctgtagacgaccaaagccaaactgtgatgaacgaagttcaccctttgactgccactcttgccgagaagattgcggaaccatcttcctcgatggacttgccagagtttatcgtttcgactgtagccgacctcaggaggggtgttgtaccaccagcgctgaggaggcgaaaaaccttcctattcaaggcggatgctgttccttcgtag

SEQ ID NO: 1473 - DNA, 1827 bp, Aedes aegypti
gtttcggactaaaagcggcaagcacctcgtcgataaccataaaaagttttgctcccggattgttcctaaaggatggcgaatacatctgcttcgagtacgacgggggctggtgctctcggatcggactggattaaaaaagctgaagagcaggaaatttccgacttggtgaacgaactgagctttgtcaaagacgaaagaacgaccaagaacgagaaatcgcccgaatggggaaaggtgttgaattctggtacgactgaatcggccacggcaggaaaggaaagcgcttccggcgaaaacggagagatcgcagaagacgcggaagagttcaaccctgcagatgctagtttactgaggaaaatcatccgcaaaggtttggtggagtccaagctcgatccggaggtgcagcggaatgatcccttgtctcctttatattctgttaaaacattcgaagctctgcacctgaagccggaattgttacagggagtgtacgccatgggtttcaatgcaccgtcaaagatccaggaaacggcgcttccaacgttgttggccgatcccccccaaaacatgatagctcaaagtcaatcgggaacgggtaaaacggctgcctttgttttggccatgctgagtcgcgtcgatcctaagaaaaactatccacaggtaatttgtctgtctccaacctacgaattagccatccagaccggtgaagtagccgccaaaatggccaagttctgtccggagattaaactgcggtacgccgtccggggggaagaacttgccaagggtgacaagctgaccgatcacatcataatcggaacacccggtaaactgatggattggggcatcaaatatcggtcgtttgatttgaaaaagattaccgtatttgtgctggacgaggccgacgtgatgattgccacccaaggccaccaggaccagtgcatccggatacacaagcaactgtcgtcgcggtgtcagatgatgttcttctcggccacgtacgagcgggaggttatggaatttgccgaatatatcgttccgaatccgattgtgatccgtttggcccgagagcaggaatccctggacaacattaagcaatactacgtcaagtgccggacccaggacgaaaagtatcaggccatttcgaacatctacggcgttatcacggttgggcaggcgatcattttctgtcatacgcgcaaaacagccagttggttgtccgtcaaaatgtctcaggatggccattcggtggcagtcttgtccggtgagttgaccgtcgagcagcggttggcagtgctggatcgtttccgtgccggactggaaaaggtcctcatcacgacgaatgtgctctcgagaggtatcgacgtcgaacaagtcaccatcgtggtcaatttcgatctgccgatggatcagcagggtcgtgctgattgtgaaacgtatctgcatcggatcgggcgcaccggtcgcttcggtaagaacggaatcgctatcaacctggtggatagtgagcaaagcatggcaatctgccgatctattgaagcacactttcagaaaaggattcatctgttggacgctgagaattcggacgatatcgagaaaattggctcctaatcgtttttcaactgtgcattctcacatagctggacccgatattgctttgaagcgcctataaatttgtttcaatccctttttttgattacacgacgaaacagggcaagcggagactattaagtttattatttctacttttaactggttggctatatcgtttatcccacaatcctaaatcatttaaggctgtgcgtaaattcgaataaatagagaaagcaaaac

SEQ ID NO: 1474 - DNA, 1265 bp, Aedes aegypti
gaaaacatagttagatggcgccatagtctatggtcgatgttgaagagttttagtgtttccgaagcaagttagatcaaaaaagtagatacgctaaagttcaaaaccgtgagagcacgcgacaggtgaagaagacgacgtcagtcgactgtgataagtgattgttcaagtgatgagtgttgagcaattttaagaagaaagcattgggatatattttcagttcaaattatgtcggcatcaatcatcaatatgagtgcaaacaccacaaataacaacaacaataacagcatagcgacaaacaacaatgaaatactgacaccggaggtgcaagttaccgttaaggatcttcctattacatttaaggtcaaatatttgggcagccagtacgcgcgtggtttgtggggaatcaagcacacgaggcgacccgtcgatcatctagtcagcgccgccaaatctctcccaccgaacaaaattcttccctactgcaacctagcggtatcccttgagggcgtccgaatggaaacgattacctccaaacagagtttgctgacaaacttcaccatcgataccatatcttacggcgtgcaggacctcgtctataccagggtattcgcgatgatcgtggtcaaggaaaactacaacctcaaggacgagaatcctttcgaggttcacgccttcgtgtgtgacagtcgagcgatggcccgccgattgacgtttgccctggcggcatccttccaggactattccaaaagggtgaaagaggctgaggaacataacatgggtgactccaatggaaagcccctgaggaaaaagtttgccatcgacctgcgaacaccggaagaaatccagcaggacatcaccgagcaggaaacggaagcgtgatttcacttgattcactttaaatatgttaatcttttgctgccacaatcttcgttgaacgaatgtgaaatcagataaagattaaagaacagtgttgtgactagtcgattttatactattaacgcataaatgttatcataatgcccctaaggtgatcgagatgacctgtaccaagctcgacaggatacaaataccaaaatcaatttgcagcaaagatagatttaagagaagaaaaggatgtagcatatgattttgttggaataatacacacttattgagagaagctatattttatataaatgaagaaaacaaataaatccaaaccgagagaaatttattttgatgcattagatgtgtgacatttgcaccaaaccttatgagaaacaaaa

SEQ ID NO: 1475 - DNA, 564 bp, Aedes aegypti
atgctgtaccgtgatgcagtagactacaatccccttcggaaccgtgccagtatctccgccccgctggtgcataagttcgacagcctgctccagctggtcaagggcatcgaccgcctcgaggtgagcgtaccgataatcatggaacaaccgcaggagatccacaaccaggcaaagtctaaggtcctcggcatggtcaaaccctacaccgagaagaagaaagccaacgaagtactggcctcccagtacagaaggatcgccgtgaacggcgtggacaccaccgctcagctggccgagcatcttctggactactacttcccgaagtgcgaaggcgacgatggagataacgctctcatctcggttaaggaagatccaccctgcacaccgttcagacgcctctccaacaaagttgcccgccgcgtctaccgcaccgtgtccaagcaggtgaaaaccctccgtaaggaagatgtcaaggaatacgtcgtcacgttgattgccgtcctccgcctgacccagtacctcaacttcctgaacgacaaacggcaacaccaggccggggaagattag

SEQ ID NO: 1476 - DNA, 912 bp, Aedes aegypti
atgtttggaagtcgagcatcacgtttacttatttttggcctaattgtttttcttaaagtcatcacaattcacaagggaaatgccctacaatgtggtgttccgcaagttagaaaaaatgagctgatcgtgcagggtcacaatactgcaccgggagcttggccgtggcatgtagctatttaccatagaaatagtcgatcaaatagttactcctgcggtggaactctaattagtgagcaatatgtgctaacggcagcacattgcaccatcaatcaacataaccagtatcaattagcaaatagtcggatctttgttcggcttggagttcacaatttggatgcactgaatccacaaaccctacagcagcatgaaattcaaaagattcatataccaaactcttttaccggtctggaactcagaaatgatattgcaatccttgaactaaacaccttggctagattcaatgattatgtgcaaccagcttgtgtgagtacctcggacagtctcgtcggacagtacgggacggtaatcggatggggagtgactgaagaggaagtcatttcgccgattttgaaaagcgccaaaatgccagttgtcgacagcataacttgtctcgctagtaatcgagcggtgttcggtgaaactctggataaaggcatattctgcgctggatatttgaacggaactattgtgtgcaacggagatagtggcggaggaattttcttccaagtggataatgtatggtatttgggtggaatagtatcctactcccaaaaacgggacgattccaacctatttcaagccaaaagctatggagcatttactaacgttcgtgaatacttgcgatggatttcgtcggtaacaaatcttatgtttcatgatgttcattatgtgccaaccgctgaaggtttataa

SEQ ID NO: 1477 - DNA, 907 bp, Aedes aegypti
acggatccggttggatcacaaaggtcccagttttgagcgatgtgaagccaaagaggcaagcccattcatagtttacccaaacttactgccaaggaactgcggtctctattcccctaatcgcattgttcagggacgcaaagcaaaagtctttgagttcccatggatggcaatccttatatataataacactgattcaccaattgaactattctgcacaggggcgcttatcaacaagcgttacgtgctcacgtcggtttattgcgttgattccagcaaaataatccttaaggttaaattaggtgagcataccattggaaagtacatagattgcaatggcgaaggcgaagacagagattgtgctccgccagttcgtgactacgggattgaatgtatcgttcgaaaccaaaattacgagtcagacaccaggcttcacaacatcgctcttattcggctcgacagggacgttccattcgatgatcacattcaaccgatatgtttaccggtaacaaaatcattaatgatgttcagtcctgagaaatacatcgtaaccggttggggagctacggaacatgagagagattctaagactttgttgaaagcagtggtcataccagcggagcgttctatctgccagaaatggatggatcaacttgatttgaagctggatccaagccagttatgcgtaggagaagtaaacggcgcaaacgcatgcaacggagacagtggcggacctttgggatacactgcactttacaatgggatgcgttttgtgcagtttggaattgtctcatatgcaagcggatgtaccttaccaatcatttatactaatgtagcacactatatgccttggataagagcaaacatgcaaccgtgaagcgccaaacgtagttatttgctacgtttgtca

SEQ ID NO: 1478 - DNA, 2503 bp, Aedes aegypti
taatgacaaactcgcgtgaatgtcggtgaaatttacaagctcttccgatgaaaacaagtctgatcgagatggaagtgacggaaacgtaccgcagtccatctgattcgtgaagcccgttccggttgtggttggtggcgaaaacgagtgtcgaaagttctgggtacaaattttatcggttggcgagctgggagtgacccgaccaagcgaatcacaaatgaacaagtgcagcaatgccaacggtgtaaagctgtaccggaatataccacagcatgaaaacggattagcggtgaccattggagacgcggaagatgactactcggaggagttgccccagcttggagagctgttcaagttccgttccagttgctgcagcaccaagttgatcaaaaagcggctgccgattttgtcgtggcttcccaactacaaccgacagttcctggtggaggacatcgtggcaggattgaccgttggactgacggttatcccgcaaggaatcgcctatgccatagtggccggattggaaccccagtatgggttgtattcggcgttcatgggatgcttcgtgtactttgtgttcggcagctgcaaggacattacgataggaccgaccgcgattatgtcgctcatggtgcagatccacgtagccaatctggggccggcgtttgcgatgctatccgcgttcctagctggttgcattatcctggtactcggcttgctcaatttgggtttcctagtccaattcatatcgatgcccgttacagccggatttacgtcagcagcagccatcactattgccagcgggcaggtgaaatcgctcctaggtcttccgggcaaatctaatgaattcctcgattcatgggaaaatgtaatccacaacatccacctgaccaaattgtgggattcagtgcttggaatcggaacgatcgtcgttctgctgctgatgatgcaactcaaaaatctggaaggttcatggaagacatttggcaaatacatttcgctgtcccggaacgccattgtcgtaatcggtggaaccgtactagccttctgtcttagcacggatggcgtggcacccttccagttgactggtaacgttacatccggactccccccggttcagctgccaccgttctcggcagtggtccataaccaaacctactccttcacggatatggtctcggaactgggaacctctgtcatcgccctcccactcatcgccatcctggagagtatcgccatagcgaaggccttctccaagggcaagtcaatcgatgccacccaggaaatgatcgcactcggactgtgcaacattgtaggatcgtttttctcgtcgatgcccgtaaccggttcgtttactcggtcggccgtcaacaacagtagtggcgtccgaactccggccggtggcattaccaccggtatcgtcgttcttctggcgcttggtctcctcgccggtaccttcttctacattccgaaaaccgtcctggccgcggtcatcatcgccgccatgttctttatggtggaattccacgcggccgcggaaatctggcgcaccaagaaggtcgacatcattccattctttgtcacgctcatcacctgtctcttccttggcctggaatacggaatggtcattggaatcggcgtcaacatgtgcttcgtgctgtaccaaacatctcgcccgaatatcagtcaccatattcaacggatttgtaacgttgatatgctggtcgtgagccctgatcagaacctggtttactcctccgcagagtacctcaaggctcgagtcgtcaaactttcccagcagaatcttgttgaactagtcgtaattgatggatcggcagtcaactacatcgactccactgtggccaagattctggccggcatcgttgaagatcttagagttcaggaacgacccgttgtgttctggaactggcagcggtcggtgcagcacacggcattccgcctggatgcggagctgtttgttccgcttttcaaaaccggaagctcgctggaagagattgccaagtgctggtcgctagacaatcgaattgaggcgtgaacaaaacagtacgcccctaatagtgctttcggtaagttgtgatagctgagtccgtattcgggtagtttagtaacttattgtcagggaatttacgcccttaggatcgaggtattttaggtcaccgaaatcaaaatcgacgatagtattattcggttattacctgttaaggtaacgtacagtaaggtgatgatggtgaagattttaaatatcgagtagaaataataatttcgcaagcacgtacaggtacggcggtgcgaatgctagtcaatctcgcgagaaaataataacaggttgttgatgatttttatgtgccgaaattccttattcatcatttgtattttattcaattacattaatgaactgccaatcagacaaaacacttaaaacatttttttgtaagtagcgataggggtagtactgagacttttaatctgccctaagcttcttccc

SEQ ID NO: 1479 - DNA, 1824 bp, Aedes aegypti
cacgaatgcattcctcaggtgaaaagagatagctcttaatgtgaatggaacgatcttcggtcttcgtgtcaaacccgtagcggaacagcaaatcaatcacaaaatcctgatccgagtgcgtttaccaagtgatgtggcatagctgatacgggactaaatcattcaaaatgatcgattctttgctggatctacgctcggtcaatctgatcaattttctgttcgtgcagctgattgtgattattgtggtgctgggcggtttgattgccaccatagaaaagtatttgccaaccgcaatcaggcaaacgttccgctacgggaaacatgctctcaagggaccccaagaccgtttggtgtccctgttggaagtgccgaagtcatggttcaagcacttctacgtgtttgctgccgtttggtccacggcagggttctacttcatggcgagcaattacttcgctggacaacctgcacccagctatgtgattgacttcctcgacattatggccaccacgaagcgaactgctagaaccactcccaccgaaacaatggtagccatcaccctaataacgctacaatgctggcgaaggttttacgaaacttggtttgttcaggtgttttccaacaagctgaaaatgaatctgtccgcctatctggtgggatacatccactactttggcacggtagtcgttatcctttcgcaagccgaaggattcatacgttcggatggcctcccactgccatacaggttcgagctgaccccccggctagccttctggaccggtgtgttcttctacgcctggcgctaccagttccagtcgaatctgattctggccaacctgcggaaagaccgcaccggaaaggtgaccaaccagaagcactccataccgcggggtgggtacttcgagctggtgtcgtcaccgcatatgttcttcgagattgtgatgtacgttgccctgtatgcaatcacggcgaggaacacgtctgcggtgtacgtgcttgcatgggtgctatccaatcagacgatgaatgcatggctgacgcaccaatggtatcgggagaatttcgctgactatccggcccggagacgtgccgtgtttcctcatgtgttgtgattgagcgggcggcgagggacgcgtggctgatgggtttacccggttcgaaacggatgttttcctctctggggtggaaggaagaaggtattgcgggttttacgatgcaacgcaaattgttttgcttgcggatggtttcttgtgccggcgttgcttcatgggttcggtatttgcattggcaaagtgtgtgctgtttgtttcttgttgtgatggatcgagctgtttgcagagtactacgcagcataatgtacttcaaatacattgggaaattgcaacactattatgagttttttgtaatcaaaattgaaccacatttttagataatcttcgttgattcgatacatcgtgaaaatggtagaatttttttagaaaccaaccaaagtttacctgattttttattaaataaaaaatctgttttagcttagtgaatttaagaaatttccatcggtgttagaacattaacaaaatattagttaattttccgtaaaattctatgaatacctttgtaaaatgcaaatactacaaaaaatctggagtaacacttgtgcttgaaatatttcgtttttacaagaaacgttcatacattgtcatacagttccaccctagaacacaaatacagagttttaatgaacatttttataatatatttaaagtaattttactgggatgttgatactgcctcgatgaattagttttatttattatgcaattaaaacat

SEQ ID NO: 1480 - DNA, 6502 bp, Aedes aegypti
tgaaaccgtgtttgaacgtacctttcgggatgtcgactcttcgttcggtttgctggtgtgagtgcacgaaggttcgtgttgttcgccttggcaagaagaaggcgttttcgggcagcgagagcacagtagtcaactagagccgccattatggctttccgtaaccacgctctagaagccagaacagaaaattgttttttcccatttgtgactgagtgcgagcgcgccgtgaccaccggaatgaactagaaaacgttccgggtcgtgttgccgggtcccggtggacctcctagcggaccttggaagtagaaattttcgcgtgttttttttttttttttcttccgttcggttttctcggttttgggtcccagtttttgcacggcatccttttgtgtgaagggaagtggagtggtgctgtggggagggtgagaaagaaaggaaagaaagagacaggtgacagtcaacaaaaaggtttcggtaactgatcgaaacaagaggaaacgagagaggaagagatagagagcaagaagagcaaaggcgtagaagcaaaaaaaaatgtcgaagctttcgtttcgggctagggccctggatccctcgaaaccgatgcccatttatctggccgaggaacttccggatttgccggaatactcggccatcaaccgggccgtgccgcagatgcccagcggaatggaaaaggaggaggaatcggaacatcatctgcagcgagcgatatgcaccggacttatcattcccacaccggaggtgttcgaggccaccgattcggagttttacgaaaagtattacccgacagactacaaaatgcccaagcagatgatccacatgcagccgctcaacctggaacaggacgtgccggattacgacatggacagcgcggacgagcagtgggttaacacacagggcaaacggctggatctggacccgctcaagttcgaaacgatgatggatcgattggagaaaagctccggtcagacggtggtcacgctgaacgaagccaaagccctgctcaaacaggacgacgaattgagtatagcggtgtacgattactggctcaacaaacggctgaaaacgcaacatcctctaatcctatcggtgaagacggaaaccaggggtaacactacgccaaacaatccgtatctggcattccgaaggcgaactgagaagatgcaaaccaggaagaatcgaaagaatgacgaatcttcctacgagaagatgttgaagctgaggcgagacctgagcagggcggttactcttttggagatgatcaagcggcgagagaagatcaagcgcgaacagttgcatctcggtatcgagatctacgaaaagcgctaccagacgcaggacttcaatgggcagcttctgtctgagttcacggctaatgcaaccaaggcgtcaagaccggcgtttgctccgatctattcgaaccaatactcgtcgcatcactcggcgatgagcggttcggcaggagcaggaaccagtggatcaggagcgtaccatgggccatcgtcttcatcttcccattatcatcacgtcggaggaaccagttccagcaagcgtgacagcgaaagtctgagcagtagtcgaaaggagaaacgacagtacaagaaacggaagcacaaaattcagaaggaacgatcatcggcgagcagttcgacggtgaccgggagctccgctgtcgggttgggttcgtccgctgttggaacaggtggcgttggtggttaccatcactatcagtaccatccggcaggaaccggcgtgagtggactgagtggtattgcagcgtccagtggtgttggcggccgaggagatgccgccgttgggaccggattgggcagtggaaccgtcgatccggcgttatcctccgacgaggaggagcttgcaaatctacaaggggcgaccgctccggaggaggagtacgcatacgcatttcggcggagtaaacttagtcaatatcataggcccattacgaaaggcttcggcgattggccgtgggtttcgaaggaggaaaacggaaaagcggatctacgctatcggtttgccctcacatctctgcgacatcccagaccccgctgcattggtttcgcccggagaaggattggtcgcggaggccgggtgataattgaccgcgtctcaaccgatttggacgatctgtggtcccggttggactacaagatcatcgaatcggaaacgaccccggcggcggccgtcgcaatggaacccgaggaggaaagcatcgtcatcccggtgccatcgagtgccggtgcttctgctctaacggccccaacggccacggcaacgtctaacccaacaacggcatcagctacgactgccatcagtcagatggaacggaaatggaacgaactggaatcggcccttgccgtgaaaagtggtgtgaaacgaacaagacaactagtgatcaaagaagaaacggacatggatgatttgttcatggccaatttcgggttggcccgacgaataaaaaccgacggcctggtgaagatggaggaagaagatgttgtcaacagccggctgatcggtgaagaggtggaagtgaaacaggaaaagtgtagtgatgaaaggacatcggttgcagtagcggcaggtggaacgtcctcgtcgacgtttgtaattagtagtaataatggtagcagtagcagtactagcgttagtgtgaataactcagaaaataatgtgataaaaagtgaagctggtggcattgtgacagtgaaacaggaagtcctggaagattacgagcacatgatagacaatgtaaataatagctataggaaccggattagcaacaatagcaacagcaacagcagcagcagcagtagtagcagtaacgtcaatagtagaaacaattttaaccaatcgtttagcaatagtattaacaatagtttgcagaatcgagcagtatcccagtatcagcagcaactgctgcagcggtcgttgagagcactccagcgaaaaacggcggcacctgggttgatgtcttctgcgtcgccggatgcatccagcagtagtcgatggaatgatgagcttggcctgagcgaatcgacaccctctgcagatagcaaagctattgccagtgtgtatacggaactgctgaatgatattcaatctagttggttacatttccgaccgaaaacgccggaaccgatgctacagatggaggacgggctactggatgatgatccattattccaaacagacgctaaccgaatagctctggagttacaagcgcttgatgccgaactgcctggagatatcttcaattcaaccgaaagtgtgtacaggactaaaaactttgccctagacagtctcgtggaaccgcatccgttaggattggaaagcgcagctgtgacaaaagatgcaacggatgaattgggtatcaagctggaaacctgttccaattcggataacaatctcagtggggatagtttgaatgatctgaacctcagtttgagcgagtccaatgaggacgaaaaaatgcttgacaagatcttgcaagagtgccaaatcgatgacatgaagtcgttgaaccagacaagcaatttctggaatggaattctagaagacggaatactgaatcagttggagacggcagacgagaccggtgcgggcaccggtggcgacgtaaaggaagatcccttaacgattaatgaactcgtcagtccatcacccgtcgaaggacttccagtccacaaaatcggatactgctcagagttggtaggctacgaccgacttgcaagcgttgaacgatacaagagcaaacggagaaagattcttaagcgatgcaattatctggtagggagtagtttctttgccgtacgaaatccaccttcggaggaaatcttcaaaaaactgtccgacggtgatgggaatgttcctttggaaggtgaaaaagcggaaggcgccgccgaggctgcacctacggcggattcagaagtcaaagtggaagaggaatctgattccgtttctgcaaccatacccgccgatcagatcaaaatcgaacctcccgatgagttacttgccgcgtgttctccgtccgcttcatcccagtcagcacctcacctgcaaactaacacttccgttccgccagtgggaagcacttatcaacaacattctctctctgctccgcaaatcaaactcgaacccatcaattatctgcaagctgtttctcatagcactgccgtcgctgcaacagcgtctccagctacggcatccacatcattcctaatcacatctccatcggtgcaagtggtcagccaagccaccacaaccgtgttgaatcccttagtcgcgtcctctcaaactacggtaccagtagtcaccgcccagcatcagcagcagcaacatccccagcacagtacactgaccggtcagatcactctggccggaaatgccggcagcgccagcagtagcggcacttcgactcccaccggaagctacatcgttcagcatacgacaccgatcgtactgtcccagcagcagatgcaacagatagccaccagcggcggaaacattgttaccgtcagtggaaaccagatgctgacggcaacgaagcaagctctccagcaaggccagcaacagcagcacatacagcttcagcatgcgacgcattcgcaccaaggcgaaacgtacgtgctaacgacggcgactccgaccggacaatcgccgctcaagaagcaaatcaacggacccaacgacaagacagtgaaacaaaatgtcatcaatcccaagctgcatacgcttatcaatcagaaactggcggcttccggccagaaagccagtgatctcagcaagaagcagttcgagatgataacgaaagcgctggtttcgcagaaaatgatcgtaaagtctgcaaccgcggcaaatcatggttcatcggcggcaactgctgcggcagctcaagtggtgcagcaacagcaactccagcagcagcaacagggaacgagtggcaccggaacgtacaacacgatacaaaacgctgcagggctgccgatcacaatcctttcggcgacgagtcagaaccctcagcaagcgactcagaacaagatcatcctaacgtcgtctcctcaactgatacaacaagcagccggtcagctaatggccgctgcggcagctgcttccccacacggaaaaatttcaatcaattccaatttgctacaacagcagcaaggccagcaactaacccagtttcaaacgacggatggtggccaggggcagacgacttccggcacgactggaggacaacagcagcagaatgtgaagttcgaaaaagcggtcaacatgttgttcgatgcggacaagaatcgaatagtgtacgccaacatcaagaatagtcgtgggcaattcctagcccagctgaatccaaaggttgtgaacatcatccaaccgatccagcagcaaaagttgatcaacagcgttggcgcaatgcagcagcaacaacagcagcaaacggcagcgaatgtgcagagtatactgggagcatcgccaaccggtaccacaacatttgtaaatagcaagggaggcattcaacggataccatcggtcagtattcgagctcaacagttgcaacagcagcagcaacaacaacagcagggtcaacagcagctggattcccatggaacagcaacggttgcggtcgccaccaacaatgcgaccaatagcataaaattcatccaagtgacaccggctgtggcatcagcggcatcttcggtggtcagcgaaaatcaagccgtgtcaagtagcgggtcaggtggattggttgtaccttcgtcgtccggtgccgtcgtgggaacagccggaagtggcaccaacaccgctgcacccaccagtatcaacattaccaacaggtgagaatcgaagattggccagctcgatagcatacttcagtcagtgttgtgtatagcgcagaaggatgaaggaaacgaggaatgagatcctgttaaatgcaagaagaaggaaccgttcgaagaggaatgaaacaggaaatgacaaacgcaggggtactgaatcgaggagtggaactgggagtcaaatttgtttgtaggatctgttgtttccaataatttattttatgagagaacactaacgaaacttgatttgaatcgtttgggaagatgcaacaatgtttccatttttaggagtagattttgtatattggatgatctcaatggcaccggctgatcgattcggcaggtggccgaagtcgagtgtacgtactgttgtagtagcttagttggtcaatacatgctatcgaatagtgagactaaatcagcttatggtaagctaaactaattagttttgttttatacggtagggatacgtgcgcctaagtggcgcggttcgtataaggtacacgtgtgtttgtggaatagaactttcgattgagttgctctggaatccattttttttagctattagtgtttgtttaagatcaataatggacagtgagaatacaaagcgttaagtttctgaaact

SEQ ID NO: 1481 - DNA, 1017 bp, Aedes aegypti
atgtcgaccgcagcgaagcgtcccaagatggacaaaaaggggaaatcggacaagcgaaattactatgccaaagcgtttgccggcggagccaagaagttcctggaaccggggcagtgtggatttatggtgacgtgcaacttccgcgaaaaagactgcattcaggagagctaccggctgctgaacgaatgcgctgacgagttgtacggtaaagtggaagatacccaggaaaagactcccgccgatcagaacgaggacgaagaggaggaagttgacatctcagttcaggtacaaaatcaggcagaggcagccaagaagcagcgacctcagttccggttccagtcggtcgaaaccggagcgaagaactgttgcttcatcacaacgaccctgaaggaacccaaggagattgcgttgaaaatcctccgcgaactaaacgaaaccaagaagcgcaaaagccgaaacattctgcggctaatgccgatcgaagtggtcaccagggccaatctgaaggacatcatcgatgcagcgggcgccctattcgacaagtacttcctgaaggaaccgaagaagtttgccatcatgttcaacaggcgtttcaacaacaatgtcgaccggagcgaagtcatcgaccagctggccggtctgattacttcgaagaacattcacaacaaggccaatctgaagaatccggatctggccatcattgtggaagtcatcaaaggactgtgtctgattagtgtcgtgccggactacttccagctgaggaagtacaatatggtggagatttgtgcccaaagggatgaaggtgataaggaaaagtcggaggacaaggaggtcgagaaggcagaagataagacggatgcgacaacagagaattcagagggcgataaagtgaagacgacagaagatgccgaaatgaccgaagactcgacagcagatgtcaagacagacgagaagctgaaggaagataagccagaggacactccggcgtcagatgcggtagaatctaccgcggaataa

SEQ ID NO: 1482 - DNA, 1747 bp, Aedes aegypti
gataggcaaaaattatttaatccgtttcgcctatctgatagtccgaaaagttgccctctcacgacggttctgttcgcgaaaatacgaggtattcgtcccgcaagaagttgagtgtagtttggtataaatagtgtctccgggaaagtgtctattttggtacgcacaaaggagagacgaaaagtgggaaaaaaacgaaaatggctcgctcagcaagtccgggaggatattccaactacgaggacgattcgctgttccagaatgcagttttcacgcacgacatcagcgaacagatgcgcgttccgaagcggattcgtgccaccggggattactttgacgagcatgagcttctgtctaatggcaatggggaaatcaattcctggaactatcacgacaagatcgaaatgaatgtcccggacaggattgtggtcctcgggcaggatcagcacctggttcttacgtcaggcaccaaatcggcaccccgcgagataatgctggagaactcgattctgccgaaagatccgggctttgtgcgcgtttcgacgcccccgagggtaatttcgctagcggaacatcacttcccctcggcgacggatcttccgcgggaagcgggtgaaggcaaagagatgaacgaccaacactatgacgactacgagccacgctcgctggattcgatcgaggacatcaacagcagcatgaacgtaggaaatcggcagcgtttcagccagggaaaccgaggagccacgggaggagagcttcagaagagggcaacattttccaagcacagttccgagctagtcgtcggaaggagcttccgagaggagacaccaacgttcggaggaagtgtcgaaaatctaacaccggccgaagagatgaccaatctgcgccgccaggtggccaaaatgaaccgaagattgttgtccatcgagttggacaacatgcagcggcagcagcgcgaaaagattatgtattgcgttgggttggcttacctgctgttgaaaaccttcatgtggcttagtcgaaagtagagagatgctaaactatgttcgttctccccaaagagctgtttcccgaaggcgatcctgagggaaacgaaagatgtgcagttaggaaccagaattgaacaaaaatggactaaacaaacttttcaaatgaaagtagttgtaataataaggaaaccgcacggataaaaagcacatcttgaaacattttccctataagtgtatgagagccactcgaagagtgagggaagcataacttaacaacgtatttcaatagtcaatgacggtacaatgtggattaccatatgtaggagatgagcattcgcttcagaaattttcaaataactaaaagccattcgaatttcattctggcggcaacgacattttctattagactggtattcatactattttttataatttctattctttccaattctagcgtagcattaaagaaaaacttttagtgtttagagaatctaacaatatttcattgaagtaaagttgttttatcggagatttctgttcgagtgaaagctggctttgttttattggaatgctttgaaaagaaaaaaaacctgaaggcaaacattgaattctatctcccgcatgaaaactaaaaataccattgactacatgccaacgagtcaacagcaaaagtaagccccgccctctcgaaaaatgtaattggatttacaactttagtcatgtcatgttataaataagaataataaagttaaatattaatt

SEQ ID NO: 1483 - DNA, 1058 bp, Aedes aegypti
atatcacatctgttcgtggcatcgtcacaatcaaaacaaacctgagaggaacatcgttctagaaggttgacgaaaataattttgaaatttacccactattttaaggtaaaattatcaccgagcccagtgcaatagtgcatttttcgcagtcatgatcgccggtggacacggtgaacccaatccgaactcctcgtggatggattcccggggtctttggctggcctatgtgctcggtataattatattccacatcgtagtcctggcagtgccgttcattgatattccttacgcctggacgatcacgaatattacccacaatttgggcgcaccgtggatgagtatcgataccggggactcgcgaaagtatactcactgggagcagatcaaccacggggaacagttcactgcaacgcggaagttcctgacggcagcgccgatcattttgttcctgctgacgtgcatgtacacccggaacgacaccgaccatttcatcgccaacttcatctcgctggttgtggtgctggtaccgaagctaccgcagttccacggagttcgactcttcggaatcaacaaatactgaatggtccatggtagggatcgatgggacccggaacagggtccggacacaaatagctactagctgaaagcatcatcactcgtggaagaaagtggaagtaacagatactgggagtcggacgtagtttgaagttttttaactatttatgtgtattacatacaaccactattcataacttcgcaaaactaattagactatatctatatacagaatgtttctcatgaaaaggatctgtgggagaatcctacaagtttatcagagggaatcagagggaatagttttatactaacaacttgtaggataacgggaactttagacgttggtttattgcgggtgtgatttttaccgatcggtaatgtttggctatagcctgaaaacggcattatatttgatttgatatattcgaaagacttgtaacggtgtactatgtgattgaggtatactttattcctgtaaggacaaacaaacaatttagaaataa

SEQ ID NO: 1484 - DNA, 1664 bp, Aedes aegypti
atgaaaggtgcatggaacgaggagcaggaggaagagctacggcgactgttcatggaaaatcaagaaaatcccgaaagcgatcaagacgttatcgactggatattggacaacttgattgacaagtcgcgcacccggcgagccgttattaaaaaacttaaagaactcggactgatattcaaggcgccaacgaagaaaagcaacgccgctgccagcaataagcacctctggaccaacgagcaagatgaaaagctgaaacaactatacgatgagcaccgtatgaacgaaaatgtactggcaatcatcaccggggagtttgacggaacacgctccaaacagtctatcgtcaagcggatgctttcgctgggactcattgccgacaagtccgaggtgaaacctcccagaaaatctcgctcgaagaaaaagcctgccgaaggtggggatccgatgagcagtgatggtggtttaacatccgattctgatgacgacatagacgttaatcgtccaacaagaccgacacactcaacttcctcaaaagctaaagcgaaacgtaaaccgcctgcagcatcgtcgttgaacttccgtcgacttcgaacgatcatgtcggaaatcgaagaatccatgaaggaagcaattgaatggcttacggagtcgtttaaagaagcttgtgctgactacgaggaggactccgaggatccagacgacggagtgccagtggttccggttatgcaagcacagcgagaagctttagaaaatccgcagtttaaggagcttctcaaagaattgggcttggaagcacccgctgaaaacgaagcatactggcgcattccgatatcgatgaaacctgacgatttgcgacttcgcgtaggagtcctgaaaggtgagcatcaatcagccgaagatgaagctgaagatgggtctcaacctttggcaatagaaaatgttggccacccttcggacgatgaggacgacacagaagtatcggatgaaattttcagcgcgtggcgtaacaagacaaacattttgtacagcaagagtgacgacgagagtgagattcgcgaaccactcaagcccaaggcgaccaagaagagcgccaaaaagccaaaagaaccgaagcaaaggaagaagaaatccaccaagttcgatctcaacgagttggaaaagcaaagtggtgatgaggcactaatggaaactacttcaaggcttagcgatggtgaactggacagtctggatgatttccctagccatcgatcactagtggtgacaagtgacgaagatgaaaccaacgaaaccctcacagaaaataccaccagtcggccaaagaagaagaaatccaaaatcgtgttgaactctgactcggaaccggaatcggatagcgagcaggtccggcttgtcgtttctgaggacgaagacgagcgtagtaacgatggtagcgccacttccctaggaattaagcgaagccgacccgtaacttccgacgtatcggacgaagaagacagtgggacggcgaagaagaccaagcgtagggcgattatcagcgatgacgaagaagactgattctttcaaacaacttaaaacaaacgttaagttagaatgtaattttctttgtcttattttacttattgattgactgcgttcacaattattaatcacatttattgaaattc

SEQ ID NO: 1485 - DNA, 2193 bp, Aedes aegypti
ccgcgacgaacgttatgcagatgcgatgatgattagctttaatgcgctggaaagagggcagcccacgcttctgtcccggatcgatcctggatttgtatgcacaagaagacaacaccctgatcggaggaatcaaacggtccgaatctcatccgaacttcctgctgaaagacgccaacaaaacgaaacaggataaaagtggccttaaacgacgacagacgatacatcactccaactcccggaataaccttcgcaaggaaaagatatccaaagtgtcgagaagtctgccgaacattgccctcaaggatcactatcattccactaggaaacggccacccgactgccccgatggcaataaggagaatgaagtcgctgaagtcatcgtgccaaagttctgctatagtggtaataaaagtgtgccaaaaccatccttgaacgtgttgaattgtgataatataaaaatctataccgattcatctagcagtagctatcaaccggagggggcttgtccggcgaaagctccaaacaagagtatggaaagtagcagttccaaaaccgacttgttcagcttggccatgctgacgggcagcccaagaatacttctgaatgaatttattccacaatatggagagaagataagtaaaaccaacgacaataagagcgttggaagcttgttgagcgagatcccatcccgtccccttcctggtcaaagtttgacctcttacctgaaaacagtttccatttctcgcaccaacaccgaactcgatcgggagaatgcccatttcagtctctccgaagcacttatcgcaacgttcgaacaattgaagtggaatgaagggcaagcggcgacgaggcgaagtggattacggaaatttccgtccaattcaaatttttggacatcgtgtcctgggtcaccacaattttttgttggtggccacaaaagcagcgaagattcagcaaacaatataagtccttcgaccgcttccaggggaagtgactcaacagccatctcgtcactatcgagtggaagcagcagtgtggagtcgggagagttgcattcgaaatatctgcgacaaatttcgccgagttatgctaaccattcctccggcgatgaggatctggaagcagtggaagccagcgaatgcggtgacgtaaaaacgtattctgccgaaggagttgccctcagcttactgtccaagttcaacgagaaacaactgcccacggcgtgcgaaatgctgtggttggtatctgagcaggatgcgcctcaacagttgcttccaatcccaccggatggatacattgccaatccggacgatcagaacggggtgaacaccatcatccgaggaacgcgagagtgggctcctccgagacctcagataatcttcacctactgcagtcagtggtcagatcgccgggcacaaatgctaaaacaaaataaccgatgcgcaggttgtggaatgaaagtcgctcaggcatattccagtcggttccggtattgccattacctgggcaagtacaattgctcaggatgccacaaaaatcagatggctgcaattccagccaaagtaatcgaacggtgggactttacgttctatccagtgtgcaccttcgcctatcggttgctcaacgatataaatgcaattcctctctatcgaataaatcatctgaatccgaaactctacgaaaaagtacgtgttctgcaagtagctcgaaatattaggaagaatctaaagtatattaaggatttcatcatgaattgccgctttgccatagagatgaagggacaaatgcaaaacgttgcggagcacattacgtctgacttggacagttggtctatggcggatttcatttccgttagaagtggatccttccagaaggaaaagaccgatctgatcaagcgctgtgagaaacacatctatgagtgtgaactctgcattgcgcatgggttcttctgtgaaaactgtgatcgcaaggagattatttttccttggcaaaaacgagtagtaaaatgtagcaaatgcggcgcatgctaccacgacacctgctggctatccgactgcgtaaagtgcgatagactgcagcgccgaattgtgaccagaaagtgatctacaatcaactgaatctacgcaaggtgttcaatatttaagtaccacgattttttaaaagccttattaaacatgacgatttaacagctct

SEQ ID NO: 1486 - DNA, 783 bp, Aedes aegypti
tttcccggcttcgcaggcgaagagatgtggaatccaaataccaatgtgtcggaggattgcctgtatctgaatatctgggttccacgccagcaccagtccaagggtggtcttgccatgctagtgtggatctacggtggtggtttcatgagtggtacatcgaccctggacgtgtataacgctgaaatgttagcggcagttgggaacgtaatcgttgcgtccatgcagtatcgggtaggatcatttgggttcttctatctggccccctatctgaacgacgatgatgcacctggtaatgttggactgtgggatcaagccctggccattcggtggctgaaagaaaatgccaaagccttcggtggtgacccagacctaataaccctgttcggtgaatccgccggcggcagctcggtgagtttacatctactgtcacctgtgacgcgaggcctatcacggagaggaattctgcaatccggaacgctcaatgcaccatggagccacatgtctgccgaaaaggctctctcggtggcagaggcactaatcgatgactgtaactgcaatgtgacacttttaaaggacaatccaaattatgtaatgaattgtatgcgaaacgttgacgcgaagaccatctcggtgcagcagtggaactcgtattcgggaatcctgggattcccttcggcgccaaccatcgatggagttttcatgactgccgatccgatgacaatgctgcgggaagccaatctggaaggagtggaaatactggttggcagtaatagggatgaaggt

SEQ ID NO: 1487 - DNA, 973 bp, Aedes aegypti
atgtgccacaaagcaaaattatccgtagtgatcaccgttgcgttccagtacgcctggttggacgagatgttcaaagaaatggccacgtacgtgtttttcgttctaaccgggtacaagttccggccagtatcgcagaatccatacttctccatgcacgacgtcgacgatgacgacgacgatgaagtggaaattctcacccagacgggcctcactgagggcatcagcaaggtgaccaaccgctcgcaaccaccgggcaccatggtccacgaatcgaacgaagaggaacgggaaaatttgatcagtaaacgggaatcgtcccacgagtatgactaagttttcgtaaaagctacctacctagcgacgactcctttgtaattatttattagtgtatgtcgtacctatctattaattactgaaaaactatcaatatcaacttaccaaactgcccgtgggcgaagcgaaacagtaaatagttgcagaaccaatctgctcaccgcaattacacgatgcaaacgttgatttttattggttgaactttgtttgctcactcaagtatggttttgtttccaatggggcttcttctgtgatcttgcgtttttatacaatacattgaagccctgtgcggtgtgaagattgattttttatttcttttgtcatgtcgacaagagttcataaattatacctacccagtagttttaggatgtgaccaaaaaccaagcaaaagagaataagagatactttttgatacatttcctattcattctgatgacgcaagtagtagagtttatagaattttggcatctacatttgcaacgatatagtacgcaacattatacatacggttaattgaattacagaaatagacattcacacactcccctcttagatagattgcaagctctccgtgtcaaaaagggtatttttggaccacgtgagtgaatgatagcaaataatattgcttatgtgtataaat

SEQ ID NO: 1488 - DNA, 1170 bp, Aedes aegypti
atggctaagatgaattatttagtgttcttgctattattcggatgccagttgcttaccagagctgatgacctgctcgattcggaggaaccaccagagggctactatgcattcatcgagtcgccgtctgccgttccgccaaaggttcgctccccgccctatactcacatcaacatcgactgcaaggatgccaccaaccccaagccatacgtttccgcgaacaatctctgcggagatctgaacaagggcaaaattccacgcaacccaatgcgtcagagcgtaatgggggagccttatccttttgagctgattagaaatcaaacactaaagtttttgtcgaaaactttaccagtgttgaaggccgatgatacgctccccaaggttactcagatcatgccagatgagactgttgatcagtttgacgacaatggaattggtcgtcgaatgggtaaagtcatgcgaatgaccgaagatcgcagagatgaggaggaaccccgaacaccgaggaagttctgcgacggtggcggcgtattctgcgctctttatcgagctattcaaggtgaaccaatcagtagcaaactggtcgctgaacgacgtgaagaaatcccaagtgcctacgctcctcctccaccgcgatatgacggaccccccacaccttgtccagccaaggttgagtatgctacaccggtgttcgctaagaactaccagggctcgtggagatacgtcgtccaaattccatacgagggatactttactcaaaccgttgaagtgactcgttgtctccaggctcgttgtcattatctagatggtggctgtttgtcgtctcctcgttgggttagcttgcttgtcgccgaaattttctatccgaatgcagaggaattcactacttcgacatctacaaccactgcaccatcgattcaagatttccaagcttaccagcaatatctacaaaagcgagcgggacttcccactggtgccgatagtggatcgtatgaaaacaccagcaatcacgcaactcgcaagagcgatcaacattgcgacggacacgatgaaattgggtgcttccaagttcgcttgtactacgattggttcctgatacccggctcttgtaaatgctggagacccgattatttcgcaaagtacgtccgaaagcggccaactcctgaactgtaa

SEQ ID NO: 1489 - DNA, 1425 bp, Aedes aegypti
gtgaaaatggcgtctatggaaccgctccaaaataaaacctgggatttatccttgtatgagctaaaccggacaccgcaggaagcgataacggacaatacagagattgctgtatcaccccgcagtttgcacagtgaattaatgtgtccaatatgtttggatatgctgaagaagacgatgacaacaaaagagtgtttgcatcggttttgttccgactgcataattacggctctccgttccggaaacaaggaatgtcctacttgtaggaagaaactcgtctccaagcgttcgcttcgacctgatcccaatttcgatttattgatatcgaaaatatatcctagcagagatgaatatgaagcacaccaagaaagagtgctggccaaattcaatcaaagtcattcccagcaagcactagttcattcaataaacgagggaattaaattgcaatcccaaaacagacctaatcgtaagcaaaaaagtgaaaatgatctatcagccgcagcagctgcagcaacaaattcttcttccgcatctgcaactcctgttgtggcgaatgcaaatcaacctgcagttccaagcacaaatggaacagttcccgaaacggccaatcgggaaggttcctccaatagtcaggctggcggggaatccgttcctcctttgtcgaatcctccatcggtcaggagcacaccttcaccggtaccgtccaatgtcagttcggcaagcaaggccaaaagggcccgatcggttctcacttcggaaaaatcggaagaatccgaaagcaacagcgaaatggacggtcggacggaggaaaatgactccaatctggacaccgaaggcgagggcaattccgaacacggcagcgacgaaattgagcttgtattcaaaccacatccaacggaaatggcaggggacaatccgttactgaaggcgctgaaagaaaactcggttcgctacatcaaaaccacttcaaatgctacagtggatcatcttagcaaatatttggcgatgcgcctcactctggacctggagaccgagcttccggaagcatatcgtctggtgaatttctgcatctacatcgctccgcaaccctcacaactagttgtgctaagtggaaaccagactctctcgcaagtgaatgaaaagttctggaaggttaataagccgctcgagatgtactattcgtggaagaagtcctagggaactgcctaacacccgaagcgtagtgggtgatagagaaacacactcgcactcgtagaagtggtatagtattattcgctgcattacatgcaatgcattgtaccgttgcagaacctaaacgtaaacgatgcaatttattgtcagtttcttctttgaactagttttataatgtagaagataacttcaatatattgtaaatagaacagttgtaattgcaaatagtttcataac

SEQ ID NO: 1490 - DNA, 752 bp, Aedes aegypti
aagaagcactacatcggtgaaaaacgtagcatggaatcacattacatgccaaaaacttcaactgaactgcgaccacgaacaactcacgttctaccgcttaccatcactcattaggaagcatgttacaaatatgagaaagtgacgggcctgggattgaaaccatgacccctgctttgaaatcagaagcgatagccattagactattaaccctgtcgatggatttaaattgagaacctagtgccaaaaaagagacaattataacttgattattgtaatgtaaggacatgaaatagacgctaattaacaattttacctgatgttgtacgattggttaacaggaagatagtcttgacaggaagactaatagttattagttttgtgaacaggaaatagtttgtgtattgaaaggagaaactgttaaatagatttgtcagctgaagtaagcgacaattcgaggcacaggcagataatggcattgtatgggttaattgagagccgaatattaacaactagacgcttcacaaaaagatcaacaggacgtcccacaaaaacctgaccaacgatcccaacattctgtcactttaaatcagaggacgttgattgggagatccagtgtgaatttcaccacttttaaaggcacccatttgcagcggtacagtgcataatgcttgtgaaattagatttatatttcactttcttcggtgttgatcattcgtgtgtactaataaattagaatttaaattatgtcctat

SEQ ID NO: 1491 - DNA, 908 bp, Aedes aegypti
gggtcggcgcttgcttgcttcgggtggacccacttaccttatcaccggaccgaagtggacaacagaaagtaaaggcaaacccactgcttagggaaaccaaggcggtcttctatagaaataagtggcacattacacatagaaattaagcttaaccatatttatttaggggaaattacattgagtaggggaaagattttcgttgcggccgtgcaggagcatatggtgccaggtggcgagagagagagaggagaaattacttgccatgcgggttgacttgctgggcatccttagcttgcgggctcggaagtcaattgggcttacatgcggtcgttcgtgccttggacatggtgtttttctgtggtcgccaaaggggggggggtcttgcttctcattcggggttcgacacttgttatcggacgatttccaccttgcagatgacttccagggccttgtcgtcgacgtccctaacgctcgcagacaaagaggtaacttatcggatgttgagcggcgacaagcggggcacgcccacggacctcaccgtcgctctcacctccaaaacggtcgttaccgttccttcgtggcgtgtggagcagcaatggcgttactcgctgaccaccagcgttgggctcgccgaccttccttcgttggaatcctcggtgtacaaccgtcggggcttctcttccggcggtggaatcgggatgaatcccgggccactatcgatctcactgttcagcgtcacacaccggattcggcaggggtcttcacttcgattctcggacgcttccactggcttctccaatcgggacactaacggaaccacgcactatctcggcaaaaagggttttgttctcggctatctcgagcacgcggtctttatccggcttttgtttttcggagctgatttttaa

SEQ ID NO: 1492 - DNA, 2041 bp, Aedes aegypti
cacagtgaaacttggtgtttgtcagagaaaatttcaaatcgaacaagacatcgattcgttactttcactcaacacaagtgctcacctaatttggttataaagttgcatccagttgattcaggttacatttgccattcaggtgagcaaaatcttgcgtttggtagcttcatctagcttgtgtatcaaacatggccaaagtgattacccaggagactttcgacgatgtggtcaaggagaacattgtcgagttctcgatgtccgtcgaggaatcccgcgacgaaacggtgaaacagttcgaagcccagggcataaatctgtccaacattatcaaagatttgaacctcaatgcagacagtggagttcctttgttgaatgaggcgctggaatggctgaaaagccgacaagccaatctgggcggcgaaaacccggaggatgtttgcaaacagctggaagcgctttcgtcggaatgtaaattgagtgtcccgcatcgcgtactggcagctaagttgggtgcctatgaaatggtcgtagaaattctggataaggaaaaagaactgcccaagggaatccttgcaaagctcgtagcagtggctaattcaataatcaataaacaacccgacatcttcagcttcaaatcattggatgttgtttcaaggcatttaagaaacgaaaccgataaagcaattatttgcgaccttctgcggtggcttcaaaaagcttgtattcttcacgaaatgaatcgtcagatgattatggaggacacaccaatgctgaagcatctaaagacgcttgtcgggcacaatgaagcagaagtagtgaagaatgtttgcgctttattcaggttccttatcctggatgatgatattcgggtagagtttggaaaggctcacgaacatgccagaacgttggccgttgaaaccttgccagatatcaccaaactgctgtttaaattcaaatccgatcaggatctagtgtgtgatttactattaacggttgcgtcattgaccgtgcgaaatgagttttgtcaagtagttgaagatgccggtggcctcaagttcattatggatgctatggtagagtttcccgattccataaaaattctcagggaatcgtgtaagctgttaaaggctctcgctggcaacgattccgtgaaatcgcacattattcaaaacggtgctgcaccacttattgaatcagctctcaaccgacacaaagacaatgaaaccttcgctcgtcatgccttggtatgtgtggccacgttggctcttagggaaaaggataatagtaaagctctgttcgaaactggaatttccgaaacgattattcaaactatgaagattcatcccaccagtaagattgtccaacgaaatggcgcctggtccataaggaacatggtgtcacgatcacgggaccagtgcgacacgttcatcagtcaaggggcagaagatgtgttgaatcaggcactcgctgaccacccaactattaaccacgatgtcaaatctgcgctgcgagatttaggttgtaaggtacatctgaatgaagaatggaaagcccaatccgacattcagattaagaacgatgaataattttgtgtggctaggtagaagacttccttttttgctatgttaatctatcagataatttgcaactgcttttacaaacgtactcacactgcctttaataatatttatgctatgcggcagattctaatttataatatgtttacacgattgaatataattaacctgcaccctattgaataatatgtcttttaatttagttttagacattctattaccaatggaatcatctatttcaagttaattccaagaaaaagaaaaattgaacttgataattatttaactgggcaattgatatgagcaacgatcatctctatcgtaatcgatcgatcaagatccgatcgtagcgttgggtcacgatgccgatgtctaaaaataacatctctctcgctttgatgtatacatgtaaggcaagattatgaaattatgttttatagaaaatatttgttgtcaggcattgc

SEQ ID NO: 1493 - DNA, 2024 bp, Aedes aegypti
aaaaaaaaaaacagattggttccgtgcacattaaacttagcggtgtaacgaacagacagaacctgacagaaccccctgctgtggttttgtcaaagcatctgtcagtcgcacgcgaagcgagcgcttttggcgaggaaaaaaatcatggcagaagaaaaagttaccacgacgatactttccctctttgtgtgtgcagcgaataatccttgaaaatcttcatcaatttgcgaaacaaaatcgcctattttgtgcttaaacggtcgaggaagcgatcgtgaatacaatggaggaagattgggagcaactcagcgagcaggaaaaggtgcccattcctgccaagaaaccggacgtcaacaaatgggatggcgaggatgaggaggaagaagtgaaggacagttgggaagatgaggacgagcttgaggagaaaaaggatgaggaaaaagtggaaactcccaaagctaagccgaagaaaaccttgcaacagaaaattgccgataaagagaaattaaagcaagaagaagctgagcgacgaaggttagaaaaggaagaagaggacatgactcccgagcagaaattggctgaaaagctccgacttcagaaattacaagaggaatctgatctgaagaatgccctggacacatttggagtgacgtccattgttggcggaatcgatggtatgcatcccaccaacaaggaggaatttatcgaactttccgatgccatctgcaagaagctttcaaattacaaaaacgataccgagtattgtgcgtttttggaggatcttgtcaccaagttgttcgccagtttgccatcggccaatattaggaaagtcaaaggtattctggacaatctttatctagaaaagcagaagttagaaaagggtgataagcccaagaaaaaggcgggcggaaagattaaggccaggctacgaatggatggcgaaaatcaaaactttgacgaatacgctcctaagtacgacgatttcgatgagtacgatgattttatgtaacattcgctataaatagacaaaatgttacaagttcgctcggacgtggcaaagagtgcacgtgattgactaacgttccgaagtggaaaacaaatcgaacgctcatctagcagagatacaacccctcaaacaggaattaaagtaattttcttgcataactaatcaaaacatgaaaatgagactttttttttgttatctaattgaactatgtgcgatatttttgtctgtcgcttttgttcacaacccctttattttacgttgctagccgaatggccgaccacagtgttgtccatcgtaagatagagttccatccctcattgcaaattagaataatcaattgtctccgtttgtttctgtttagccctttctacaagtagctattaaataaaagttggctggaacaaacaactgtgctggataagaggaagataagaattaggattttcaatttagaccgttgtaacgaaccacgccgaaaacaaaactaggacgaaaagagagcgcacgctacaatggccaaacttacagaaaacgatatcatgtcaaagctacaaagtatgattttagcgatcgaactgtatagagttgtggtcaaaaggcaggataaatactggtaggctgcatagagtttctgagaatgtgtaaataggagataaaaaaaacattgaataaaagtttcgacgcagaaaaagcagtgctatctactaatttgcataaaacattccgatatacaggtattagcttaatggttttcagaagcttacacgcaataacaatcgcgttgtctctatctcatgtctggttaaagtcgatttatctttatttatatttatctcttgtcgtttcgtttcaatatccagcacttacaaggtgtagcagttgagtaacgccgaaggcttaatgagaggaaaaataaaccaacgttgacgataactaattctcccaaaattttaagtgatatggaaaacatttactatgcgaaagctactttaccaaagaccacattttgacgagacgt

SEQ ID NO: 1494 - DNA, 1578 bp, Aedes aegypti
atgatggtagcgatggcaaacccggcggacaatccggagcccccgacgatatcgacgaccacggcccaggacgacaagctgtctgccaaaccgctcaaatccagcaccgagagtctcaactcggacagcaatggaaatccactgacccgtaaggcggccatcatgcaggtcacgatggccatcgtcgccaacatcaccatcatctcgtccggaatggggctgggattcccttcgattgccatgatcgaactcaccaactcgaccagctccgtcatgttgaccgagaaccaggcctcatggttcgcatcggtgacatcgattctgtgtccgttcggtggactactggccggtttcctactggacaaaatcggtcggaaaaagacactgtatttcatcaacgtgatctccgtggtctcgtggggcatcatggcctttgccagcaaaacggacgaaatgctactgtttgtagagctgatggttgcccgagtgattataggtctcgcgattgggctttcgagttcgcccgcttcggtgtatgctgcggagatatcgcaccctaatctccgaggtcgactaacgctgctgacagcgctctgcaccggcatcggaatgctggcggtttacacgttgggatacttgtttaaggacgactggcgcttcgtttgcatcctgtgcggaatcttcacgctcatctcgctcgtgtcggtgtacccgattccagagtcacccagctggctagtgtccaagaacaagcttcccaaggcggaaaaatgtctgaaaaaggttcgcgccatcaaggaaaacaaccaccccaaaatccacgaagagctagacaacctggctgacaacattgcccgtttccgcgccaaccaaacgagcagctccaagcttatcatgcttcgcaagccggaagtctacaagcccctgtcgattatgtgcacgttcttcttcttccaacagttcaccggaatcttcgtcatcatcgtgtatgccgcacgcttttctattgaggctggcgtcagcatcgaccccttcctgagtgcagtcttcgtgggtctcacccgtgttgtgacgactatcttgatgagctacatttcagacagcttcggcagacgtccaccggcactgttctccggattcggaatggctacttgcatgttcggactggccgcctgtaccgtctatccggtcaagggtactgagttgcaatgggtcccaacattcctgctggtggcatttatcttctgtgctaccctgggcttcctaacgctgccattcgccatgattgccgagatgttcccaacgaaagcacgtggcttccttgccggattgaccatctttgccggctacaccatgtcgttcatcatcatcaaggtttacccggccatggtgcacgccatgggcaacgagtacgtgttcctatttttcggtatcgtatcagtcatcggcattgggtttgtgtacatgttcctaccggaaacgaagggccggaccttggaggaaattgaaaattacttccgaggacaggtggacgctggggaggtcgaacttaagcagaaccatgattctaaggtttga

SEQ ID NO: 1495 - DNA, 858 bp, Aedes aegypti
atggatgaacaatattggtcatgctgggtcagcgccgccaaatctctcccaccgaacaaaattcttccctactgcaacctagcggtatcccttgagggcgtccgaatggaaacgattacctccaaacagagtttgctgacaaacttcaccatcgataccatatcctacggcgtgcaggacctcgtctataccagggtattcgcgatgatcgtcgtcaaggaaaactacaacctcaaggacgagaatcctttcgaggttcacgccttcgtgtgtgacagtcgagcgatggcccgccggttgacgtttgccctggcggcatccttccaggactattccaaaagggtgaaagaggctgaggaacataacatgggtgactccaatggaaagcccctgaggaaaaagtttgccatcgacctgcgaacaccggaagaaatccagcaggacatcaccgagcaggaaacggaagcgtgatttcacttgattcactttgatatattaatcttttgctgccacaatcttcgttgaacgaatgtgaaatcagataaagattaaagaacagtgttgtgactagtcgattttatactattaacgcataaatgttatcataatgcccctaaggtgatcgagatgacctgtaccaaggtcgacaggatacaaataccaaaatcaagtaaaatcaatttgcagcaaagatagatttaagagaagaaaaggatgtagcatatgattttgttggaataatacacacttattgagagaagctatattttatatgaatgaagaaaacaaataaatacaaaccgagagaaatttattttgatgcattagatgtgtgacatttgcaccaaacctaataat

SEQ ID NO: 1496 - DNA, 3883 bp, Aedes aegypti
tgacggatccttgaacgttatggaaaaattgcaagaacatgacagatttgcccaatgatgtcggcagcaatctttgaaataaattcatcaatttccaaaaatcctttaaaatcttgtgggaaattcttcaataatctcactcgaagttaagcaaagcttttcaaaatatccactgacaatcttaccaggcaacagaattttggaatgaatttcggaaggaattctacaaagaagtcgggaataatccatttagaaggtagtaattggctactctacaccgagcattaatattccttttatcttcagtatctttcacatcattatttagtgtaggtattatataatactcgatcatgtattgacccatttgttcaacagatttcaaataacacacttccaattttttttcatttttaaaccctacgcgatataaacttttgaaataccttaagtaacgtttttaggcttataggtctattatacagcttatatatggcaagtgagctatataatagcattattttaacactgagcgaattaaagtgctattttattacttaggacattgatcttatgaaatgcatcaataaatggggattaaatcgccttcgtctctcatcagtgaaggagtgtcaacgttttaatactaacaattttcctaatattgtacatacagctgaatatgtaactattaccgtagtctagactaacattcacacattcattgtacattgagttgcactaaaaacttctgagatacccaattcttctcatcaaaattctaataatctttctattctatttacgttagacgtggaaccgcttccaggatggcaaacgggtggtcgacttcgtgctggcctacaacggccaggaccaaagcgaagagatggcccgcaaaagggccaccttccagcagaacctccaagcggagggtttagaaatcgaaccggaatgttcgcagcgaatccacttcatcaaaatccacgtcccccaggaggtggtgtcccggtactgtgagatcatgcgcatgcagatgccaacggtgaagctgccgggtcaggacaatattgcgccaaaggatttcagcgtgagcggtttgctggttaagctgtttaggaggccgctgttcagcttcgtgatcatcgatcgggacaagttccgcaagagggaataccagctgaagcacgagtatacgcgggacaagtcgtatctgtttgacgacggacagccggatttcttcactccgagcatccggatagcggtggcccattttattctggagcggacgtatttcaacgtgggggaggagaacaagtacgacatcgggttgaggaagctgttgaacgatggggtttatttggatgcttacccgctgcacgatggaaacacggacatgccggaggtggagtgtcagaggacgcttcttctgcaggagtgggcttccgtgatccggtggatcaagcaccagccgttggaccacatcaaggagtacttcggggtgaaggtggcgatgtacttcgcctggcttgggttctacacgcacatgctgatctgggcttcgatcgtgggtttgctgtgtttcttctacggattgctaacgttccgggacaaccggatcagtcaggacatttgcaacgacaacacgacgatcatgtgtccgcagtgtgacgccaagtgcgactactggaggctaaacgatacgtgcacaacctcgcaactggcgcacatattcgacaacaacttcacgatcgtgttcgcggtgttcatgtcgatctgggctaccctctatctggaaatgtggaaacggtactcatcggccattcagcaccggtggggcatcacggattactgttcgctggcggaacctccacggccgcagtatttgtcgcggttgaaggatagcaagaagacgatcttcaatataattaccgggacgcaggaaccatcgccgccgttctggacgaaaaagttgcccagcttcctatacagttactccgtgatatttttgtttataaccctagcgatcgccgccgtcttcggcatcgtgatctaccggatgtcgctgatgacctcgcgcaacatctacggcgacccggacgccgtctcgaccaagctgttgctcctgccggcgacggccgccatcatcaacttgatcgtgtcgacgatcctgaacttcgcgtacgattacgtggccgtctacatgaccgacatcgagtaccggcggacgcagagcgagtacaacgagagtctgaacctcaagatctacctcttccagttcatcaactactacagttcgatcttctacattgcgttcgtgaaggggaagttccccggctatccggcgaagtacaaccggattctgacgctacgtcaggaggaatgcagtcccggtggatgcctgatggaactgtgcatccagctggcgatcatcatgatcggcaagcagatcatttcgttgatcctggagattctggtgccgttcctgttgcaaaagttccgcgagttcagaagcgtgctgggcatcgagtcggaggaatcagagaacggcgagaagctgatttgctgcaaccagtggaccaaagattttacgctgatcagctggaccgatcggagtttgttcgaggaatatcttaagatgatcatccagtacggattcataacgatctttgtggtggccttcccgttgggtccattgtttgcgctgttgaacaacgtgttcgagacgcggttggacgcgaagaagttcttgctgtactacaagcgagccgttccgcagcgagtgcgaaacatcggcatgtggtacaacgtgatgcacgtgctcggaaaagtggcggtgatttccagtgcattcattatcgccttctcgtcgaacttcatcccgcggctggtatacatgtacgtcgtgagccaggacaaaacagaccgaggctatctgaaccacacgctggcgtacttcaacgtcagcgatttcgaaccgggtgctgccccgattgcctccaagtttgagaacgtcaccgtgtgtcgctaccacgagtatcggaaccccccgggagcggatcgggcctacaagcgaccgctcatctactggcacatcctggccatccgtctggccttcgtggtcatctaccagaacgtggtcagcttcgtgcagattgtggtggcgtgggccattccggacacccccggccgactgcaagatcagatcaagcgggaacagtacctaacgaacgagttcatcatccagcaggagaagctgaagacccgggagcggaagtgtggccgcaatggtagctcgaaacggcgcaacgggacgctggcacggcagcagagcagtttggaagaatacggcacgacggtgagcctgaccgaggaggaaggcgaagacgaaaactacgtccggaggaggccaaacggtggaaccgatccgtacaatcacgaacgcttccaggagtgcgagattgtgacgtcgagagtttagatgagggggctcgaaacaatgaccaacccagtcagtagagtgtggcgtaagcatccacatgttaactatttttctactttcgaactttatatctttacactgacgacgctgagaaccgtactgatcgaatgcctttcttttacgttttaaatggcatttcgttttgcgaagctttacatgtgaatatatgagacgcaacatttgggggatctgaacccctagcgcaaaacttagaagtgtagctaaattttaggtagctattatataggagcgtaaacattttctttgtaccaagagaaattgtattgcatgaacaacaagaggaacaacctaaccaacacacagcacttatttattaaactaggaaaaacaaaacaaccaataaaatatattttcaatttt

SEQ ID NO: 1497 - DNA, 2882 bp, Aedes aegypti
agttcggtttgaacatcggatgcggtcgtctgggaaaacaaatcgatgcgcttcaactgtgtttggttaaatgtgctaaagttataaaacaggagtgatcattagttttaaatagtttaagtgattggctatcgggagtttttttatgtacaatgggtgaaaatggagacttccaacgctgtcacaggaccaaaagaaacctaaagttcaaagatgggatacgaaccgtggatttcgttctgacacgaaacccagatcatgccgacaaacaggtcaggcgttgttacttcgaaaagaacctaactgaagagggcctgcagatcgagccagatgacttcgaagagtttttcgccaataatcccttccctgaccatcaatccgcaacactagataagagagatgaattcactgtacagaccctgcgggtcgagtcgtgtgactccaaaaaggcccggttcaccaaaatacacgtacctcaggaaacgcttctgcgttattgcgaaatcatgcgtataaaaatgaaggtcaatttatcaggactagagaaggatcagcaatcggctgatggtcacctcaataatgtgaacagcagacgagtgagtttgacgggaacgttgcgaaaggtgctcccgaaaacgatgattgattttttgaaccttaatgagtcggaaggaaacccgatcctgtatgagtattctcgcgggaaggactatttgttcgggaaaaatgttgcaatgtccgttgcgccgactgttcggacagcggtagcccactatatcatggagagaacgaactgcggagacaagaaagatgatcctttcgacaccgggttgacgaagttgctggaggagggagtgtatctggatgcgtttcctctgcatgatggcaatttggaaccggccgaggaatgcaagagaacgtggttactccaggagtgggcttccatggttcactggataaaattgcagccgttgacggaggtgaaggactacttcggaacgcacgtcgggatgtacttcgcctggcaaggcttctacacgaacatgctgatctgggcctcttctgccgggatgttgtgcttcttgttcgggctggtaacattccggagcaaccaggtcagtcaggacatctgcagggataactcgacgatcatgtgcccgcagtgcgatgccatatgcgactattggaagctgggagatacctgcttgtcatcacgtctggcttacctgttcgataacaagcttacgatctggtttgcgctgttcatgtccgtttgggcatcggtttatctgaaaatgtggaagcgatacgtttcgcatcttcagcacaagtggggcgtccgagattacgacgctcaggtggaaccgccaaggccacagtatctcgcgcggctactggaacgcaacagcaagatcaccaacagcgcctccatgaacggggttgacgagcagactgttaaggcagactgtgccaagactgtcctgaacacttacactggaaagaaggaacccgccccacgcttctggtcgacaaagctgcccagcctactgtacagttactccgtgattttgctcttcattggacttgcggtcgctgccgtcttcgggttcgtaatctaccggatgtccctgttgacggcgcgtcacatctacggagatccagcggacgtagccaacaagcggcttatgttctccgctgtggcagccattatcgatttggcactttcgatagcgctggacgtcgcttacaatgcggtggccgttcgcatgaccaacatcgaataccatcggacccagaacgactacaacgaaagtctgaacctgaaggtgttccttttccagtttgtcaattactacagttcgatcttctacatcgcttttctgaaggggaagtttcctggatacccggcaaagtataaccggattctgggcttccggcaagaagagtgccaacccgggggttgcctgatggagctaagcgttcagctggccattatcatgatcggcaagcagactgtttcgctgattcgggatttctctattccttattttgtgaaacagtaccgagagtggagaaagcggaattcgaaggaagaggatgattcggttgatagcaacgagtatactgaggatgattcactgatcagctggaacgagcgttgccgttacgatgactatgtgaagatggtgattcaatatggattcattaccatttttgtggtagcttttccgctggcaccgctctttgccctgctgaacaatgtgttcgaaacgcgtctggatgcgatgaaatatctcaagttctataagcggccggttccgaaacgggttcgagacatcggcatgtggtacgacataatggacgtaatcgccaaaatggctgtcgtatccagtgcattcatcatcgccttctcgtcaaccttcatcccccgactggtctacatgagcgtcgtcaaccggaacaaaaccgacgagggtttcctcaatcacactttggcctacttcaatgttgaacacttccaagctggcgccgctccgctcgtgaccaagttccacaatatatcgatgtgccgctatcaggaataccggaaccctccgttcggggatcggccctacaaacgaccgctcatctattggcacattttcgccttccggcttgccttcatagtgatctaccagaacgtggtcagcaccgtgcaggggctggtgaactggatcattccggacactccgagccgtctgcaggagcaaatcaaacaggaacagtactacatcaatcagcgcatcatgtccggagagagagctaaggctaagcggacggttaaatcgttggattcggttgcagaatctgttccggttggaaatggcgtaataactacttga

SEQ ID NO: 1498 - DNA, 2482 bp, Aedes aegypti
cacgcacgcaaccccccaaaagagggaagggaggaactttggctcgcattctcgtctcgcgtttttcacagccaacagcagacaagacaagacacaaagtgctcgtcgttgcgtttttgtttgagaaaatcagtgaagggaaaatctgccgcgtcaaaaggcaaaaggtgccgtttttgcgtgtttccgacgagagcagagaactgtttattgtggaatagaagtgaaattgtgatcggattcggagagcttgccgtacaagatggtcaacaacgacaagcatcagccccaggaggatgaacacaccactgcggacaacacggtcgtgcaaaagtacaaaacagccggaaccatcgtcaacaaaacgctaaacagtctcatccaaggatgcaaagtgggagcttccgtgaaagccctctgccaaaagggagacaatcagatggaatccgagactggcaagaaatacaagaatgaaccggatatgaagaagggaatcgctttcccaacgtgtctctcggtgaacaactgcatttgccacttctccccatcgaagaacgatccggactatcagctgaaggcaggagatgtcgtcaaaattgacctgggagcgcacatcgacggtttcattgcggtggccgcccacacgatcgtggtcggtgccaagctggagaacaaggcgaagggccgtgcggcggacgttgtcctcgcggcttaccacgccagccaggccgccctgcgattgatgaaggacggaaccagcaactacgcggtgacggatgccgtgcagaagattgccgccgagttcaaatgcaaaccgatcgagggcatgctcagccaccagttgaagcagttcaagatcgacggcgagaagaccatcatccagaacccgaccatcgcccagaagaaggaacacgaaaagtgcgagttcgaaaagtacgaagtgtacgccatggatgtgctggtcagtaccggcgagggcctcggcaaggaactggacaccaaggtttccatctacaagaaaaccgaggagaactacctgctgaaactgaaggcatcgcgtgcattctacgctgaggtgaaaaagaagtacggcccgatgccattcaacctgcgcaacttcgaggaggaagccaaagccaagatgggagtgcacgagtgcgtgacgcacaagctggtcgaaccgttccaagtattatacgagaaacacaacgaactagtcgcccagttcaagaacaccgtgctcatcctgccgaacggattgacggtggtgaccggtaccaacttcgacgtgaactgcttcgagagcgaacacagcgtccaggatgaggagatgaagaaactgctcgaatcggaactggtcctggcggacgccaaaaagtcggcgttggccaacctgaccaaggctgcctcctccaaacccgctggtgatgccgccaaggctgctactgcctctgctgctgcgccagcaccacctgccgatggatctgccccggtggcagccgccaaggacaagaagaagaggaagaagaagaaggccgcggctgccggcgaaacggcggctgcagaggaagccggcaaggagaatgccgcctaagtgtgagggtggccatcgcagcgaaagaggttgtatgttgttagggttccgcagtggttttcgcagctgcgttcagaaagtctggttctacgttttgatttcctccatttgcgctcgatcggaaccttggtacggaactggtaggagcgtcatcctgcatttccgttgaggactgttcgatcttagtttggatgctcttttttgtggtacagagtctataatcggtgcctgcgactcgccctagaatgtaaggcgtttagtttttgaagtgttcgcaataagtcgagagttagtagagttattcgtttcccttatgatatcagactgtgtccgttccaagcgccgattatgggcgcggtatcttccagagccttccaggagcatgttcccgtgacctcagtataatccccccgcccatctctttacacacaaaccacatttgttaatacacatccgtgaccagttgaaaaatccgatcagaatcgtactactcaaaaaaaaatatagccatggtagggtactttcacgaaagtacattggagagaaaaggcaatcaattacttccagagaaaccagtgatctgttggaaagcaaaatagtgtcgaaacgatgtatgtagataagaaaaggtatactacggaaacgatgccattgtaccttcggaaaaactatctgaccagaaatggaaacccgcgcgtgttgacacattgacaggagagagcaatcgcattcattcaccttgtataaaaaaaagcaaactgcaaccacaaatttattgagtcgtttaaaattgtaattccgttttttgtttcgtaataaagttttgaaaaggagagcatccaaataaattttacttacgtattatagagatgcgtattaggtaaacaa

SEQ ID NO: 1499 - DNA, 1104 bp, Aedes aegypti
atttgaaaagcgcctaattcatttttcgatggtggcattttttgttggataatttgttaaactcattgtaatttagcttaatttgttgcagtaaagttcattctaaaataatgtaaaccgtgcagaattattctgaattgatgtactttcaaacgaacgaataaaattgaaattgcgcgtgttcaacaacacctgtgattttttaacccgtacgccactaccgaatgagacacgcgaaaactgtcagatcgcagaaacttccacaagcaaaatcatcacacaatcggctcgtttcgtcgctcttcttctcgtggatttaattggattttcagtgaaaatttatcaatttcgatagaaaatactgtaatcggaagtgtttgctagtgaacatttgtgctaccttatctatcaattgcattgaacgtggctgcagcgtgattcaactcaaaccgaagcagcagtatggcggtctactgctggggtaataccgtccacggtgagctgggcttgggtggcatcgaggatgaacaggttctgcttccccgcgaaatggactggtgtcactcgtccagcgtgcagcaggcagcctgcggaacttcgcacacccttctgctgaccaaggatgggaagctgttctcctgcggaaacaacgatcacggacagctgggacacgacacggactgcctgcccaacaaacggccacgtacgtgccgctttagtatgtaattctttttgccacacatgacaccgtgactttccccccttcttttcgtcgcttgaacttgcctgcctctttgtcgtagttgtagaagtttggtaggtttttaatgattgctcacgtttaggttttggccttcctccagaaagtctcccagttatttcgtacataaattccaccatcgatttttcaagaactaggtgcttgttcttcgattccattcttcaagaaaatccttcaggaatccaacgccgatttccgtatcaatttctttatgcattgttgcgaaaatttcctgaaggagtctctcagaaaggtctccagagattattccggtaattctttcaccgacttcaccacttgatcagtgttgtgaaaaactcaat

SEQ ID NO: 1500 - DNA, 3549 bp, Aedes aegypti
tcgctcgtgttgagaatgttcatgggaagcgatgccgaatatcagcgaaaacgtgtcgactcaactcagcgaaaacgtgtcgattgccttacaacactgagtgaaagtgaagaacttttcgtcgttagaacacaattcaattgttcttattatatatgagaattggaacatcgctagttgcaatcacgcttgaacttttccattacctgattagagtaattaattatcggtttgctgtttacaaaaccatagcatattagcattttgaatcagaataaaaactaaatgcgtcgagaaccatctattttataattaatttaatggacagctatgggaagcagtaaagtgcatctgtctgactaaagtgttgaatgttgcaattcgcagaagagaaaaaacgttgtgccgactgtcatccctcctgtatgacgtgcaacggatcgtccgagtcgcagtgcatcctgtgccgagctggccggtttgctcacgagggccggtgcctcaatgcctgcccggatgggttctttggggacaaaaaacggcacgagtgcatgccgtgtccgattgggtgctcgacgtgcagcagcggctccatctgtacggcctgccgggacaactggaccatgaacaagaaggccaaatgcatcgccaacgggagcaataactgtgacgaatcggaatactacgagaacggtcactgtcactcgtgccactcgacgtgcgaaacctgcacaggtccaacggagcacgagtgtctaacctgcgcatcgccgttgctgctgcagaaccaacgctgcgtcaacgagtgcgacgagggctactacatggaggtgggcgtctgtgccaagtgtttgcacacctgtacccagtgtgtgtcgcgcatgaactgcacttcctgccagaagggactgcagctgcagagtggcgagtgccgaacgacctgtgccgacggatattacagcgatcgtggaacctgcgccaagtgctacctgagctgcaacacgtgcagcggaccgcgccgggatcagtgcgtgacgtgtcccgaaggttggcagcttgctggaggcgagtgccatcccgagtgccccgaaggattcttcaagaccaaattcggctgccaaaagtgccatcactattgcaaaacctgtaacgccgctggcccactggcctgtacttcctgtccgtcgcacttcatgctcgacggaggcctctgtatcgagtgtctcggatcacagttctacgatccaccaacgcagacgtgcaagacctgtcacgatagctgccggtcttgtagcggtcccggtcagtattcgtgtgtaacgtgcgccttcccgctgcatctggatcgtctcaacaaccagtgtgtgccttgctgtgccagcgatgcctcgcccgaagatcaaagctgctgccattgcgacaaagaaaccggtggctgcatcaattcatcgccggctggaaaacggcgtatcggtgccgaacagcagttgcttcagtttggtgaggaagcagcaaatagcgcaagcgatagcaacgctgccgaaaccagcgattcaagtctacggcggttcctacagggagcatcgccctcggccgtcaccgtcgtagccgtctccggttgtttgctgatcgtgacattgttcgccatcattttcaccgtactacagaaacggaaccgtaacgtttacaccggcgtccggtacaacaaactatccagcggaagtggcggaggaagtggttcccgaaccacaaagatatcaataccagccgatggtgatgatttattagaaccaattgtaaataattccgaagacgtggacgacgaggaggacgatgatgatgagaatgggaagggccagggcgagaagggcgaccacgtgtaccacgacgatgaccacgaactgcacgatggtgcaatggttaccagcagcagtaccagaaacagcggagcaggccacagcaggcagaaccggtttgtggccacaggacatcacggggcatcacggcgagggacaaggccacagccggactcgatacggtttgcaaggacttgaaaatggaaaacgcgaacgtagttccctccccccaactgcggagatgagggaaaacggtaaactgtgtgctataataggcgataacaaattattataaatatttacttaagtgaggtcggaagcggaagcaacggggcttgaagccgtctcaatagctgggattgggcagccgtccgttcttccttagattcgcctcagatttgttatactggaagccttggttgggggaattgagggaagaatgagaaacaagtgcgagtggaaacaagatgcgatcgaaaataaaatttggagaaaaaacacaaacgaaatgatgttcatgatgttgatgacgatggctgacggaatgatgacgatgaggcaattgggggcgataaagtaagtgtgtttgtggatatgtgggagtgtgggtatttggggtaaacaatcttttgatttggaaataaaggaaaattaagaacttttttgttactttttatacactattattgccgtagtcgataggaattcgggcaaaatggcgattacgcgtcttggaagagaaagggagatttagatgtacagtgttaaggcacttttcaaattccgatgacataaaaatggagcagttagacgacgaaagcatgagggaagctgaggaaaagctgcttattggagatgaaaagaaaggttgttgttagacaggggaacaaacagagcgattggtgaccattgcattggcttcagcttatgtcttcaaaataatagtcttgttaatggcgacaacagtaaaataagaaacatcatacgcctgtgaaatgcgagcaaaagaaatgagtgttccgaattattctccctccattacttcattgcgttattccatctttaagacagaacctgctcctctcgactatgttttgtcccttttccagataattatgttttgcggatttttctcgcaaagcacaattattgtaaaatcgaaacactgtgagctctttcattgccatatgtttaaaatatcacagataacacacgtcgttttcaaaacatcggatcatcgagaaacagagtgaacagtgggaggtaagtggtacagaattacatccattgtgaaaatatttatgctagaattggactgatctaaatgcataaaatcgatcgtgattttacaattttttgtttttatgattagatataaagatattgtcaacaaaatttcaacaaaaccaatacttcgttgatctctatcatataaaataacgtaaacatagcattaaactagtttgaagattaaaaatttgaaatgattcactgaggtaaaattgatcattaaaaacagacttaagatccttagctactttttgggttcactgattcaaaaaacgacgtcaaacgataacgattttatgcattgttatgcagattgatttcaagaactaattcagtagttcacacttaagcttacaaaaaaaatcatattctttatgttgcaaacccatctattccgggataa

SEQ ID NO: 1501 - DNA, 1551 bp, Aedes aegypti
atgagtgatttagctaaactgagggcgcaaatagtgtcgtggttcaacattagcggttttcagatacgaagcgaggccagtaacttcctagcccagcagatcgccccactcgggaaagcggcccgcaaacgatggctagaggacatcgccagtcacgtgcagggccaaaacctggatctaccggccgtggagaagagccacatcgagctggccatcaaggaagccaacaacaccggcctggaggacaacgagaccatcttcagcgttattaacgcttttgacgtgccccgcttccacttccacgaggaaaagaagatgttcatgccggacagtggtaaacggggcttctttcccgggccagataccaaggccgagtatattcgcgagcggtacttgatgctgtggcagaaaacctgccgacacgagatgttcaacaccagcaaggtttcgacctataaggacattaaacggctgacgttgaggaagatcgaactgctgctgtcgacgtcgaagatgaaggaggtggtagttctcggattactaacgcagctaaccgaaggaaagttctacctggaagatccgaccggcgttgtacccatcgacttgagagaaaccgtctactcttccggactgttctgcgagggatgcttcgttctggcaagtgggacctacagtgacgggacgctcaaaatagacgagctgggattccccgttacggaactggcctccagcagtcgagccttcttcggaacggtaaacacctggggagggcgatccaagagtctgctcaagtactccaggaatttggccgaactggagaggaactccggcgaggacagcatcgtattcctggccgactgttggctggataacccgatagtgcttcaaaagctgacgcagctgctggacggctacaaccagttccctcctcgagcgatagtgttgatgggaccgttcagcaaatcgaccgagaatccttacgccttgaaggaacgattccaagctttgggcgagactctgggttcgtacgagtcgctcaagaaggaaacggatgtggtcctggtgccgtcctctgaagatccaacgacggctaacattctgcctcgtccaccattgccggaatatctcacgggtgacctgaagaaaagctacccgagactcgtgctagctaccaatccatgtcggctgcagtactgcacacagcagatcgtggtatgccgttcggatttggtgaccaagctctgccgaaacaccatacacttccctaagagtggccaacttgcagatcacttcgcccgcacactcatcagccagggaacgctggcgccgctcaatccgattgcgtgccctgttcactggaactacgacgcggcattgtcgctgtatccgttgccggatctgatcgtcatcggcgataccagccagggattccaaacgacggaacaggagtgcacggtgctgaacaccggatcgttctccaagtcaaagttcagcttcaaggtgtacattccctcgacacggaccgtggaggattcgcagattccggagtag

SEQ ID NO: 1502 - DNA, 589 bp, Aedes aegypti
gattcagttcttcccaagcggcaattcaaaacagttcggctcacgatgaagtccaccgtatctttgattttgctactggccatttccggagttcgtagcttagagtgctacagctgcgattcggatctgatggatgaggactgcgatgccatcgcaacactgccgaagcagacctgccaggacgtgtccgatttccaactggtttccctgacctgtggctataaaagggtgcaagttggaaacctgacggaacgaatctttcggggatgcgtggtagcgggagagtgcagcctgttcaaccggcagagtgagctcacctcgaagtatcgcatgctgtcttgcgtggagtgcaactcggatcactgtaacaccatgagaagcggagctggaaggggtgccattggcggaatagccggaagtgttgtgatgttgctttcgatttttgtttctagaggtcaagtaatgtaatacgttgactttttatccatagtatagagcgctgtaaaaaaagatgcaggattcaataacgaacgccttttctaaagatatcataataaaactatccaaatacgattttgaaggaaccatc

SEQ ID NO: 1503 - DNA, 1323 bp, Aedes aegypti
atcgaagtggtccggattccgggatgagtaaatctccgtcgtcggagacgaccagcgagacgcaaagcgtcagcgacgagtccattgccgcttccgtggtcaactcgtcgtcaagtgccccgataaggtccaatgtcgccaagacggcaaccacggccaagaagcccgcgaaggaagaaccgaaggagcgtcctccgtggcgtccggccagcgtcgccagcgtggttccgaccgttccgaagcccgacttgcgggccagaattttggacgtgtccaaacggctgcgtcggcgtgaatgcgtccgcccaaaccgatccggtgcatacgaagctcatgaaggaagtttctaccgatgaacccaaagaccttattccgatggtcgatgaggagattcttaccgacggcaatctggtgattcgcgaaataggaaattttatcctgacgcattcggtagcgcagatgacggaatcggttccaaccttggacgcagcaacacagacggctcttcctcgaagcggcatttctttccggaagtttttggattctggagcaggggacggtccggctccgaaggttgtaatagacgaggcacccagtgaaaaaggcgttgaaacgtcgtccagtttggaagaattgatcaaaatggacgagaagatcaaacagttcttcaggacttcggacttggaagagctggaaaacctggatgacatggaatccagccatagcaacgacagtatcaaagagcaacctaccccggatctactggccggttcgtcccaggacgcagcccagcacaaatcgcgattcctggaacctccggctttcaactcctggcagaatttggacttttcggacgaagagtcggaacactacgttcgccgggaactaccgcggcgctcaatcggtgagggcaatcgaccgtgggccgagttcaaagacctggtgatcggatcgcggttggccaacatgcggctttcgccgataccaccgcgacggccacgtcctaacaagaaaactgtcacatggagtgacacccagcaccgagccgtgtcggatctgctccacgaggctactgcgctggtagacatgttcgaccacgtctcgatgttgcttgggccggacataaagctgcattcgatcccaccgcaggaagacttcaagctgccgccgcccaagtgggaacccctgctgaccaagtcttgtgatctgctggaggagaagttggcgaaagttcggcatctgacgttcgaagatctggacaatgatttgctgttgcagccagtcaagacgcagccaatcaacgacttggaggtgacattgtaa

SEQ ID NO: 1504 - DNA, 2593 bp, Aedes aegypti
actttagctcggatgtgttcacttcctccgagcctctcgcgagcgagcgcgatgacagttcgtttgcgcgccaaaacaacgcaaacagtccgagagcccggtccagaccaagcgcgcatttactggaaaggagcttcaaactggtgtggctgcaataatttccatagtttttcgtaaaatatcttcaaataaagcgtaaaacagctcaaattgtgcatatttcggttcccgttgtgtgaaactatcgtcgaaacgcagaaaacatggacggattcgacgatgtcggaatattcttctcggacaactttggcgacgatgggcagcagcagaactcgaaccagatcaaccttcagcagctgaagaagaagtaccgggaattcatccggacgttctgtgaagcgaacttcagctataaatatcgtgataacctgaagcggaactacctgttgggtcgctactatctggaggtggagatcgaggacttggccggtttcgacgagactctggccgataagctgtacaagcaaccgacggagcatttgcagattttcgaggaagccgcccgggaagtggccgatgagatcacttcccccaggccggaagatgaggagcaggttcatgacattcagattctgctcacttcgggggccaatccgaccaacattcgggatctgaagtcggaatgtgtttcgcggttggtcaaggtggccggcattattattgccgcgtccgggataaaggccaaggcgactaagatttcgattcagtgccggtcgtgcagcaacgtgattcccaatctgccggtcaatccgggactggaggggtatcagctgccgaggaagtgcacgacggagcagaccggtcgcccgaaatgtccaatggatccgtactttatcatgccggacaagtgtaagtgcgtggacttccaggtgctgaagttacaggagcttccggacttcatccctcagggagagatccctcggcacatgcaactgttctgcgatcgaactttgtgcgagcgggtcgtgcccggaaatcgggtcctgatccatggaatcttctcgattcggaagattggcaaaccgagcaaacaggatggccgtgagaaggctattataggagtcagggccccttacatgagggtggtcgggattacggttgataccgaaggcatgggttccatttctcggttcagcaacatcacgaccgaggaggaatcgacgttccgcaagctggcggccaatccgaacatctacgattccctgtcggagagtttggccccgagtatcttcggctcgcaggacatcaagaaggccatcgtttgcttgctgttcggaggatcgaggaagcgaatgccggatgggttgacccgtcgtggggacatcaatatcctactgctgggagatcccggaacggccaagtctcagctgctgaaatttgtggagcaggtggctccaattgcggtttacacgtccggaaagggttccagtgctgcgggtttaactgcttccgtcattcgggatccggcgacgaggaacttcgtcatggaaggaggtgccatggtcctggcggatggtggagtcgtttgtattgacgagttcgacaagatgaaagaagacgatcgcgtggccattcacgaagccatggaacagcagaccatttcgattgccaaggccgggatcacgacgaccttgaactcgcgctgctcggttctggccgcggctaattccatcttcggccgttgggacgataccaagggcgaggagaacatcgacttcatgccaacgattttgtcccgtttcgatatgatcttcatcgtgaaggacgtccacgaccaggctcgggacatcaccctggccaagcacgtcatgaatgtccatatgaacgccaataagaccactctggagacccaggaaggcgaagttcccttggccctgttcaagaagtacatcaactactgccggacgcattgcgggccccgtttgaacgaagaggccgccgaaaagctcaagtcccgttatgtcctgatgcgaagcggagctggggaacacgaacgcatggcggacaagcgcctttccatccccatcaccgtccgtcagctggaagccgtcatccgtatctcggagtccctggctaaaatgcagcttcaacccttcgccacagaagctcacgtcacggaagccctgcgcctgttccaagtctcaacactggacgcggccatgtccggatcccttgcgggcgccgagggcttcttcaccgaggaggacaccgaagtgctgaaccgaatcgagaagcagctgaagcgacggttcgccatcggatcgcaggtttccgagcagagcatcatccaggactttgcccgccagaagtacccggagcaggccgttctgaaggtgattcacaccatgattcggcgcggagagttgcagcaccggatgcagagaaagatgctgtaccggttgtcgtagatccggggcagaagactacgtttgtaccttttcatttatctgttttcctaatgtcgtttgtgtattcgtaattcctttttacatctactaaattttagacgttaaaattagaataaaagtttaaa

SEQ ID NO: 1505 - DNA, 3240 bp, Aedes aegypti
atgtgcccgtcatccaagatggctgcgcgggaagcacacctcgaacaaattgacaaattacccaaccgattgacactacagtgcattgtgaacggcataccaatcgatcaccaccatggccccagcacatcaacagccatgcccggagcagctccggctcccacggcgtccgccctcgaggacagctggttctgggacccggagcagaacgtctcatccacatcgtcctcgtccaaaaaggacgacgacaacgactcgccccggtccgggacggatcttaccacgattcccctggaagcgccggcatctgagggcgagatcatcgagcggctgcaccgccagctgggcgacatccgccatcagctgaagaagcaacagctggagaatgctctcctgaacgagaagctcacccaggttagtaacgaaaatcgggaactgaacgagaacatcgaggaactcgatcgacagcatgaagtggtggtggagaacctgctgaccgccaagaagggacttctggagaaatgcaaccgactggaggaagatctaagggtaatgcacggcgaagccgctgtgacgaaggagctagatgagctcaaagtcagatacaacaaactggagcaaagctatgtaggatcgtgccaggaaagcgttcgactgaaggccgagctggagaaggtcgtcgtcgaaaacgtagaaaccgtagcggcattggaaaggaaactagaagatttgcataccaaactggatcaatcagagcaacggctccgaacggagacgatggaagctcaacagcgagccaacgccgcagttacggaaacgatagaactggaacagttcctggcggcgctaaaagacgacaacgagtacatcaaaaccgaactggaagaaacccggactcggtgtgagcagctcgagtcggaaaacatccaccagaaagccgagctggacgaactgaggcagaaagccgaagaggaagccttcgtggcactggcgccgaaggaggacgaccaagcggagatcgaagaactgcgccggaagattgaacagctgcggttggaatcggaccgatggaaaaccgattgcgatcggctccaggaggataatcttgctctgcagaagctcgagaagaacctccaggcgcaacttgacgaacagaagcaactgctcaagcgatccgaacaacaaactctccacgaagcgcaaattcagcagctacagcaagaagtaagcgaactgcagaatgagctcaagagcgtcatcatcgacaactcggtacaattggacgccaaggaaagagaatggcaggacaagctcaacttcctgaaagcggagaacaaccgcatccagcacggcaaggatacgctcgaagccgacctgctggagtacgagaaggagtgctccaatctgatgaagaacaacgacgtgttgattgcggaaatcgaccagctgaagtgcaagaagctggagacgatcaacgagaacgccgaggacagcatcgtgatcctggagaagcaactggaggattgcagccggttgaacaaaagtctggacgacgagtacaaggagatgaacaagaagctcgaggaggtcctcgaggaacgggaagagctcgagatgaaggtcgagagcttgcagaaagcgttggacgagaagagtaagactgtgaaggatcttcagctgacggtggaaacactggaaagtgaaaagagcagtctactgtttgagattaacgagacgcaatcgcgggaaccgccttcagagctatccagtgaactcgagaagtacaagtcgcaaacggagagtctgcaagcgcagctgaccaccatcaacgaggatcacgcgagtctggtgctgaagttgcagcaactgcagcagaagtcggtggagaacgttaagacatgggagggccggatagccgagctgggcaagtcgctggaggcgaaggaagctgtgatcgtgcaactgcaacaggagttggagcggcgaagtgaagaggtggaaacgttgaaaattaccagtgagaacaaagttcaagaggagttgaaagttttgcgggagcgattggaagctgagtcgacgaagtctacgacgttggcagtggagaaagatgagcttgaacagcagttgacgaggaagctagaggagctggaagagacaaaccgtgagaagcaggcagaactgagtcaatcggtcgaaacgttgacccaacaaaaggacaatctggtacagctgataaccgccaagcacaacgagaatgtccaataccacgcggagatccagcggctcagtcaactcctacaagcagagcttgcagcgaagacagaagccaaaccccctgcggaatgtacagattgtccaactctacgagagaagctcgcttccctcgagcagcaaatcaagaagctggaagactacgacaagatggccgatcagattcagttcctacgggaaaagtccgaaattcttaccaacaacctgctgatcgagcagaacaaccagaaggtgctgcagcaggagaagcaggaggcaatcgagcagaagaacaacctggccaaagacttggaccggctgcggcagcacttgctggaaacggaggaagctcacacccaggaaacggtcgaactgcagcagcgctacgaggaaaccaagcggaagctgcaagccttggaggatgacgtgaagaagtcgaccaatgcgcttacgtcggcgagcattcgggccaatcagcacgccgaaacgctgcaggcgcagtatcacctgttgcagcagcagcgggacgagctggtggcgaagctgaacacggccgacgaccgcgaccacaagaatcaggcctcgctgacgaatctgcagtgcgcgctggagcagttccagataaatcgcgatcgggacatcgaacttgccacggccgccatccgccgggagcttgaacaggcccaaacccgggaagcgaaccttcgggcggagatccgccagctgcagcaacaactagccgatgccaagaatggcttgctggcggcggcccgcatttccgaccagctggagatcgcccaggtcaccgttgcgtcgctcaaggaagaatgtaagtattggtcctagtagttcgttagcaatgcatgaggcgtgttttacttctctaatcttaacctaattaggtattttctgtaatgggcatgtagttccttgatactaatcgcacttcccgaaccaatcaatctaatagcgagctcgcttttatcagtt

SEQ ID NO: 1506 - DNA, 4011 bp, Aedes aegypti
atgtgtgaattcttagaagtgccccttgggaaaagaaacagcaaagccggtaattattcggaagtcccagaggccttagttctgaacacctgcgttcaaggttgttgcgtcaaaggggaaaactgcaccgctgccttcatgttcaatcggacgtgctatcacgtcaaatgctggaccagcgaactctgcataccggtcaaaaaggccaatctggccgccaagctgaaaatgatgctcgtcaatccggtgggcgatgatggccgaacgtggcccgaaatcctcgaaagcgcagttcctcaggaaacgaggatcaccgaaccggatttggaacggttcgatggaagcatcatgaacaagctgaaaaccatgtacaatctggaacgaaatcgggaagagctgtccgaaaggatatacgatatgccgctggacaagcaggtggagtatgagctgggaaagtatcccgcgtcttatatgtatggggacgatccgatgatggctgaatcgaagttctatccggaacataaatgtgtggtagggcttgatagttcctgcccagagcatgaaacctgcgttggttcgtcgaaaagcttcgaaggaatatgtgattgtatggaacattatacgcgaaatagcgagcagctctgtgtaagaatagaacaatcccgagcgtacgacatccctcaaacactaacagcacaaaaattgatcatgaacaacgttcacagtgaagctggagaaatagaagaggaaaatgcgaggccaccccctcccaaaaatttgaccgtctccgttgtttctaaggatatccgtctaccgaacaatgaagccgttttgacggcctttgtgataccggatgaagccaccagtcaggataaatatacgtactcctggtctttgatctcacagccttccaaaggggacagcaacgccacaattaccgatcaaaccaaatcccaggccaagctttccaaactcacagaaggcctctaccgattcaaagttaccgtcactggccagaaaggttacggtgaagcttatcccaacataactgtcctaccggagcagaaaattaataaaccaccagatgtcgtgatcacgcctatggagcaaaccgtcaagcttcccaaccacaaggccattctagatggaagcgcttcaacggatgacgacaaaattacctcttggcagtgggaactggtccagggtccacttggttaccaaccggaactgcctgccgtcagcacgctccagttgaacgatctggaaatgcccggaaagtacaccttcaagcttaccgtgatcgattcggaaaaactctccaacagcacaacagccaccatcgaagtccttaaggagatcgactacccgccggaagcgaacgccggccagaatgtaatcgtgtaccttcccaacaacaaagtcaccctgaacgggtcactcagcaaagacgatcacggcatcgtcgcctgggagtggaccaaagacagcaaagatcaatcgaaggcagtggatatgcaaaacactcggacaccgtacttgcagctgtccaacctggaagagggcgtgtatgtattcgagctcaaggtgacggacgccaacaatcagagcagcacttccactgtgcatgtgttcgtcaaaatgcctaccaatatgccaccggtggcaaacgctggcgctaactatacgctaaatctgccgcaaaactgggcgacactcaatggcagcgagtctaaggacgacctgcgcattaccagttggaactggcgccagataagtggacccaatacggcgacgatcctgaatgggaacaactcgattgccaacgccacatcgctgacgatcggtgattacctcttcgagctgaccgttacggacgaggcgaacaacaacgacaccagtcgggtgaagataacggtcgtccaggaacggaacactgccccggtggcgaacgccggcggtgatcagagcgtcactttgcccaccaatgtgatcgttttgaacggtacccgctcgaacgacgatctgggaatcgcaaactatagttggacacgggagtctggtagtctagccatcggaaccatcgttgacgagagcgaccggaagcccgttttgatcctcaccaacatcgtcccaggtcggtacgtgttcaaactaaccgttaccgatggccaaggattgtccggttccgacacggtgagcgttatcgtgcatccggatccgctggtcatgagtttggtggaactgacgctcaccatggaagcaaccgtgctgacccaatcggaactggactcgctacagcagaaactggtcctgctgattggagacaacaatgcccggttacatgttcgtgatttaaaaatcgagcacaaaaccggacaagtggtgatcgtattttacgtggagaaaaatgaaaaagacaaaccggaaatcatgcccgccctggaggtggagaaaatcctgaaggagaaattctggcgggattacacaatcctcggaacatcggttgccggcatccgaacgaccatctgccagaacgattgctccggacacggagtgtgcaatgccgaaacgcgagattgcatgtgccagagcttctggatgcccgatatcttcttcttctggggtgtggccgaagctaactgcgattggtccatcctgtacgtcattatcggtgtgttcatcgtgttcctagtgctgtccggcatctgctggggaattacgtgcctctgccggcggtcaagcaaaccacgcacaagaagcaaaactcaaaaatactccctgcttgggacgcaggacgatgaattaccatctttcactcgcaccggaacgacgatgtcggactcggaaactgattcggacgtcctgttcgagagccggtccaaacagaatggtatcccaccgggcagggtcaagctagccaacggagacgtccggaatggtcacgccaagtacaacacgacgcgcctcggtcgacgaattaaaacgtaaactagggctccagatgctgaggatggtagaaaagttttccggttttgtgagaaggtctacgaaaagtttgtatgagtgatcttcgttttgcttcttttgataagtataagggacgatcgatagcaaagaagtagaatactgaagaagataattttgcaaattgtagatagtgcacctgagctataagttgtaagtagtatttttgtttattgtagttgtgatatcattagttgtctaccttacaacatcattgtagatatgatgaaaagtgatcaagtccaactagagttgaacaaagtataatatatgtgattttggaagccatcgactaattttaatttatgttttgcaaatatttgtggcatttattgtggcaatgctttgagatttaacctaaaaccaccatcgctcgcatagcctgcgtaaaatgcatgattcaaatcacaccacttaaattaaattccttattacaacaaattaaacattcctactatgttagtcattaaattccattaattatgaataaagtttattttttgtaacaataattccaagactgcaagtgatgaacgaatggaagaaagtcgtttaccattgatcctttataaaataagtgccgcgagtgtgcagaagtttaaaacaagtttgtatttgtttgaaaagcatctacttctagtcacaaactaagtttgttatggaaaacagtcaaaaattttaaatacgaagcacatcaaaacatcctgtaagttgtcccacttaatacctccaaaaaataaaaaatatgtttgaatttgttacttttatgtcaccttaaactattgtgcatataatatccttgtttgttggtttgaataatacgatacctactgatcagatagaactaattcccggtttaccactatgtacttattttagagaggcgaaaagaagcctagatcgatggagttaaaaaaacctagtattattatacacctattgacacctaacaaattgaacgataataaaatattttaaaacgtgaca

SEQ ID NO: 1507 - DNA, 1986 bp, Aedes aegypti
atggagtgccgattttgcccgcgcagcggtggcgccgaagacgactacatttcactccacgaccaggccgactttgccaacggcacttccctggcggaagcgatattcgaactgtgctccgtgaccatagaaccggacaaccaaattggcccgcagcagatatgccgagagcggtgcctaccttgtctaagggacggtttcttgtttcgccaggaggtactccgagccgagaaccagtggcgggaaaatcgccaaatcagcctaaagatcgaaatcgacgacgacaacgtccgggaagatgtggaagaggagtacgaggctgagttcctggtttacgaggaatcggaagggggatttgtgctgccgccgggggacatgatccggacccgcttggagtataacaatttcgagtacattgagtttgatggggagaaatgctgtggctgtgggggattctttggaagtaaggaacttttggaagcccatgctgaggatatgcataggaatcgggaggagtcttctgggaaggagtggagatgttcgacgtgtgaaagtgagtttgaagatagaggggacttggagaagcacgaacagatgttcaagtcgaagcacattttctattgcaaactttgcttggaggggttctatgagaaagatgagttcttaactcatatggaagtgcatcaagaggagggagatgaggaggaaaagatcaccggagatcaaattgaactagtagaaccgccacccactgatggccaagatgtggaagtggactaccaaatggccgataacgaaatggaacgtaaaacccatggtcaacgtttttccccaaagcttccggaccaaagtttgattagctctgtggaggattatgaccagtatcagattgtccacgtggacaacgccgaaagatgctgcggatgtggaatctacttcgagtcctttgagctgctgatgaatcacgcccatttggagcatcaaagcaaactggagaatgctgaggaatttggaccgttttgtgagatctgccatgaaaggttcaaagccccgtgggctttgaatgcccacaagacccattgccgatacgttaaggaactgtactactgcaaactgtgtcaagtcgtctacgccaggaagttccatctggcgaagcactttgagaatacgcctggtcatacagttggcaccgcgattatggaaggatttgtgtccccatcaagtgctgagcaacgcgcgggaatttcctgctgcttcctgaagtgctctcaaatgttcgaatccgacaagcaactccagctccacgtggaagaactccatgccccacgcctccagctgaacaaatccgaaagatcaagcgaaaagcacgtctgcccagtctgccagcgatcctttgcatcccagcatttactcctgctccatcgcaaccgcgccaccaagaaaaagcacatgtgcagcttctgtgccgagtcgttcctcatcccgagcaagatgcgcgagcatgaacttctggtccattccggggaagtcccgaaccatcagtgcgacgtctgccaaaaatccttccgaaccaagtacctgctgaaagcccaccgcgagacgcacgatcaggaacgtaacttcccgtgcgaccagtgtccggccgccttccggctccgcttacaactaaggaaacacgtccgcggagtgcaccccacctgctttccctaccggtgcccgttttgcgagaaacagttctccaccaaaccgaagcatgatttgcacctgaggtcgcataccggtgaaaagccgtacccctgtcggtacgaatcctgcgggaagcagttctcccacgtgaccgaccggaagcgacacgaaatgggagtgcataccagcgagaggccgtaccagtgtgatcggtgtcccgcggcttacctgcggaagcgggagctagtggtgcaccagcagaggcatgggacggtggccaatgctgttgttgacagttga

SEQ ID NO: 1508 - DNA, 1696 bp, Aedes aegypti
atggctacggggctggtggacaagtcgttcgtcagcagcagcgacgagttgttctacctcaagtggaacaacttccagaagaatgtgagcacccagttcgagaaactccgggaggaggacgacctggtagacattacgtttgcctgcgagggcaaaaagctgaccgcccacaagctggtcctgttcgcgtgcagtccgttcttcaaggatctgctgaagaaaaatccgtctccgcatccggtgttcttcatgaacgatgtcaagtacgatgtgctgaaggcgattctggagtacatgtacctgggtgaggtgcacattaccaatgagaacttgaaggatttcatcaaaaccgcggaagggttgcagattcgcggattgagcaaggagaataacgctctatcaaatacgcagggtgacatcgtgatgcctcccgcaaaccaacagattcccatacgtaaggaggaaaaggaaaccacggtggtggaaagcgtcctgctggatgagttctgccgcaagcgcccggaaccgggggagatcacacacaccacggtcggattgaacatcaagcggatgaaaaccgtcgatacgcagattccgtcggttagcggccaggacaatgtctccaatgtagagcccaaagtggaaatggtcgaatatctggaaacggagagtaccaaccaccagtcgccgacctactgcagcatggacaactacacggaaaagagcaactcccggaacaacattgctcacatgagccagctgaacactgctggcttcactcagacccaaacgcagccgggaagctccggtcatcaacagcaaccgcagcaacagcaacagcatgtgcaacacgagtacaaatccgaagaggacagcagctggatggagaaatccctagacaacatctcagtcaactccgaacaacagtccgggggcaaattcaagggcaagtccggcggtggcaatcgctccaaccgttcgaccgacgacaagaccaactgcctaacgcctcgctgttgtcccgtttgctctcggttgtactccaacgtgtccaacctgcggcaacacatgcggttaatccacaacccaacggccgtctgctgtcccatctgccagaagcacttcaattcggaactctacctgaaacggcactactcgtcgatccattcgatcaacacgggcaaccaatccgacggagaaatggtggaccagaagccaacgacggcgcagctggccacccagcaagcgcaagcccaaactcctcaacagcaacagcaaaccacccagcaacaacagcaacagcaacagcagcagcaacaacagcaagcccagcagcaatcccaacaggctccagccccggccactacaaacacctggaatccatatcaccatcacgacacgacccagctggtgaaccccttcatcaaataatcactattagtcgcctctagtggtaagtcacatgtgcaggtacaagagcagcagcagcagcagcaatgtctttctcagctggtcacaatctgctcgttgggtcagctagctgtccgagacggtactccgctccggcagtgaatacgggatgcttgatttcgttttattgtaattataggcaatcggatgtctagagttgaacgtttttttgtataggacttttaagagtgattggtagacataatatagacggttagcaatggag

SEQ ID NO: 1509 - DNA, 1955 bp, Aedes aegypti
tttaccaacattttccaaaacacgtgcgtcgccgacatccatcgtgttgtacgtaaaatctcggagagtgttcaattttttgaattggtttagtgtagttctattatcgctattattcattgtccattgaaacaatggaaggtcccgaaggtaaaacaatagatacggttgacaaaacagaaaagataagtgcatgcgatggagtgggcaatgcgtctgaaaccgtgcatgtgggaaaggaaggagtatcagattcgatagaaccatctgggaaaaataaaactactattccagtagtcgaagcgcagaattctgctgtagaatctgaaaagccaacaacagtcgaagaatccacagtagcagaaatagtgcctagtggacaggataactcgccaaccgttgcaaccgaaatccgtagcaacttagccgaaatgaagactgtagaaaacgtcgagtcgtgcgaagaagcttcttctcttcaggatgagccggacacggaaatgaattcagtagaggagcgtggtgaacatctaaccgattccaatcaaattgatgacaataatccctcagttgacgccgaacagatcgtatccagcgaaaatgcaggatcagttgctcaaattatcaaggacgagccaacagatgcagagatggagtcagcagaggactttacaaggaaacaatcagatttccccacggttccgaggatcaacataaaacaagaagtgccaacttccatccacgaacaagtcgctgccgaaagggcactggagtcgaaggctgtgctgcagattaatagtagttcattgtctctactgagtcagtacatcagttcggattcggaatcgaacattaccgattcagatgaagaagaaacaagaaatggcactaacgctggcaacaaacggaaggtatcatcgagttcttcggaagacgaagttgaaattattcccaacactgagaactaccgcacacatgatgttcccatcattgtgagcgacacagaaacgacagccaccggaatggatgagtcgtcagaggatgaactgtctgctgatgaagaagaagttgctcaacaaaaacgtccgccaattaaaagcaaaggagaagtccttataaacgaattgcccccaattgaggatctgcaaatctcggtaccagagagggaatgcaaaccgataggtcacgtcgaatctatcgtagcccagatcgtcattgtgcagtcctacgctggagtagagctgttggaccttgaaacggtcctcttcctggagaaaggcaaacgagcattgggaaagattttcgacgttatcggtcaagttacggctcccatgtactgcgtcttgttcaacaatcggaacgatgtcatccgcaagggaatatccgttgggatgccggtatactgtgctccacaaactgagcacacatcgtttatcatattatccgatctgatgaaacacaggggatcggatgccagctggctggacgataacgaagccccggatcacgtgctggactattccgatgacgaacaggagcgaagggcacgacggcgacgaggcagttgttcttcgagtggacgagtctctcccgaaatgcagtatcagccttaccaacttcctacgcatcaccacaggcgaggacatggtcgacggggtgggggtggtgcctatcgtagtcgaggaaggggtcatagctggcacaacaatattccacaccagccggcagcgcagccacaaagggtgctgaatccgtttgcgtttgttgcaggggtgcctccaccgccaccgcctccgcctccggcaccaccaggaagtggtaattgaatgcatttcatcaatcctgaagagaacttacgagaatgaagtgttttagtgttatgtttctatttctaggatttgttttatgaattttatggaatcgaataaacaaagaggtttatgaattcttgaact

SEQ ID NO: 1510 - DNA, 1820 bp, Aedes aegypti
ctgcaatcaaacaactttcatctatgtaacagtttcatgacacgtctgctcagatatcccttcacttgttctgcacttctacaagcaccgccctttccgccttccctggccaggacagcggcctcgcagcagggcggtagcttcaagcgtatgtcccgtgcgaattccctgcaacagcagtccagcagcccggaatcgtcggccgggggcagtccggtgaacaggatttttcaacgctacgctcgccaaaagaagatgtccgaaacgtgccgcaagtggaaaacgcttccctcggcggtacgtcgcgatccggacgatgttcaattcaccctgatgagctacaacatgttggctcaggacctgctggaaatgcacgaggatctgtacgatcagcacgaccaggtcacgctttcctggcctcatcgttacgaccggctgctggccgaaattaatcttgtccggccggatattctgtgtctgcaggaaatgcaggacaaccacaaggaccagttcagcagtggattggccaactttcggtacgagatgattttcaagaagcggactggagagaagaccgatgggtgcgcgatttactaccgccgggacatgttcgagttggtggactatcatgatgtcgagtactatcagccgagtgtgaagcgcttggaccgtgaaaatgtggccattattgcgaaattcagggtgaaatccaacccaagccagtgtttggtagtggccacaacacatcttctgtataatccacggcggcaggatatccgattggcccaagtacaggtcctactggccgagttggaccgtttggcgtttctcagtcggatggagaatggcacacccagatatgcacccactattctgtgtggagatttcaaccttcagccttacactgctccgtatgtgcttttgacgacgggatttttacagtatgaaaacctttccaccaacacgctggaaccgattcccggaggctcgtcctttggaaaggtgttactcccgaaaaagctaggaatcaccgatgactgtcgtcacgaaactcacctggatcgaatggaggaagaagaggagaaatccactcgattacatcattccagcaaggaaccaaaagcccggaccccaagcccagacgaggagcagaacagcccatacttcaaccagggtgctctgaagcatcggtttaaattcacatccgcctacagacacaacattggagacgaaactcaggaagctaccaccttccaagggcaatggatcacggtggactatctgttctacactaagtttcagtgtacgaacgagaaccggctcaccgagaacaacctcaagctgattgccacgtacgctctgcccacggtgaagcaagcccgggaaatctacacgattcccaacatgtacttcggctcggatcactttgccctggccggacggttcctgctcaaagctcacaaggaaccgagcctgtagccttttggtgcggcagaattggtgctttatggaagacaatgttctgtgaaatcggtatgttttgactttgttataagaacacgtgttttattttttatcaaatcggaaatcaggaaatacgttagtttttgcgtgatgaccctccttaaagaatatgaagatttagtatgtatccgctattgtttttctatcttagaattaccagacgtatcgtatctagtgtgacagttccgttcttacgactttggtggaatgttcatttgattaaaatgttttaaaacttcatctccaacatcttcctaacaatcttcatgatgaaaatagagttctgtcaaatgttc

SEQ ID NO: 1511 - DNA, 2246 bp, Aedes aegypti
ttctgggaaatcatctccgaggagcatggaatcgacgcaaccggcatttaccatggcgaatcagatctgcaactagaacgtgtcagcgtgtattacaatgaagcctccgcagtctcccgttcgtcgggtggcaagtacgtgccacgagcaatcctgctcgatctggaaccgggtaccatggaagccgtccgctccggagcatacggcaagctgttccgtccggataacttcgttttcggccagtccggtgcaggcaacaactgggccaagggacactacaccgagggtgccgagctggtggacgccgtgttggatgtggtgcgcaaagaatgcgaaaactgtgactgtttgcagggatttcaactgactcactcgctgggaggtggtaccggatccggtatgggaacactgctgatctccaagatccgtgaagaatatccagacagaatcatgaacacatactcggtggtcccatcgccaaaggtgtctgacacggtcgtggagccatacaatgctactctgtctattcaccagttggtcgagaacaccgacgagacctactgcattgataatgaagctctgtacgacatctgcttcagaactctgaaggtgccaaacccaagctacggcgatctgaaccatctcgtttccctgactatgtccggagttaccacctgccttcgtttcccaggtcagttgaacgctgatctgagaaagttggccgtcaacatggtgccgttcccacgtctgcacttcttcatgcctggatttgctccactgacctcccgtgggtcgcaacagtacagggctcttaccgttccagagctcactcaacagatgttcgatgccaagaatatgatggctgcttgcgatccacggcatggacgatatctgaccgtggctgccgttttccgaggacgtatgtctatgaaggaggtcgacgaacagatgctggccgttcagaacaaaaacagcagctacttcgtggaatggatcccgaacaacgtcaagaccgccgtctgtgatattcctccaaagggtctgaaaatgtcttcgaccttcattggaaacaccactgccatccaggagctgttcaagcgtatttccgaacaattctccgctatgttccgtcgcaaggctttcttgcattggtacaccggtgagggcatggacgaaatggaattcactgaggctgagagcaatatgaacgatttagtgtctgagtatcaacagtatcaggaggcgacggctgacgatgagtttgaacaagaagagtgcgctgacgaaatggaaggcgaatgcgtctaaaacaaccgccccagaggcatccatcggttgtcgagaagcattttttactatttattacttttagttagataaatcgagccgatttttatgtgtatacaaaccgaagaaatagtctttatggaaattctaacagttcatctaatctcggatctcaagcatatttactaatggacagttcagatcaggaactaggaattctaaaatcccccaataataatttccgttcaaatcaaaatccattcaagcacataagaatcatcaatcaaactaataatgtgtaagtaagagagcgagagtgtgagctagtgttgaatttgtaagtggagacttagccctttctcaccaaacggccatatactgtagcgaaactcgatcatgaaagtctacattcaggcagtatttctagggaaaagaaataacttgcgttactgaggagttacgactttcatatcatactggctgaggcggtgagttgggtcactccaaacggtagagttacgaaggagagtgaaaaacagatgaagctgccaatcgaacgtagtttgtggaccaatttgcttcttgctatacgactcacgtgcatcatacacttagcaatatatccaaagatttttgagaaatgaaggttcggttaaaaaaagttgagtgtcagccagtcttttgtatttataattcgttctctttaagcaagaacaatcactatgaatatcgtcgttctaaaatctttgattcatcgctatttgatatttattattttgaatgtttagaatcaataccgaaaacaatttaaaacttcaaaatacaggaattgtcagttttattttgagctaaattttaatgaggatacagatcaactatctactatatcaactacacgcgtacatcgacgacaatctgggacaattgaaaagtgttagtgcggtaaaataaaacatatt

SEQ ID NO: 1512 - DNA, 2013 bp, Aedes aegypti
cgtaaaatggcttataaacagcagacactgaaaaaaacggctgagaataagggttactaaacgcaccgctgatggtttgtaactggtgtccatacatttgtggacccctcgcaatcaatgttttcattctttcgatttttgtttttatcgcgctatgtttataagacggcggcggacaggttttccatggatttgcaatttgccgataataatagtaaaaaatcaaatttcgtgttctaaacttacgaatagtatggaatgtgccagcttgggaggcgtctgccgatgttgtctcacaagttccggtgatttttcatcaatttacaaaatatacaacgattactacctaccgaaagtgatccacgcctgcactggattgaccattcaccaatcggacgggcttccggaagtgctatgcgatgcgtgtctctcaaagctggtcgtatcctacgagactcgtcgtctatttctccgctcgaactgccaactgaaagaacagctgaatcgacttaagctgcctgaggagcagattctaggggaacttaatggcactgaagttaaatacgaggagaccacgactctggcggaggacagtgggatcattctggatagcggaccaatcacgacatgggacaatgagattaatatgcacatcgagcagctgcaggacggtagcagtgaactggccattaatgttgaggaggattccctggatgagctagtgattgagaagtgcgagaatctggagaaaggtggctttagttttccgcttgtggaaccacttgataagggtttggaggatggtagtatttctatcgcgaacgaaaggactgaagatgacctttatgaaatagaagatttttcaccgtattccgatagcagtgaaagttatccagagcgaatcaattctggccaagttaaggatgaaaaagaagaatcacaggattgctcaatctgtgggaaaactttcaagagtgcacggctactgcagcgacatattcgataccacaataatggtaaaacagattgtcccatttgctcgagaagtttcacccacaccagtaatctaaaaaggcacctcaactcccacaaacctccagaggaagggtttccctgttccaaatgctcaggaaggtttgagaaaggacaccaactatacaaccatctcaaagttcacaaatcacccaaaaattcagactcctatcgcatgcaatgtgaacaatgtgaaatggaaaccacttccttggctggtttcgtatatcacatgtccactgaacacaatatcccaaaggatcaggtgaaggcattccgctgccatctctgtccgatacgattcgtttccaagcagggcatgttcagacacatccaaggcatccatcagaatcagaaacccgctcaaaatccctcgagaagattcctctgtaccgaatgtggtaaatccttccgtcggatgaagcatctggaggcgcacagcaactcccacgccggcatccggccgtaccggtgcgaagaatgtggcctggcgtttgcgcagaaatccggcctcaacatccatttccgggtgaagcaccaacaccagaaggttcacgcctgcaagatttgtcggaagtcctttgctcaatccactcatctaaaagaccacgagttgattcacaccgaccggaaggagcacgaatgtccggtttgcaagcaccggtttcacgtgaagagcaacttgatggcacacatgaaaacgcaccggaggcatccctactgctgtcgggattgtgggaaggagtttacgcaaagtgtgcggctagagcagcacatggcgaccgaacacgagaagaagtagctcctgagccatcaggtgagtcagcccaaagaataccaaagatttttaggattaagaatggtaatacaaacttgaatggatggaaatcgggggttatttcgaaagaaatccaggtctagaagagaggctaacaatggctcctaaattttgctttatgataaggttgattccactatcag

SEQ ID NO: 1513 - DNA, 1258 bp, Aedes aegypti
gatagaaaaccataattgcttacaggatgttttaagtagaatattcttcaattcataactattttacggtaaatattgtggtaactacacaaaagatgtttattctgatagtgttttctgtgcttatttgtacgtttcaaacctgtttctccgaaattggatgtcgcgatgagaacaaccagttagtggattggtactatctatataaattgccagaagcagctgcagatcagcattcgccgaaggacgtaacatcaggattacattacgcgtttattacatcgcacggtcctaatggttggcgagtgtccgagaaaaatgtgaaccaaagcgagagcattcctggaagaactttgaagcccttgctgaatggtgacgaagatttgttgaaaattctttacaacgatgaacctccgagaggcgaaacggacggttccagggggcacaccaaaggagtcgttgctaccgatggtagcactggattttggttgattcattcagttccaaaatttccaccgatgttgaatgagtcgtatcattatcctgatacaggtaaaatctacggccaaagctttctatgcgtgagtgtacgagcagaccagatggaaaccattggacaacagttgatcatgaacgaaccgcacgtttattcgttccatgttccggaagctttgaaggaacgattccccaaattagtccaggcaacggaaatgaaaccaatcaagaagccgccatactggagtgcagtcaatttgaaatccgttggtggaataaacttccattccttcgccaaaagtcgtcagttcaagaaagagctgtactcggactttatagcgccatcgttgcaagtagatttgctggtcgaaacttggcagcatggggccggaaatctgccaagcgactgtacgacctcacagtggaaggtgatgaatgtgaagggagtcaaggtgaccgaaaagtatcaatttaccaccctgaaggatcactcgaagtgggcggtttcagtgccaggagaccgagacttcatctgtgttggggacatcaatcgacaggagcatcagaaagcacgaggtggcggaagtgtctgcagtcagatagatgggattgtccaaacctatcgcgtgatggtggagaacattgaaagttgtccgaagaaatgaataattgaatcaaattatagataccaggtgaactaaaaatttgtatgatctcattttgaaattaaattttgaattataataaaatacttttacatttt

SEQ ID NO: 1514 - DNA, 2358 bp, Aedes aegypti
cccgataagcctcatcccgactcaatggtagcactgctaccattccggtttccttgtgatagtgtagcatattataacagcagctgcatgcaatacagattagaaagcaaaaacgcgcattcttcgtgttttgtttaaccgggtctgccttgcctgctaggtatagccatatctccccttctatcactttcgtttacgtcgtcattcaagccggttcttgtgtgtcgaagatttgaccaatttcaattacttacaaaattcagctcagggaatttacgtttttgttgctgtccgccttttgtaaaggaaagaatgagttccaccattgaatcttcgtccacccgcagtgccatctaccgggtcaaccagagcagaacattctacgagtttgtgctggagcagaagaatgctttggcgtcctcggtcgagagcatttcggtggacgatgccacgaaccagattgagttggcgctaagctttatgaagcactacatggagcaggacagcgatggcttgacggatcaaccggagtgcaaacatcgggtgatcctggacactcgtaagtcgatgtttgaaatcttgctggatctgcactcgtcgatgcgtgccacgtgcgttggattcaacgtgtacttcaccggaggtgaccccaggaaggattcgttcgttgcaaagctgctggagtttcccaactttgaaaatggagctgatgctttggacattccagagattaatttcgaggtgtctttctgcacgatgatcgtctttgattccagtgatcttgaatcagccacagatgtgcttgcgaaggcatgggagaactgttcagtgccatgggagatccgtagcttgttggtgcaagaaacagtacaggagaagttcatccagttgctcgaaagcaagctcaaaccattcccaacaagtcacattccactgcaggataaattacagagtgccattgacaaagctacctcaactggtcttagagtgattcgtcctgaaggagttaaggactcgacggcgcccgctgtagtctatggttcgagtgtggacttcttccttccagctcatgctctggaacccagtccggtcgtagtgatgaacgtgttcagaaccccaaaggaagcaatcagtttggttaacaaaagcaacggtggatcggtgtccctttggactgagcagttgtgtctggccatggaaactgcctatgctgtggaagcacagaccgtttgggtcaatacgtacgctcgtttcaacccagcattcccgtattcgttccgttgtaatggttactgctatgggtctgaatacgcggtgtacgagaagaaggtcaaagcggtattcattccgtcggcggaaaatcccaagaactccgcggagaagaacaaggcggccatcagtgccctgggggtggtgtccaacgaggtgaaaaaccatcgatttgcatttgtccgtaatgagaaaaatgtccattatgaagttatcagtactccgtacaatatcgagaattacaatccagatcacgctatgcaaattgttgagggtttttgggacaaatacgtatcgattgattttaatgataggaatctagttctggatactgtccataatcaacgtaaaactgttgtcattccatatggtgtaagctttgctaattaaatgttgatgattgtttgtgaaataaatatatgtaccttacaactgaagttattattttgattttttgaagaagcactttatccatttctttcactgacaatgttgctttccgttttttaagcgcatatcaacttatctttcctggttcagtatgctatacagtgtgtactgacactacctactattattttggggccttcctttctagtggtaaagtccgcggttataaagcaaaaccatgctgaagaagttttggttcgattcctggacgttccaggattttttgtaacagaaacttcattgacttccctgggcataacgtaacgttgtggctgccacatataatacgaatatgtaaatgacaacttgaaaagctctcagttattaacctgagaaaaagggcctgttccagaggagacgtaaggccatgaagaagaagaaccactagtagcattttcagattttagatggatgcaaacaagaattccaaaatctctttgctagttgtccaattcaattgcttcctaaacataccagttgagaaataaaaaacctgtcaaattttaggatgaatgtgaaagtgttagatgcacaatggataagctaccctactatatagcatatcataagtaagtatgtaaccatggatccttgatgtattgctggtttcaccccaaattggaccgtcacaaaagtgtg

SEQ ID NO: 1515 - DNA, 1641 bp, Aedes aegypti
atgcatcatccgaggaacatcttcacctactacgatccatcgaagaaaatttggagcggtttgccgaggaagccgatcttcaatcccgtacaaagcctcggagatcttatcttgcaaattctggagcgcaatgcaaataaagtgatgcagatcagtgccgatagtggggcggaggtcaccggtggtgagctgcgtctccgaacgatccgaattgcccagcatcttactcggatgggatacggttttgattcgaaggacatttttacgatgatcgttagaaatggggagcacaccgcatcagtgatgtttgcttgtttcgctctgggggtacccgtcaatacgctggatccttcgtttcaacgggatgatctgagtcacatgttccaagcggttcgaccgaaagtgatcttctgtgagactgagtcgttggaggaaacgatcgctgcatgtgaactggctgcaattaccccgcgcatcattctcatgggaagtcatgtagaggggtatgatcaagtggatcgtctaatgatggtaacgggacaagaggaactttttgttccaactacgattgcagatcccgtcaagcacctggcggtactcatatgctcctctggaacaacgggtcgctcgaaagccgtttgcctgtcgcactcgatctgcatcgctcacgtggccaacttcttcgaatgccatcccagcgatcgagctttcgccttcagttccctgtattggctgtccggattggttattctgctgtgcggtacgatccttggtgccactaggatcatcacccgccagacgtatcgaccggagttggcgctggacttgatcaggaaattcagagtctcggccctctgcataactccttcccaggcgtacggaatagtccacagtgggttggcaaaaccggaggacttcaccagcattcgtcacgccttctgcggtggaagtgccgtttcgacatcgctaaagcgatcctttgaacaactgctccccggacggttcctggaagttgcctacgggttctcggagattgcctactcggtatcgttcagcaagggggatctctaccgagatggatcagtagggtatcctcgagccggtacggagttcaagattatcgacgacaacggaaatgccctggataacggccaagacggggagattgttgccagaggcgagtttgcgttccagggttattacggaatggatcaacctttcggggacatgttggacagtgatggatggcttcactcgggagacgtagggcgattcgatgcggatggttacctttacgtggtggaccggaagaaggaaatgttcaaatacaacaactttcaaatatcgccgacggagatcgaatgcgtggtacaggaaatggaaggagtggccgcggtgtgcgtggtcggaattccaggggagccgaatgacttggcaacagcactggtggtcaggaaaaacgattgcgccgaagtgatggatgcagagcaaattgttagaaaagtgaatctccagttacccgattataagcatcttagaggaggcgtgtattttgccaaggagctccctttgactccatcaggaaaagtgttacgtcgaaaggtgcgggaaatgattatgaacttgatggacaataaatga

SEQ ID NO: 1516 - DNA, 683 bp, Aedes aegypti
ttttctcgtctgccgagtcgtgtgcatcgttctttccgctttttttcctaattttcctcagtgtgtctttgtttaatggattttttttgaaataattaacaaactgtgaaaaattgctctgattgacaaaactagtgttgagagtttttcaaattggtcctttgagtgttgaatacttgttgatttgagtaccgtgtaaaatgacgaccggtagtactgttaatgcggatgacgtcaacgccacttccgtcagtcgtgtccagccgggacgcataaggttgaccctgtgggatcctctgcttgatgaccatgtggttggccaaatcgcacagctggtcggtgtagtaaaaaatttctatcgaccgcagcacaacccccagtgggtttttgttcagtatgaagatgcgagtgttgccgagcaagccatagccatgatgaaaaacctaccaatattcaaagccgttgatccggccataaaatccgaaagatttgtgaaggagaaatccgatgtcggcggcagcaacatgaacaacaattacaacgacgatcaacagcagagaaattccagcatgaacaaccaaatgaacaagggtagcggcaatcggcagcaaaggggaggtaacaattccaataacaacaaaagtaacaagaacaacaataacagcatgaatggcggaggaagt

SEQ ID NO: 1517 - DNA, 2176 bp, Aedes aegypti
atgcctagctatgagtgccgctgcggtgccttctactgcgatgtggaatgccaacgtgctgactggcccgtccacaaggacatctgcatgcctcgactgaacaaccgtcaacgcggtcagaccaagggcaatcaaagcccgccggatcaacagcagaaacaaagccacaagcaggaaagccctcggccatctgcaccggcaccgaagcaacggcaaatgtctcctaagagttcaccggaagaaaacagcccaaccgagaaggtcagtcgccttggaactaagctgcagcggctgaagattgcaaagtctggttccggtgcggtgagcagaggcatcctccaggctggaccgttccctcgggaaggtgcaatggtcaagattaccgcctcgttgccctccggggtgatatacatctatcacaacaacggcaaagatggccagcagagtgattactacctgttgacgaatcgtatgtacaaggcggccaatgaagcgggaccgctgaaggaggttccctcggtggatgacgtcatctttgctcccttcctcggcggatactaccgggccaaagttctggcggtgaacggcgagaagttgcaggtgttctacgtcgactttggcaacatcgataaggtcgagtggaaggaatcgagggaaattgccgacgagggcctgaagtgggccaagtatttgacctatccggtgatgttggaaggcgtggagacattcagcggagagatgctcaagctgctggaaacgttggaacatgtggaagaattcgagatggtaaaagcgaattccatgtcgaactcagagatgaagtcggtggttttaaagcgcctgaagaaatcgctaacgcttaacatggagttgatggaagtgcaggaacgggtgcttcgggagagacaggagcgtgagcgagagcgactggaaaaggaaaagaaagccaagcaggaacaacctacgctgccggcggatgtggatgtggagattgccgatccgagcaactataaaccggtgctgttcgatgaatcaatggaaaccagtcaactaacgtgtggcacaaccaagaagctgcttataatcgatgccagtgaagtgctggagacacgcataatttcggtggtggctgctgagaatgcgcggaagtacacggccatcctggagcattgtagctttgccggggcgaaggactctaacgtctacaaaccggtcgaggagggtgaagtttgcctggtcttccaccaggatgattggtcccgggcgttgtacgacatctccgacggtagctatatgctgttggacgtgggcatcattaccagcgttccggcggctaacgttcggcgattcccgccgcagttgagccacatggtgtacaacaatgagtgttcgtcgaaaatctccccaagctgaaggcgatgatgacggacggcaaaccggactccattcacggagcgttgatcgaggccaagattgccgcttcggatgacggaatttccatttctctcgtggatgcctagagcacacgctacttctgctaaacgaaacgcaacaccattgaggtaaaactgcgtctcctaggttgtaaggattttaacatagtttaccggatgcttcgtgaactgcgaaacgtaccatcccaaagttttaatttttcggagcttagaagtgtctacagttgtacaatttttaaatctatacttgatttcgcttacgttcttgtctgtctatcgaacaatttttatttgctattccgtaaacgttttgattctatattcccgattcaattgtgtgggtttatgaaaaagtgtctacgcgattctcagcgcaaacgttttccgtcgtctttccagtttagttagttttaaaacaaatcggttaaaaacacttttattctgttacttgctacattttagtttatcgatcgagttcaagatggacgcatagtttttgatgaaaaaagttttcccggaaaacgccatgaaacatgcaagaatattgtcctccgatctgccaaagtcgagtttctgaaataaattgtgtataacaaggcgatggtttatgacgtcgttgtacggtgaatgttgttagtagtcatcatattcagaacaaacaaacaattccgttgtgctttcttgaacatctttcagtgtcgaagatggatgtttaacaatta

SEQ ID NO: 1518 - DNA, 831 bp, Aedes aegypti
gaaatattgtaggaagaaaatgtcgttctcgtcgaacgatacgatgaggccgctggccatgcagcggtcccaatcgttgccgcagcttcactccagggaagactccggggtgggattgagtgggagtggttcctgcagtgggatcaacaacatggcgtacgaatcatcgggatctcaccggtcccataagcaccatcggcactaccggaatggcaatgagctgaagattccctacggtgcccgtctggtggccgatctgagacagctgatgactctgcggcagcattactacccggaaggaggctggggatggctactgacggtgatcggttttacgattcactgcatctgccatgggctgcatctgtcggcgggggtgttcatgatggagatggccagcatatttcgacaacgaccaacggcagcaggtaataccagtttacaacttctcataaccgggtaaatgtaagttgaaaaaatatcaatatgatgattttgctaaaaagaggtaggtattaagaaaaggtgttgaatgttttcatgttgaatgtttcgtttacatactaatgattacagagtttaagaaacagacgatgcttcgaaattcatgacgtttcgacattttttttttaattcgaacactaggatggatcatattaatatgcttaactaatcttttttttttgtaacaagatgcaaaaaacttgtaatgggattgctttgcgagaactttttattatgagagatttgatatgcaatcaatcaaaatatttaatttaaattttgaattatcgctatatttgtataaaatatagtttttagaagatggta

SEQ ID NO: 1519 - DNA, 2310 bp, Aedes aegypti
atgcgaattctgttccataacgaaaactatgccaactacgaagactcaggtgtggccacaagtgccgatgcccattctctggtattcgacgaaccgaacacaccgccacctcccggccaaggaaaatgtccatcgactggggggccaattgtgctggcagctgccacggccatcggtcccatcactgcgaccgcaaatggaaccgtcactggatcgatgccaacccagccttcctccggtacaggtccaattccttcaaccgggggtactcaaagggcgtcgagccgtatgtccaacactagcaccagtacgatcaagcaacattactacccggagggtggatggggctggatcgtaattgtggtgggcattatggttcacacgttaacccacgggcttcagacgtcggtgggggtgctgatgatcgaaacccgacggcggtttttcattgggaatatcgttgatacaggttggcttggagccctctcgacggcggtggccctcttcatctcgcccatcacgatagcggtgtgcaaacggaagtccactcgactgacggcggttattggagggctggtgaccgctttggggtgcctcttcacctcattcgcctcgcagtttcatcaacttttctttagttatggtgccgttgttggggttggagtcggtatgacacgggactgctcaacgctgatggtggcccagtattttaaaaggcgacgggaattcgtggagatattcatcgtatccggaagtggactgggaatcgccgttatgtcgacgttcatcaaatcggcaatcgacgccatcgggtggcgtttgggactgcaggctgttacggggactgtgttcataacgttcatactcggaacgtgctatcgaagtgcatccttgtaccatcctcagaggagagcaatcctacatcttaagaaccagaagcgaaaaattaaggataagaataaacacgacgatcgaccaccgtttttcgatttcagcacgctgcgcagcaaaaccgtaaggatacttctggtatcgacgggaataagtgcatttggaatcaatacgccgatcttttacctggctcaccaagtggagcaggacggaatcagcgacaaagtgatgatactccaggcgtacctagggttggcctggacactgggctgcgcagcgtttggaatgctagtcgttagaaatagtgtcgaatgtcgcatagcgcgacagtacttgtgccaaaccgccaccttcatgtgtgggctgtgtatcctagctttgacggcggtacatggcaactaccacggatatgtgatgtttgtgtggatttatggcattttctgcggaggatatcactattctttgaaaatgtacacctacgagaaggtacgagcgaggaactttgcccgagcatggggtttcgtgcaattttctcaagcgatacccattgctctgggtgtacctctgtctggctacatgaatgtcgggggatcaggaaaggccggctactacttcagctcggcatgtgccctgatcggaagcttgatgatgttcctcattgatctgcaccgaagaaacgtctctagacataagcacacccgggccaatggcactcgacagctgtgcgtatcggaaacgtgtccccagcgacggaaactctcattttcacaagaaccagacaatgaaccaggcatcatcactggcaacacagcaatgatgataggtccggagctgttgataccgcagctgagcgacggtattgccgaaccggttaacggtctggacaaacctgaactgacctgtatctccgaggaaggtatcgccgacatggacctcccggataaccttttggatgatctagactacgtaggggattgtattacatcgtgtaataaggttgaaaactacttaatgctaagcgaatttgaaaacaatctaagtgccgaagttcctattctgctggacaagcgaggccggaagctatcgctgtccaaaactaaagctctgctcgccagtcaacttaacttccaacaccatcccgattgtgccatggaacagcagggcaacattacacttggacctatttcgccaatcatcgaacacgacgattcctcggatagggatcaacaaagccatcaccatcatcatcagaaccaacaatccgacatgggcggccatggaaaaccgtcggtcaagaatgataatcacagtaacggtggaaaacactgccgactaagtcataaatggcgcccaacacagcaaaccggtacgtttcttagcaaccgagttatatctgtgatcgacgaagcatccgtgtag

SEQ ID NO: 1520 - DNA, 1988 bp, Aedes aegypti
ctaccgttgggtccggtcataacacaaagtaacttgtttccgacccaattttctatctcacttttttcactttctgatacttatacgatttttattaccatgaattaatgtagcacgtcatactgacttcaaattttaaactagtcggggataaatgaaaaaaaaatgccattttagttttgatttttcatacttgttttattttttctttttccttaacaataaacaagatttttaacccaaggctagttcatctcttggtcccgagattaaaagattgggttaaaaatctcgtttattattaagaaaacttcccttccgaagtaagtcgtcattataactcttacgccatattgataggagagaaactaatcaaggaaattatttcccgtcgtatatgatttattgaaaaatacgatttcaaaaccaaaaaacagttttattctatttcaatttattgtttccatcatgcagttcagtgtataagattgaagtatctatttaatttaatttaaaaaataacttgcatatactcaattgagcattcattatgtatacgacacatttgcgtataacgataagttaaaaataggtacacataacaaagtccatactcgttatcattttcctttatgcaagcaacagttttgtcagtctcacaccttgctacactgaaaggctatggtttcatcattattcccattttttataagttattaatgattcaggaacatattttaggaacacaatgaagtatttagggtggcaaaaataaatatttattaggtgatatttagcttttgtttgtgaataaattggcacaatcaagtcatttattaacacatacgaagatagccatcggaacatgttactgctaggtttttcaataatgatgcgatctggactggttagcactcggcgttactgcagttcctcagcgatcgctgccaagaagtggatttacgcaaaagtattcaaaggagaaccaacgcagcacaactttcaattggaggtggacaaattgccggctttgaaagatggagatatccttgcgcaggccgagtacatcagtgtcgatccgtacatgcgaccctatatgatggcttacccagccggatcgctcatgattggtggtcaagtgggaaaggtgatcgacagcaagaacgcttccttccccgtgggatcttcaatattcggccaatttggttggcgtacgcacaccgtctgcaatccagaaacgatgaagaaagatcaaccttacctactgcctagtttcggaaatttgcctaccagtttggctcttggcgtgctgggaatgccgggcaatacggcctattttggattgctggaattgtgctcgccaaagaagggagaaactgtggttgtaagtggtgcagcaggagctgtaggtaaccacgttggtcaaattgctaagaatctaggatgcagagtagttggaatcgccggatccgatgccaaatgccagtggttgaaggacctaggattcgatgaagctatcaattataagacagctaacatatttgctgaattgaagaaggctgccccaaaaggggtagacgtctattttgacaatgtaggcggtcaaatatccgaaacggttatcaaacaaatgaatttatatggaaggattgcagtttgtggaaccatatccaattataacactgcaatcgaaaaggtttcggacccattgagacagatggtctttaagcaactgaaaatggaaggattcgtggtatggcgctggaacgataggtggatggaaggaattgaggccaacttgaagtggataaacgagggtaaactgaaatggcacgaaaccgtaacggaaggcttcgaaaatttaccaatggcatttattgacatgttgaagggaggcaacactggtaaggcggttgtgaaaattatttaacttttttttttgaatgttatattctaaataaaccttcaaaatatattaataagcgact

SEQ ID NO: 1521 - DNA, 1302 bp, Aedes aegypti
atggatgaggaatgctaccctgccatcagtatgagcacagcacagaacaaacaacacatcattcacaggaatcagacgaatcccgcgctgatttcgacagcaggaagcaccgtcctctcagctttcagcggtcagaacattcctgccttcaaaagtatctctagcggaagcttaagtctgctcagtgcactgcaccaacagcagcagcatcagtcgaacagcagccaaacttctcacccgcagctagtgctaggtcatccgatcagcttgaacaacaaccacctcaccctcaacaacaacctcaccaaggatagtctccttctgagtgcagggatcagcagcaaacgaagctcatccgatatcgaaatcgatgagctcaccgtcaaagaggaacccatgtccccaagctcgagttgtcctccctcaccagccggacctggagcgggcggaacagcgttatccgacttggtgttggagcacaaggtagtatcaatctcaaggtaccccaaatccaccaaacttaccaaatactctccactccagaatggaaccctccagctcacacccgcctcgcaaagtattctgaagagtcagcagatcgtcatcaatggcaatgccatctgtacgacagccagcactccgtccacacccgccgcgacttccaagatttcgtccgcttcgttcggtctacctcccacgcctccctcgtcgctaccgagtgacgaatccgagggcaaccaaagtccggagcatcacacgtcgcccatcgaaccagaatgctaccaccaggcagccgattcacacgccgctgatcagcagtcaaccggtaagatattgatgaatcctttgagctttcaacggcttcaaaatgctagactaacatgtaaaaaagcactaatgcaaatcaaagtctttacgtccattccaaatgtttccgaatcctatgtcctagcctttgtcaaaggatccacgggcacgctaatcctgacagaggaagaaaagcgaactctcgttgccgaaggctaccccatcccaacccggctgccgctcaccaaagccgaggaaaaatccctcaagaaaatccgacggaagatcaagaacaagatctccgcccaggaaagccgaaggaaaaagaaagaatacatggaccagctcgagcgccgcgtcgaaattctggtgtcggaaaatctcgactaccggaagagggtggagtcgctggaggactccaatcagaatcttatgaccgaactggccaaactgcgcgccctcgtcagtcggcagcaaaacgtccggaagatgtaa

SEQ ID NO: 1522 - DNA, 1729 bp, Aedes aegypti
cgcgcggtcggtcggtctttttgcggttcgcaatttttatcacaacacgtccgggaaaacggaaaatcctgaccgctttacggtgcaatttcccactcagtgccgcggacaaacatgcaggaacttacggaacgcatcctccagtacatcgaccagcacggcgatgtggacacgctggatttggtgccggtattgggagaggaccaccagaagattgtcggcggtgtgaagagtatcgaatcgactgcagccgacatgatcaagactacacaggccacccggaaaacctgggaactgaccgaagagggcaagcaaatattggccaatggaagtcacgaagctgtgctgtttaacgccgttccggaagcgggaatcccacaggcagaactgatgaaaacttcgcctaacgccaaggtgggatttagcaaggccatgtccaacggttggattttgatggacaagtcaggaggagcgccactgatcaaaaagaaggtggacaaaattgaagatgttgttaaggggcatgtcaaagctgttgcggaaggtagggataaggatattccggataacatcaagaatgagtacaagaagcggaaaattttaaccgagactgtcaccaagagctttgtgctttcgaaaggcccggaattctcgactagtttgaagaagctggaaaccgatttaacggtggagatgttggccagcggtatctggaaggatctcaagttcaagccgtacaatttcgatgccctgggcgtgcctccggagcgtggacaactgcatcccctgatgaaggttcgttccgaattccgatcgattttcctggagatgggattctccgaaatgccaacgaacaactttgtagagtcaagcttctggaactttgatgccttgtatgtgcctcagcaacatccggctcgcgatcagcaggatactttcttcgtttcgcatcccaaattgagcaataagttcccgatgcagctcctggatgaagttaaagattcgcacgaaatcggaacggatggttccattggatatcggtacaactggaaacttgaggaggcccagaaaaacgttctccgaacgcatacgaccggagtcagtgctcgcatgctgtacaaagtggcccgtcaagagggtggcttcaaaccagtcaagtacttcagcatcgataaagtgttccgaaacgaaactttggatgcaacgcatttggcagagttccaccaggtggaaggtgtagttgccgattacggactgacgctgggcgatcttatcggaacgttcaatgctttcttcaacaagcttggcatcacggagctggagtacaagccgacgttcaatccgtacaccgaaccgtctatggagattttctgcttccatccgggtctgcagcggtggatcgaggtgggcaattccggtgtcttccggccggaaatgttgcgtccgctgggcgtcccggagggcgtcaacgtaatcgcctggggtctatcgctggagcggccaacgatgatcaagtatggcatcaacaacattcgggatttgattggacccaaggtcgacctgaagatggtgcaggacggaccgatctgccggatgaaccgctgaaaggtgagatgtttttcattttgctctatccgtaatctattaccgtttgaaacgttaataatatcatattctgataaaatgaacgaaattattgcatcattctatcgacactagagtcaaaaaa

SEQ ID NO: 1523 - DNA, 1460 bp, Aedes aegypti
acttctcctatcgcaatgcgatcggtttaggcatttgttttcattcctacagccagtgtcatcaacctgttagtgctcaatttgataaaggcatatcatttccgatagttttttaacattttataatcggaattgcactactgttcattgttgcatcacatgtgaaagttacttcgactcgtcaataaaagaatttcacaaacgaaaaagatggctacggaacgggcaccactgctggaagataagagctattttcggcgattttgcgattacatgagccacgataccaaaggagtcgagattgcgacttacacggtatctggaatcctattcgtcgtagcgtataacaaaataagaccaattacgcgcttcagcaaagcatcggacatcccgaagcacttcgttcgagagcaaattccacagtacggtcgtgtgaccaagatcgaaccctcgatccagtccggccctctgctaatcgtgaaacatcgcccgccgctaaacatcgttttctggtccaacaaaacgctcccggtcaagattgccggggtggacctcaacgccaacggttattcgtggctgcaaacggttgtcctcaatcggcaggttacttttattccggtgaaaaccgataccggtaaagattatgccgaatgttgcgtgtacttcaacgagctgtcttcggacaaaaagtggctcaggaaggtcgatctaggccaggcgctgcttcagctgggatttgccaaattgagtacaccagtgccacgggtcaagttgaccagcaaggatccctttgagaaacaagtgcacgcgtacttccagaagttggcctacagcgagagtaaggccaaagatcgacgcattggactgtggcaacataccctaccaccgaaaatgctgcccgcgagattgtggcaatctatgtgggacaacttggctcaacgactatcaccacagtcacaccgtgttccggagctggtacgataaataagcatgatattacgtgcaatcatcaaaagtcatgcagacatcagtcctccgccaaacaagcgcaacaaatcatccgagaacgccacatttgctcggtcattttcttttatcgtaaaatgacaacttgttaccgatttgaaagtattttttttctgttatactataaagtgcctgaacggagagctcacgcgtgtttgtggggcacaatcaaaacttggaggcgtgtcaaatgggcgccgccattgtccgaataagtagtagattatcgttgagacgtcaactgatggaagtttaattgatggcgatagcaatgaatgaaaatatctttgttgtttttagtcttctatattgatttagtttgtttttaagatgaataaagtttaaaacagtttaagagaattgattctcgcctagaagcgggttttaaaaatttcggataaaacgcaagtataaataagctgatggaaaaaata

SEQ ID NO: 1524 - DNA, 1987 bp, Aedes aegypti
cattgtttcgtcacttttttcgagttctataaagtgaatttctcctgaaaaccaataaaatctttagttagaaccaactcagcatgaaaaccgaaaccgaaccgcaccacaatccggccgacccttccggattgtgtcgaacatgtatgctgagtggctcgccagaatcgctgatagccgtcggttccgaactggaagaaggtgccccgattgccagcgttatcggagaactgaccgccgtccagatcaaacagaaggatggtctcccggaagcggtctgcgccgaatgtgtggctgaattgaagcagtttgtggaattcatccggaaggtacgggtttccgatcggaagttaaggcggttgttcaaaggagggaattcggagagcgttgcacaagaagaggtgtatgttaagcaagaaagcgattcttggaactgtaaggaggaactgatggtgaatgatgagactgaggaagttatcgaggaggtcatagtcgatgaggaatacctggaattggatgaggacatggagtggaaagttgaggaggaacctaatcaaagtactacaactgccggagataattccgaaatagatttcgttggatttgacgatgctgagacaaaacccaagattgatgttcccgatttgaccacaaggaagcaaaagcgaaagcggctttatcataggtataataaaaaccccacggattacactgtcctggatgaggttgagcagcaaattttcatcactatagaagtatcggagggcgatttgatgtgctgttcgtgttataaaatctttgaggacgaggaagagttcaaagaccactgcgaggatcatcgcaaaaaagccaggttgaacgttttgaggccgcacgtttgtgaaatttgctctaagaggtacacaacggctcaaggtttgactctgcacatgaatcaatcgcgaagcgtcgacaaagtttatgagtgcattcgatgcaagtctcggttcctaaactccaaaactcgtcgtcatcatgctcacaaccatcctcaaaaggaggtaattcaatcggctgtaattgcgcctataagaattcagccaaaccatcgcaagggaagaatctgctgcgcccagggctgtggagaatcgttcgccacggacgaagcgcttatcgaacatgcccaagaagctcatcgactgaacaagatggcctcaaccctaccggaataccaagacaagccgtttgagtgtccagtttgctataagaggttcttcgatcaagcagcgttggtttcgcatcagaaacgaaagtacaagaatcccgtccgccaatgttcgatctgcggggcgaaggttcccggggcagcggcactggccgctcacgaacgaatgcacacgggaattaggccgttcccctgtggttcatgtcctaaatcgtttgcaagtactgccctgctgaaggcgcattccctcgtgcatcgcaaagacaagccattcatgtgtccgacttgtggcaaaggattcaaccggaaggccaccctccagaagcacgagctgatccatgccaatttgtcggtattcgactgcgacgtctgtggaaagccattccgaaccaaatcgagactggacctgcacacgagaactcactccggattcaagccgtatccctgccgatattgcgaaaaggcctttgccgaccatagtaatcgtcatcgtcacgaaatggggcacacaggcatcaagccatacaagtgctcgcagtgtgacaaaactttcatcacgaagcgacttcaggcggaacatgaaaggtcaaatcatgctattgctactgtctacacgtgcagtatttgcatggaatcgtataccaacagagcatctttgactaagcatatggcgctgcacgacgatgaagatgccgcagccgtaactaagctagtaggatagttatgcttattttttttttcgataaaaattgaatacgtgaataacacctttggtaggtagca

SEQ ID NO: 1525 - DNA, 1119 bp, Aedes aegypti
ccaaatgcgttcggttgatactgaaattaaagcgagcgttatggagaaagtggcaaaggacattctggacaagtatccgtgcctcaatgtgttggacgacgatggatttggatcaggaaaggattatgtcgcggttaagcataaaatgttaaatcgcaattcgtaccttaatcgcttcaaggaagaccaagatcaaccaacaccatcaaaaatgaaagaccgtcaaagtcgtaatgtacgtgctggtacgaataaggagtattggaaacaaacaaacaatgaatgcaccaaggatatgttatcatcattgtcccgcaatgaaaccgaattgctgacacaggagtttctacaagcatcacaatcgtatgtgcgatatcgcttcgatgaaaacaaaccattgaaagaagtagtagccgatttcccagtattgcgaagaaaatgtctgctggattatcattttgaatgtgctactggtgttgcagctggatcaatggagaagtatttcgccgcaaaacgtcaaaagctcatcgaattttcaaaatcgggacgtaagactaccccattgactgtaacggctagcgacgtcgatatcatccagttcctgtgcagtttgttgggagaaaaatgtgaagatgtcattgtatcgaaagagatcgggacaagaattgatgatattacaactgaatgttcaggacctgttcttgttgctgtagattgcggaaacgaaaagaccgtttactatgtgttcgcggaacaagtaagactcagcgaggggacagagaatgttattgccgctatatctgaccttgtatgcgttcactatgttcacaacttcatgtacatgcagcagatttccaaatttctggaatttgtacaggagtacttttttaagattttgccaacatatggatcgaagtctaatgcgacgcgtaaagggcagcaacagcgaatcgttaaaaaggtcatcaaaatgatttcggagtattgtgcacagtaagtcacgtctggctggtgcaggtaaaaatgagaattaaagaatgaataaactaagcgtaaaattattcctacgaatcaaaacctatataacaaagagaaacaataaataagtattgaaaatcg

SEQ ID NO: 1526 - DNA, 2068 bp, Aedes aegypti
ttcttatggatgatagaagacacgataatggtattctaacgcctagtaaagcatgacttaatttgtgcatgatccccaaatattctggatcttgagaagaacgattgagaatatctttgttagctgacgcagtattcacgcatcttccgtccagaccttaatcattgggactcatcaaccggtgagtggatgccgataagggtgttcgctatcacccagtgagtaccgaactagatgtaaacacataaagaagctgagaatagtaatagaaagcaaaaattgataaatctccataagctaatagcaagtcattggtagcgtgaaatcttttgctcaaatattgaattcctagtaaaacaataagttctaaattagttatttaagtgccaaataagctgcgtgtgttaaattcatagattaggtcttcgcatgtgcttcgataataggcaattactgtattatcctattgtaccgattgcattacaaaaccagatcactccaaggcagaaaccaaccgtgcatctacttggattacctacgtaagagcattgcagcagcacccaaatacgagttgaaatccacccaaattacgaataggaactgcacgaaaggaactaaaccaattcgaaacaatcagaacatgtcctccaagcgcccgctagatgtgatcattttcggcgcaaccggtttcaccggtagccataccgtttacgaatcaattaaactattggaggatcttaaatggggtgttgccggccggaacgtgaaaaaactggcgcaaattctccaggaagttggccaaaaagccggagtggatctgtcgcaaactccgatggtgatcgctgatgtggaagatcctgactcactgaagaaaatggctgaacagtgtcggatcgtggtcaactgctgtggtccctatcggttatacggtgaaccggttgtgaaggcgtgcatcgaagccggcacccaccacgtggatattagtggcgaagctcattacatggaacggatgcagttgctataccacgccccagctcaacagaagggtgtctatgttgtatcggcgtgtggtttcgacagcattccgggagatatgggtatagtgttcttggagaacaaattccaaggaactgtcaattcggttgagacgtttctggagaaatcgttacaatcgggaggcggagcactggttcactacggcacgtgggagtcggccattcatgccttatccgacataaaaggattactagctctgaggaaacaactgttcaaatcgagacttcccagctttcaaccagttctaaaagctcgtccagtactgcaccgcagcaagtttgtaaatggttgttggtgtcttccacgtcccggaacagaccaatctgtagtaaggcgaacgcaacgatacttctatgagaagtacaagaaacgcccagtgcaaatgcgcgcttatttgaccttttcatccttttttgaggtactttccgtgatacttgtcggcaccgtatgcggccttttgacttggttcaagtttggacggcgactgctgttgaagtatccacgattcttctcagccggtttggtgtcccacgagggtccatcggaagaagcgttaaaaaatacggaattcaccatctacattgtgggtgaaggatgggaccgcagtggaaaccagctggactcttttgaggaaccaccgaacaaacggctcgttgtcaaggtatccggtacaaatccaggctacggagcaacttgtgtggcgctgctgctttctgcaaagaccatcctgtaccagagcgacaagatgccagcgtcgggaggagtgcttacaccaggaggtgccttctacaataccaacttgattgaagagctttgcaaaaatggatttaagtttgaaaccgtcaatgttgccactgataaataggcttctttcatatttattttttagtgatgagttgaaatgttttaaaaatttataacctaattatgtagtttggcatacaattaaatgatgtcttcgacaaactgatagcagattatttatcatagaagtatattaaccgtcttccag

SEQ ID NO: 1527 - DNA, 1815 bp, Aedes aegypti
gttgatctaggtttcaggatgtttctagtaatccttctcataaccctgtccctttacctctatcaaaagtggatctacacctactggaagcgtcggggagtacctcagctgaatccttcgtttcccttcggagacgtagcggacacgttcaaacagcgcaaatcctacgcgaatcgtcttgccgaattgcatcatcaatccgccagcgatagccatcggtttgtcggaatctatacattgttccaaccgatcctgctcgtaacggacgttgaattggtcagacgaatgctcaccgtcgatttcgagcactttacggatcgcggcgcacacgtcaacgaaaaacgagatcctttgagtggccacttgttctccctggcgggtgccaaatggagatggatgctacagaagctagctccagcgtttacgtctgccaaggtaaagtcgatgtttccgacgatgatgacctgtggtcgtaccctatcggcagtggtcggagaccatttgggccgagcattgcccattcgtgctctgatgacgaggttcaccatggatgtgatcgcttcagttgggttcggattggattgtaacagtatgcgtaatccggacgagccgttccacaagatgggatccaaattcttctcgaaaagttggaagacttctgtgcgaatgctattggcctttgtggcaccgaaggttaatcggttcttgcagctgaaactgaacgacgatgacgtggaagagtacatgctgaacttggtgagagatacgatcgctaaaagggaacacggaggagaagtgaggaacgattttattcaacttttggtgcagttgaggaatcaggttgaagtggaagatggcggaagttgggagatcaataaggtcgagccgaataaggctttgaccgttcaggagatagcagcgcagtcatttgtgttcctgaatgctggatacgagacaacttcttcaaccattacgttctgcttgtttgagttgtgtcgcaacagagatctcttagggaagctgcaagaggaaatcgacgaagtggtggacggtggcagagaggccagttatgaagcgattacggaaatgacatatctggaggcttgtgttgaagaaacacttcgaaagtatcctatctctcccgttctgttcagagtttgtaccaaaccgtacagaattcctgacacggattttgtgatcgagaaggggacgttggtgcaaatttcactagtaggattaaatcgtgacccgaggtattatgaggctcctctaaagttcgacccggatagatacggggaacgaaaagcggaaacaatggtccattacagtttcggagatggtccaagaggctgtataggtttgcgcatgggaaaggtcatggtcaaaatggccctggttgaacttctttcaaactatgatttcgaaatggagtcaccaaccggtgaaaacgagctggatccatcactgctgatgcttcaacccaaacacgatgtcatattgattccaaaattcatgtaaacaatatctcggaagtttttcactgaagagtaagttgaggctgaaatttctatgttgaataatcaacattggtagaaaaactagacctgttgaaaaaatagcgctaatggacctattggctattattttgctaaacgaactaatgtcagaatattcatccatttttagttatcgccgttttaaattgtgttgtctagaacgaacttttaacatgccggataaggcaaaacctcaaaactattaaggggcaaaagtttgctgattgaaatacaaaatgttgttttttttgcgattttt

SEQ ID NO: 1528 - DNA, 3580 bp, Aedes aegypti
ttgacaatttagctggagtatttgcgtgggagtgagtagtaatacgttatctttgtgctctcagtcgatgtcgttttcgatgaagacagattctatccgcgagcgaccagtctcactcatctactcaccagccactcttctgaaaatctagtgtttgtgcgtttatttgtgctatatttattaaaaattgatccctgtaaacattttatcgttaatcacaatcaactttcaaagaccatggccatggcggacgatctttggcgtgaatgcgccgcctggctgactcggtgcaaaatcatcccagcggatcacaaagcgaaccagtcggattccgaaatcaaaaccctggctggaatcctgcgggatggcgttttgctgtgcaatctgctgaactttctggactccagtgcattcgagacgcgagatttcaaccggaaaccccaaatggcccattttttatgcattcaaaacatcaagcttttcttggaaatatgtaaaaccaacttcggccttaaggattcggatctgttcgatcccaccatgctgtatgatctcaccaatttccatcgtgtgctaataacattatctaaactttcccaatctcgtaaagcccagttggcgcataatatcgtcggctttaactatcaaatatctcagtcggataagagtcattctgatgaggacatctataaagacctacacggatcatctaacatttatactactactaaaccggaagttagggatgttgtcgaaacaaataacgtaaaccagtcttatggagtgacgtggaccgaagaccatcattcttactttgattacgaagggggtgcctacgacaacatcgccaataattgcgagaaaatatatgaagacctatgctacgttactttttcttcgtctactacactgcagttcacatcgacagccagtttcgaacaaagagatttcgtcattaaggagctagtcgacaccgaaactaattatctggatgctttaatagctttaaaatacaaatttatgcaaccactagaaagagcgctaacaaaagaggtgctacgcataatatttccctgtataaaagagctagtagacatccacgagaaattccttgctaaattgaaggatgctgtagctgtggattccaaactgaagcttagtgtagtatttttagaattcagagaaccgtttctaatctatggagattattgttccagtatgactaacgccactgatatgcttcgagaagtgtgcaaaaaatcatccaacgtcgaacaaattgttaaccaaagccaaaaagagcacagtgatggtcgactgcaactacgtgacatactatctgttcctatgcagagaatcttgaaatatcaccttttattagataaattagtacaagaaacaagtccgtcacacgaagatttccgtggccttgaacgagccaaagaggcaatggtagatgtagcgcagtattccaacgaagttaagcgggattcggaacatctggttgttatacaaaaagttaaggaaagtattttagatttgaatcttccaaatggaaacaatctcgaacagtatggtaggcttttgctagatggtgatttgaatataaaagcccacgaggatcagaaaactaaacatcgatatgcctttatatttgaaaaggtcatgatattagttaaaaattcgaatacaaaaatcggggaaggacaatatgtgttccgcgaggcacattacctacaagactaccgtgttgagatctgtcactccagacgaactttgggtcgggacggcagattgaagtactctctactattagcgagaaagacccaatctacagcatttaccctgtacatgaaaacagaagaagagcgtgacaaatggaaaagggccttcgacattgccatggaggtcatagatccaataggatgtcgaaacacagatcataggttcagtgtatgcacattcgacgcacccatcatctgcaggcattgctcgaaatttttaaagggaaaaatccaccaaggttaccgctgtaaaagctgtgaaatagtagtgcacaaaggatgtatatcatcgactgggcggtgcaagcagaaccagtctccgccgccggtgtgcgatcgattgctgtcggagttcaactggtttgtcggggcgatggatcgagacacggctaccaataagttagaaaagaaaaaagttggcacctatttactacgtgtccgtccgcaaggagcatcgaattcttatgagacaatttacgcgttaagtttaaaaacggataacaaaattatcaaacacatgaaaatttatcagaagcaagaaaattttagtgttctctattacttgtcgactcggaggcattttaaaactatcgtagaattagtttccttctatgaacgtaacgatttgggagaaaattttgctggcctaaatcaatcgctacaatggcctttcaaagaagttatagcaacggccttgtacgacttttctccaaacgagcctaatcagctgcccctgcggcaggggtgccaagtaattgtcataggaaaagagggtgatagtaaaggatggtggcggggaaaaacgctagaaaaggttggatttttccccaaagaatatgtacgtgaaaatcaaacgatttccgatgatcaatgacattacgactatttcgtttacatcgaaccgcatgcaacaaaacgcaggaatctctaagatgaaattttctggaaaaaatctataactaccttgttgttactgttatgctttgtttaatggtagggaaaataaagtctagaaatagtgttttaatatctatgtatatcagagctggatgtattgctagtttatttcattaattttaaattagtgacattaaagagagacttaatagtttcgatgccaaattttctatatatatttaagccataaaatatgtatacaagaagtttcccaagttttaataaaaaaatatcactgttcatgttattattcaaaattaacagatttattactgtagtgaaagctgatcaaacgttacttaatacctctttataccaggcactggtcctactggtcctttgtgacttcctagggtgtcccacggaaccataacgaagaagtgtagcttttcttgatttataatcaaattccattttcttcctagcttgttgtttaggagttatcaatctcattttcaatatttttaaactttctcacaactttgatatatgtactgtttgcacaaatatttttgcatagggtctaactgtttgaaaatcagtttaaatatgtgtagtttttagtcgggtctggatcagtaggtataacgctgtttagaatataggacatttggcataacggttatttgacacaacaatttttcataaagaacagccatcttttcaagaaaggtatataactcttgttatgccaaatggcccgctcctttttttctacagtaatttgattgttcttctgaatttctaccaactcttgcagagttttcatttgactcggttcaactcgaattcgaggggaccttccaaggatgaatatgtggcgaaaagacgtatggttg

SEQ ID NO: 1529 - DNA, 1583 bp, Aedes aegypti
atgcaccgaatcgccacatttatgctgagtacaagggtccaaagtacgaacagcaaccacgccaccatcaacgtcatcgaacacgccaccgcggtgcaccgttgtcgccaagccaccgtcagcatttcccgaggagcccgactacgccggccgaataatgcagagtggacaagtttaggggacgacgaaggcgacatggaaggagaggaggcaccgtccccgagctgttccgactacatcatgcatttcctcaccctgttctggaagatcatctttgcctttattccaccaacagacatggccggcggttacctgtgcttcgtgatttccatcctgtgcatcggcgtcgtgacggccatcatcggcgatgtggcgtcgcactttggctgcacgctcggcatcaaggattcagtcactgccattatcttcgtcgcgctgggaacgagtataccggatacgttcgccagtaaggtcgccgccattcaggacaagtatgccgatgccagcgtgggtaacgtcaccggcagtaacgccgtcaacgtgttcctcggtatcggcgtggcctggaccattgctgccgtctaccatgccttccacgggcggtcgttcgatgtggatcccggaactttggccttctcggtgaccctgttctgttcggaggcgttcatcgccatcatcgtgctggtgctgcgccgaaatcccaaggtcggcggcggtgaactcggcggtccgcggaaacccaagtacctgaccgcgttcttcttcttctcgctgtggatcatctacctggtgatgagcagtttagaggcgtacggtgttatcaagggcttctaaggcctcactgttcgaggaaataccattaccactaacaccacaaccaccaccaccaacaacaacgtgtcatcatccagagagcagcgcaaattatattggcctagcctaaagcgcgaaccgcagacacgctcacacaaacacatgcaaacacgttcatcgattccagtacagtttttctttcctctagttttgtttggttaagtttgagttccgaacaaaagtgaatgtcaacgcctacttagctagatttcgaactcgttgtagtcatggatacgaacttatttatttattttccgttaaccgaagcaggtcgcttggaaacaactaggttctaattgaagtaagagaaatccctttgaagctgcaatcaaactgcaagtgaaatacaagacattttagtttacacttacctgtattgttagtaattttaagagagcaacattatttaacaaaacgcgaaaaatgaaaagcgaagcccaacaaacatgaagatgaagaagtaagaaaaatgccaaattgttaagaagtaatgaaaactattaaataattatattaatacaaaaaacaacatcatagagtgtatagtggtaagctaatgttaaactaggatatgtaaaatgaaaaaaggaagcagaaagccgaatgttttaaaaacaaaatcaaaacaaatgctatgaaattaaagataaaaaacaaatcaacaaaatacatgacaactgaatggacgaacgtgtgacggacgtgatttt

SEQ ID NO: 1530 - DNA, 1425 bp, Aedes aegypti
ctcagatttttacctcctaattttccatagtgatgccacccctgcgttggccgttacagcaaaactggccgctgaaacatttcgttttctatcgtttttcttcgattcggctttttgcgccacattcaagttgaagaaccgtcgggataaggaccagttttttttaatccgctgtttgaacacaattcttgtgcgattccaccgtaaatttcttgaaaagacaaaccagtttcataaagcatcaaaatgtcccaaaaaggatccgccaaagccaagacaacgaagcaaacaaaatcgtcccgcgctgggctgactttcccggtcggaaggatcacgactgccctgaagcgtggcaaatacgccgagcgcatcggaacaggtgccggaatctatatggcggccactctggaatacctgttggccgaagtactggaactgtccggaaatgcagcgaaggacaacaaaaagagccgcattgttccacgccacattcagctggccgttcgaaatgacgacgagttgagcaagctgctgagtcatgtgtccatctcccagggcggagtgctacccagtattcactcggcgttgctgccgaagagtaccttgatcaaaaaggcgtctgcagccgggggcgattccaaccctagccaggagtattgaggaggaggccatccccaccgccgcagagagacagagcagagcttgcgttacggcggaatcatcacagtaccttcctttaggaccatgacaagttacttattttaagattaggaacgcgtgccactggcactgttagtttgtaagacttttgattgaatttgccgctttcgagattaaatatgtattttaacgattaccaattttctgcgtacaattttttggctagctatattgggataagttcaatgtaaactcttttgggaacttcacagctggtctcgtcatagagacttggtttctattctaatgcaagcctctaaaaagttttttaaaggaaggtgtcttaagtcaaccaaaatggtttctaaagtcacttgctatgcttgcagtgaaccctgctgactaattctagaggttcataagaaaccttcagataccattacacgactattccacagattcttcaggaatttccttgagatctataaattctgttagcagtgattcatggggaattacttcagaatttgctccagggaatccttaagcactccaacgcttgtacctcctataatttccacaagaattactgtgaatatttttccatacttgttactataggagctcttccaagcaaatcgacaaagaatcattccagagatttcgaaaaattcgattaggaattttccaggaagatctacatgaattcctatgctaatttctctcgtttccctttcagtcccatacggattccttcaagaattc

SEQ ID NO: 1531 - DNA, 855 bp, Aedes aegypti
agaagccatcgcgctaaacacttttgttaactctctgaagaagtagttctaatcggcagagatcaacgtcatcggcgtcattatcaccaaagatactgtctaagtcgcatacgccagtgaaaaagtccgcttaaccacgcgcttcgagataaaaggcgataatttaatctataaataataatcggaacgatgcagtgcaattggaagccaacaacaggccaccatttattgacttaaaacttttggattacaaatcttttacaaacaataggtcgtgccagttgagccgtggacatgcgaaagtgaataaacattgtgcgttgacctcatcctatataattgagatttcctgcttagagaactgtaaccatcgtcataccggttcaaatcatgcatcatccggagcagaaacagaacaacgacgaagtgctggtagtgaagcatgttcccgggacggccgagttggacactaggtacgatgtgctgctgctgtgcggattcattctgacggtgatagtggtgggcatgatcttgcggttggccttacaagtcacccgagcacggttaattaccaccacccggtcgaatcaagacgaaaccgccagctcggatggctcagtgctcagtttagtgctcagaagatgaaatgtaattagcgattgagaccgttttataacatacctatctacatagatacgctcgtccgcatgtcgtgagtgagtgatacattttttaatacgatcacgttcaatgtgataccggcgtgatgtgttcgaatgtgacacacataatcttaagaatttctaatcgtaaaacgttcatctcaatgaaaataaagaatgtgtgataaattat

SEQ ID NO: 1532 - DNA, 561 bp, Aedes aegypti
atgcttttaccaatattagtattagtcatgtcactttttggtaccgttttcacgggagatacggaaagccacactacggacactgcccgtcacgacctgcacattcacgaccacttgcacacagccgatctacaccacaaccctctgcatgtagcggatttccaccacgatctgcatcacgatgttcaccacgacctgcaccatgatgtgcaccacgatatccaccaccatgacgtgcacacggcacatgatcttcaccaccacgacttgcaccacccacatcacacggtggccgctgaccacctgcacaccgaagtgcaccaccacgacgtagtccagggccatggggatcacctgcaccactcacaccacgatgtggtagtggccacgccccacgcgtctggcttctggaagaaaagcttcatctggaagccccgttgggtgaagtcctggcacgagaagaaaatctacgtcccggtgtggaagcacgtttggggtccggtgcagatgactgagtgggtgccgatcccgaagcctccaccaggttggcaaaagcattga

SEQ ID NO: 1533 - DNA, 807 bp, Aedes aegypti
atgcagcccgaagaatacgaaaacactggctggctgtcgtacttcagccgccacaagacgacatacacggcagctgacattcataaaataagtaacgagttgaataatgtgcgtaagaatttaacggcgacccagtacgcgtacggtgaactgagcagtgagttgaaggcgttgaagagcttacaggagcaacagaggttgagtgaggagtacgaacgtgccaacagcagtaaatctagctcggccaaatcagctgagaaacgactcgcccaacaggcggacgagataaaatccctgaaaagtgaattaacgggttgtaaaaatgatctattgaagcagattaacgcattgaaagtgaacgtgagcgaaaccgttaagaagaaaatcaaaaccggccaacttccaaccggggcatcgttgagtatcgagagtcgaattattgccatcgaagcgcagttggatcagctggcggcggagaacagagatcgcctaaacggtttggagtgtcgacttaatcaggtggagcagcaacacgaacgggaatgtggacacgcggtgaagaaactggaatcgaccaccagtcggaagctgcaggagatgacaaatttgatactggagttgcagaggaaaatggatacgagcgaaacgaagctggatgagcagataaggaatcagagcatgagccaggatgcgatttatgaggagttggatcaacggatggacgtttttgcggccaagatgcgggagctgcatgcaagaattgcgcatttaggacaacgggacgatatcggttcgacgtttgtctag

SEQ ID NO: 1534 - DNA, 2878 bp, Aedes aegypti
gtcaaatcagattggcgtcaacaaacaattttggcgcctttttgaacagttcagaagtcaagcaagtgcttacatcgtgcatgtacatctgctgtgcggtggaattattttattttattagctaaataatacttaccagttaggaaaaataaagtaatttgattgtaattaaagatagtttcgtgaatttcgttgtgctaaatcatggatgtagctgacgctcaagtaggacagctccgagttaaagatgaggttggagtgcgttgccaaaaactgttccaggactttttggaagagtttaaggaagacggagaacttaagtacctgaaggccgttgccgatttaattaatcctgaccgttccaccctggaagtgagttttgatgacctggaaaagtacaaccaaaatcttgccaccatcgtaatcgaagaattttaccgaatctttccgttcctgtgtcaagcggtgtccaatttcgccaaggatcgcaccgatctcaaaaaggaaaaggaatgttatgtgtccttcacggatgtcccgacgcgccacaaagtgcgagagcttacaacatctaagattggaagtttgattcgcatttccggacaagttgtgcgcacccatccggttcatccggaacttatctccggaaccttcgtctgtttggactgtcagacggagattcgcgatgtggaacaacagtttaagtatactaatccaaccatctgtcggaatcctgtatgtgccaatcgacgccgtttcatgttggaggtagacaagtcacagtttatcgatttccaaaaagttcgcattcaggaaacgcaagccgaacttccgaggggatgtattccacgctccgttgaagtgattcttcgggctgaaatagtcgaaactgtccaggcgggagatcgttacgatttcaccggaacattgattgtagtacctgatgttggagccttgcagatgccgggagctaaggctgagattggttcccgccacaaacatggggacaatgccgttgagggcgtccgaggattgaaggcccttggcgtgcgagatttgaactacaagatggctttcctggcctgttcggtgcaagcgacctcttctcgattcggaggaaccgatctgcccatgagcgaagtaacggccgaagacatgaagaaacacatgaccgatgccgaatggaacaaggtctacgagatgtcccgcgatccaaagctgtatcaaaacttgattaacagtttgtttccttcggtgtatggaaacgatgaggtgaaacgtggaatattgctgatgctgttcggaggtgtggcaaagacaaccgaagaaaaaactaccctccgtggagacatcaactgttgcatcgtgggtgatccgagtacagcaaagtcccagttcctcaaacaagtggcagatttttcgccacgcgctgtctacacatccggaaaagcatcctctgcagccggtctcacagccgcagttgtaaaagacgaggaaagctatgatttcgtgattgaggctggtgcgctgatgttggccgataacggaatctgttgcattgacgagtttgacaagatggatccccacgatcaggtggccatccacgaagcaatggaacagcagaccatttcaattgcgaaggctggagttcgtgccacactcaatgcaagaacttctatcctggcggctgccaatcctattggaggtcgttacgatcgttccaaatccttgcagcagaacattcaactcacggctccaattatgtcccgtttcgatttgttcttcattttggttgatgaatgcaatgaagttgttgactacgcgattgctcagaagattgtagatctgcattcgaacatcgaagatcgtgttgaacaggtttactctcgagaggacgtccttcgctatatcatgttcgctcggcagttcaagcctattatcacaaaagaagcgcttgagttgttggttgagaattacggtcatttacggcaacgtgacactggaacttctggtaagagcacttggcgaattactgttcgtcagttggagagtatgattcgactcagtgaagccatggccaagcttgagtgttgcgaagaagtttcagaaaagcaagtcaaagaagcataccgtctgttgaacaaatccatcattcgcgtcgaacaaccagatattcatctggaagacgaggaggacacagcaatggacactgaagaaagcacacctcaatcagacgttcacgaccaaaatggacatgccgaaaatggtcacgagaatggcagtcatgatgttcccaagaagaagctaacgttgcctttcgaagagtacaaaaatttgtccaatatgctagtatttcacatgcgcgctgaagaggaacggttcgaaagggaagagtctcagtcagagggcgtgaagaaatccgatctgatcaattggtatttggagcaggtggccgaacaaatcgagacggaagaggaacttgtacagaggaaaacgttggttgagaaagtcgtcgatcgattgatatatcaagatcaaattatcattgcactgaaaactgctactctgggagacaaagaaacagaggaggaagaccccgttcttgtggttcatcccaactacatcatcgaaacgtaattcgttattgttaaaatattatatataagcatttttactgcatgatttctattataatttttacgtaaggaacatttccctgaaaaagtaagtacaacaataataatcatggaatgttattgaagtccgaacatccttaacgcctttccgcccacgacgtttcattaaaagtgattggaaattgtctaaatttattgaaccgtaaaaaaagtttaggttgctaatcaatagttatttgatt

SEQ ID NO: 1535 - DNA, 716 bp, Aedes aegypti
ctcattgcaagtgatatcgctacttaactagtaattaatattcctatcttgtgcacagcttgcaaatttcgctcaaaatgagtaaactaactattttcgctgcactactcgtgcttggagtcgctcaaggatcgttgttcggaccattcggtccctttggaccatttggacaacctgcagcccctcagcaacctggatggccatcggtatacccatcgttcccagcattcgggcctccagccaatctaccagccttcggacctcccatgaacctgccagccttcggacccccagttggattgttcccattctctcgtgcccttccgggagctgctcccgcagtaggaagtgcagcatccaccggcaagttccgggccaagccttcaggcgtattggaacgactagctgtggccaatctcccggaagacctccaggcacgctacgacgatctgctggtggctctagagcagggtaatgcggcctgcgacgaggcctatcccggtgccgtgggaccattctccgggctgcatcgacgatgcgtagttctacaaaaggccgaaaccgaacgggctgctatggccttggagaaggaagcctccgatagggctgccgccgaaagcgtaaccgacgtgggagtggacactgttgtgtaagattggaggtggaaatcaaaatctatggttaaataaattatttttttcgagcatgcaaagcac

SEQ ID NO: 1536 - DNA, 501 bp, Aedes aegypti
atggatgttggtttttggaaaaacattggcggtgttgtgatttattgcaatgaggtaacctccgaggaacgcgacatcatcgatcgggaatcggaaaacatcatccggatgtggacggagatgctgaacgatttcaaagtcgagtgccggagggcgaagcgtagccaacagatggccgaattcatggatctggtcctcgaagccttgtccagctacatgaacgcggtccatcatattgccaacgagcaacgccagttccggatacagaggaaactggaaacgtacaagtttctcaagttcaattcggacaagaaatcgctctcctctgctgttcctccgaagctacaggccgatcctctgatgatgaatggtctgcagagacaggaccataaagggacagaaagtgacatcaagcggcaaacaacgacgatgaattggacgattttgcggagcgcatggaagctttcggggccaggaggattttgtaggacgaagacctag

SEQ ID NO: 1537 - DNA, 765 bp, Aedes aegypti
catggttctgcgtgaaagaagcgatctggaagatgacctatcgtcagatggggcagatcagagccgcaactcgcccagcaatgggttccggggtcgttctcgcgacattgaccgtagccaacagaatgccgaagatctggccaggtatctcctggaacgggcaacgttgtattgggacttgttcatcacagtgaccaacaacctgatggatcggtaccgcgtgaaagaaatcgccactgcaatctacgatggactgaggaagtaccctttgctggccctgtcgattgctgccgttattttcatcctatcgttgccgttcatgatctttgtatttttcacactggccacggcaatcatgacctttaccgggttcgtgctgatcgaaggaacactgataaccgtggcgtcgatgctgctgattggagtgctgatcggtgtggggtgcctcttgggcacaatcggattggtgtttctggtgggctatttcggtatttccaaagcgtacgactggttggacaggtggggcgatcaaggaattaggagttttggtacgcgacatgctcgggaggaaaggtaaattaaaatcagtgaaatgtctcttttgttttaacgtggtaagtgaagttgcaggctctctgcttggttcatgtgctcaatattagattgaagtattgtattctatgtatgcataaatggagaagtattaccctgtattatattacatatagtggtcgttgaaaatagaattgttttttatatataatt

SEQ ID NO: 1538 - DNA, 2228 bp, Aedes aegypti
ctcttgcaatgtgattgttcactaacacatgttagtgaaaacttgatgtttctttacagagacatctatccaacatgtatcaaattaaattagtctctctcacttccttcattcgtaaacaaaatagtattgatctcaaaagagttgtatacatgttttcaacatttcataattaaaagctactaaaatggataatcttaatcagcctatgaacatcaccgagtacaacaccctaatcacgaacattatcgaatccgccgtcgacgagctgatccagaagcgcgaaagtggcaaggaatcgctcctgttgcacctctgtcggctgtgcgcccgggaggaacccctgctcctggacctgtccgagctgcatctggacctgatcaacgagctggccatcagcggaatcgatgccagcgccgggtgcaccaaaatctgctcatcctgtgccgagttcttggggcggatccgcgagttccgctgccggtgcgaggacggccagaaaaagatcagctcgctgctggccgaacggagcgtgattccggacttcttgaacttggacttcatcaagtcggaggaacactacggggggttcagtccgccgggtcacccggcggtagatgaccatttcgccgaagcggatgattccaagattgaccaggatgacgacgatgaatcctcggaggaccatttcgaagaggaaaaacccgcgaaggagtcgaaacgagttcaccgaggtactcaacccaagaattcgaaggcatcctcctctacgaacgattctcggcggcgagttgtcaacgggaagctccagtgggtttgtctggactgcgagcaaacgttcgaaagctgtactaagctgaagaagcatcggcagacctgcgagatggtcggaaacgaaaactccaaacggaggggaccgttcacttgtgatatctgcggacaatcgttgccaacgttgatgggcctcagagtccacgtgcacaagcataccaaaagtggcgcggaacaggagcagaaaccgaccaaaacagcggcgggcagtccaccggctaagctggccatttgtcacgtttgcgggaagtcgttcagcagcacgagcactctgcggtcgcatctgattttccaccggcaggagaagcgactcgagtgccagatttgcaacaagaagttccataagctgtaccgcctcaaggatcacctcaattgccatgcgaacgtccgacgctatagctgcgacatctgcggtaaggcgttcttcaccaaggccattctgtacaaacacactcggtcgcacgatcaaaacttccggaagcacccctgcaccatgtgcccgatgctgttcgcccatccctaccagctgcgatcgcacatgatggtccacaccgcagaatatccgcacgggtgcaaattgtgttccagtaagttccgcttcacgtgggacctgaagaagcactacgccaaagcacatcctccgctaccggaggaagacactccggaaccgatccacgtagtcgaacatcaaccactccctctgcatcaccctccactagatgaggtgctcccggaatcgcttattcctccggtggaaccactactttcgtcgctaccaccactgccggatccggcagtggaagcagataccctccttaaagaaggccaacacgacgatctgtccgtcatgctagcgcacattccaccccaccagcaaccagaactgacgccatcggtggccgccgttcaaccggtggtgactgagcatcccttcggagccgaacacctgcttgacgaagcatcgcgggattttacgaccgattgcttcccggcggatcatttggacgggagccatccgacggccgatgacgatttctatacttttatggaatgttaaggggatagttagtaatgtcgaaagaaaaatgtgatataaaataaacaggcgatctaattttaccacacaattgagtttgtttaaaacttgacgttttgtgttctttgtctcattcaggtgttcaatgtagtcatgtttctacctttcgacgacgtttagtattagtctagcatggtgatttcaatacggagttgaaaggcttttacattatgtagtgctagattgttttcttctttttgccagatgttacgtctcaaccgagacagagtctttttatcagcatcttgttctgtgattacttccacagatattaactctctaacacccaaatttttatttt

SEQ ID NO: 1539 - DNA, 1188 bp, Aedes aegypti
tgcaaaaagtggcagccagcagttttccaaggcagtgcgagtgtggaaagggcttttattttcatccaaaaatattttttccgctgttttccttcggaacaaaaggtggcattttctctccgttccgatttgacccgaatttccagtggaaaagcgtacggcaaaaggcgacccgaatcgaaggatcgaatttcctggttttcttgcattttgttcgtgctctccgagaaggaaaatatggaacgaggcattggccgacagggaccgatgatgtcctctccgggaatgtcccgacggcctggtggtggaatgccacctcgggatagctatcaatcacattcatcataccatcagcagcagcagtccagtccacatcaacatcaccagcaatcgcaacaacatcagcagcagcaacaacagcattcgccagcaagtcaattccagcattcgcagcatgatgagctgatacgatacattcatgaggcatggaatacgatcacgcaagacaaaagccaaaatcccccagtattcttcaagagtgtacctgagccacggctcgcaggtttcaccccgttcgatttggaagcatactggggtcggcggttagtacacaagatcaacatttcggcccatggtcatcagtagtttcggaccgggcaaacacgatggattggaggagttgaagaaaaaagggaaaacagcagagaaaccgataattcgcaactgttaagaaatagacatctgaaaaccaactgcggaagaggattaagaaactgaaacagctggacgcggagataggatctaaagaatcggcagaacacacatacacgaccacacacaaacacacgaccatgcatatggttccattcaatagattacacaaacacaattatattttcgattttatattttattttttggaatattagacgcattggcagaagtaatttcgataattcagaatcaaaatatttctaattattagaaagacaggtaaaactcagatgattttcagtagaacaacacaaagcaacaaaaaactaatataacgatcatttagcgtaaaatatgatttttgtcttacaaaagacaactattgtaaattgaagcaaaaaaaagtaattgtgaatatccaaatcctacaaattctgcgaaatgtaaacaataaacaatgtgtttccacttttt

SEQ ID NO: 1540 - DNA, 1096 bp, Aedes aegypti
aaacataaaaaattgtgtaaaatcagtaatttccgttttgaaaccggtagttcagtgttcccgacatgaaaacgtttgcaatcgtcgaaaaatggcctcatcgttgaatcgaattttcaccagaaaaatcagctccgcctcgtacgaaatggaccaggaggacgatttctgcggattcagtagcggaagcgaaacggaaaccatttccgagcgggacagtggcgaagatgatgagtcgtcgatttccgagaggaggaacaaaagaggtggcgtagcaccaggaaaggccaatgggaaactggagcggaatccaacccggcgaccgaatccaaagatttccaaccgcaatgcgctattggcacgggagaaccgtcgccgcaagaaggagcatgtggagagcttggagcgggaggtggaagagctcaaggattgcaacgggaagatccggaaggcgctgaagaaaaagtccaagctggtgcaggaattgacccgggagaggaactatctgaagagtgtgattgccaataggaccgggataatggcggtgttgaaatcggttcagcgagcgggattcccgatgacatcttccggattgagttacgtgacggaaccgatggggggaaagccgcagagaatcggaagtagcagcgatgaagggctgggatcttcgccacattcggccctgacggatgaggaggacaaattcaacccacacggtacgactgtccacccggaagaggacccctttttgtgcagctttctgatcgagtccgaattttccctcccagatctaggtttgtctgcgctgtccgggcaggaagtgtcgtcttttgaggaggaattcagccgactgcccgatgtggacgagttgctgtcgacgatggccggaggggaccgatccaggggagaacaagtaattaccacagagcataactatttcgaacacagtaatcacaactcgttggaatcaggttctgcatcgggatcaggagtttgcgtccacattgttccgggaggacgcgtctccgtggagttttgcgcttcctgtgcgctaagctcccagcgggcgtggctcgaggaagccgaggaacgatga

SEQ ID NO: 1541 - DNA, 1351 bp, Aedes aegypti
gaacgagatgcttgttttgacgttttttctgcatcgcacgtccatcgcgataaaatagaagagcgcactctctgttgtgttgttagctaaaggtgcttcggaaacttgttttgaatggatccagataggaaaattcccgtgacgtagattagattttgtggtgtaaaatttggttttgaaaattatgctaaaacacttgttgtactacatttgcttcacagcgattatcacagtcgccgaacaagacgactggaaaggtaaatggttcccgaatgttccagactccaccaatggcatcattcaacaggacgaacacggccggatactgatgggggtgcagaatccggattgtgacgatgcccacaagaacctgtcgatggatttcgatccgtacgacgtccgccactcgacggtttatttgtgtttggataacaggcatgactatcggggcgattacaatatggaaccgctgataacgctgtacgacattccggacacgtacgtggctatccacaagtgtatgaatactagcatcgagtacgacgagcggattccaacttttggaacgcatcgccctctctggccacggtatggagaatacaaatacgtcccgactcaacgttggctgcacaatgcggagcacggtgcagtcattgccctctatcatccctgtgcgaacaaggaccaagtggagcaactgaagacaatcgttaggagttgcctctacagacatgtgattactccttccctacttccgtccaaggatcgtccgtttgcgctggtgtcctggggggcgttgttggagttttccgtgctgcaacgggaggtggtagaggatttcattcgggaacatgccctgaggggtccggaacaaacagcccgtgatggacagtacgatcatttgctgttggcgccggctgaggtcgtgtccaccatcgacgatgcagaactctgccccaagcaacatcgacgaagggactgaacacgatgatgtatgaacttcctcaaacaaccaatttgccatcatttcgcagcagtgatattccagaatcttttgaagagcagttttaaacgtactatactacttcaatgaagaccaatcacaaggaaagaaatagctaaaataatgtacaatgtgtgtaacagtgatgtgctggattttaccatttattggtgttttgaattctagatagagcagcttatataagtgtaaacatatattcaaatgtcgtgataaagctgatttgtataagcccatttttctattttgcatggaaacaaaagactaaagttattgcgaatataaatcaacatgtataattatggtattgtaatatggtatgcattacgt

SEQ ID NO: 1542 - DNA, 1469 bp, Aedes aegypti
cctctcttgtcacgtttcagcttagattgttgttttctttcggcacgtttcgaccgaccgccggttggtttatagtttagtggattttttttttcaaaattcgtataaatttcatcaaagtttgatactgaacaagttcagacaaccatgggaaagaaattcaagaaaggttccgggcccgaagtttccgacgttgccgtgaataaggcggaggtaaaaggtgattcgtccggaatcttgggcttatcgtccaaatcgaagaaaatcaaaaaacagaaaaagcgcgaggctgactcgaaagttttgacagcggttcccaactcggaatcgaaaatcccggatgcaattgcagtaaccaaacagaagaaacgtgagaatacgttaacggaaacggctccgaaaatcaaagttgaacagccggtatctggaactcctaagaaatctaaaaagcataagaaaaagaagaacaaggatcacactaacggaacgaatccggacgattcccgaaaggaagtcggaggaaaagaagtcaaagctgaaggcacaggaaaggaggatgcattgaaggtgcctaagaagcacaagaaaaaagacaagcgccgtgccgagagagccaaagctgcactattgcagacaggaactgaaattcaacctaaggtcaatggaaacgagacgccgcccacgaagaaacataagaagcataagcgcaaggcttccgaagtggaaccggaaagcgtccagcaagcaccagagaagaagcacaagaaaaagaagcacggtaagaatctgaccaccgaagtcaaatcggaaccggaaacgaagtcccatgaaaaggccctggaagccgatcgagatgtggtcacgtcggaaagtgaatccgacgatgatgaaaatgctgtccagagcgaaatggatcaggccaatcagctcattttgaaagcggaaaatggagacgaatcatccgcagatgaagggcaaacggaacagaaagcaaatggcaagaaggagcaggaagtcaaggaggagaagacagcgaagcgatttacaggtcccgaacattcgattttcatcggaaacctcccgaacacggtcaagaagtccacgatgaagtcgttattcaatcagtacggtaaaatactgacgattcggttccgatccaatgatggcatcacgctgttcaagaagaaagaccggaaggaggcgaaggcactgaactgttacatccgcttcgagaccaagccggaagcgcaagcggcctgtgccatgaacggtcaactggtggaaggcaaccgaatccgggtgacgatgcacatgcaaaaacagatgggccatgcttcgtccaccgtgttcgttgggaacatcaatcgcagtaagtatcatcagcatttccatccttttcgatcgaaagagcattcgaacgtaaacaagaataggggtgtatgtgtataataatctcatgatcacggcat

SEQ ID NO: 1543 - DNA, 613 bp, Aedes aegypti
gcggtcgcctccggtaaatgttcctagctagacatcgaatctcattttaattccgagcccagtattttcatcaaaaaccatgaagccagaccaaaaatgcatcctacggttcgccaagctcacggatcaagccttcgcaccttccaaaggatccgtcaaggccgccggatttgatctcaaaagtgcgtacgagtacacggttcctgcccggggcaagcagttggtgatgaccgacatccaggtgcaacttccggaagggtgctatggccgggttgctccccgatccggactggccgtgaagaacttcatcgatgtgggcgccggagttgtggacgaggactaccggggtaacctgggtgtggtcctattcaaccactcggacaacgagttcaaggtggcccggggggatcgcattgcgcagttcatctgcgagcgaatcttctatccggagctggaggaggtcagcagcctgacggaaacggaacggggcagcggcgggttcggatccaccggaacgcaatgagactgatgagcaggggtaagaaggtacctattcgatattctaggagtagtttgtaagatgtttgtttaaaatacaagaatcattctttgt

SEQ ID NO: 1544 - DNA, 816 bp, Aedes aegypti
atggctggagtggtgcaggagatggaagagttgtgccaacgaaaatgcatcctggaaagtatatctccatccaccggcgattcactgcaccgtctaacgctggttctgctgcagatgatccgcaacgagtccctcgtcacggcagatgtcgcctgggtaaatgcagccgacagccgctccagtgccaatcattcccaccaacaacagcagcaacagcaatgtctggtcacgtgggaagtctccggtgggggactgatgggcaacctgctgactgaatcttccaccgtgcagctatcgctttggccagaaaccaactatcgggtgcaggtcacctgtcggagcaagcacactaacaccatgatccgttcggcaccgatagtgttgaatacgtccactgccacctccgtcggtcaaggtcagtcgaagaatccagttgccgatgaaagcgaagcacaaatcggccttgaagaattagttcctgcctccaacccgaagacatccaatggccaaaacgatattattgtaacgtgccgcaacgatagctcagatcatcccaatggcctgcgagaagttctactactaggggtgtacgtcaccctgctggtgttcctgatgatactgctgacgttgattagctttatccagccgaagccaaaaccagtgtcgttggataaggaggtttcctcaccgtcttcggcgtcgtcgacgtcgtcggacacgtgctcgatagcgtccgataagcaagtgctcgttgcgaatgatgtgatggctgcggaaatggcttcggtagcaggaacggaaattttgcacgtttaa

SEQ ID NO: 1545 - DNA, 1848 bp, Aedes aegypti
atggaaaacgggaacggatcgtgtaatggttcgctacctgcttacgagcagcatttcccccactacgagctgtatctgatcgaaaccggtcagatcgccgctcccgatcacttctacatcttctccctgttgctgttcttttcctgcgtccgccattcggaacggttcttccagcagatttgcaacgggttcgacaaaccgcagcaatatgccgtgacggctttcctcaagtggatgttggaaagcgcgcagatgcgccaggaaatcgatcggatgatgatccggcgctcgattcaggacgccatgccacaaacaatgttgcctccggagacgcctcccaatcccaatccggcgcctcttcagcgggaatcctcccggctgagtttgccctcgcggctcacttcctccaccgtcagtagtggagacatcgtggacggcagtccgctgcgattgggacggcaaccgccaaaaatttcgcctcccacgcccaaaacgatcattctggacgaacgaaccaaacagttgaaggagctgaaggctcaactggaggcggaacgctacgagaaggggtacctcgagtacgtgaaggagatccgcgagttgcgtacggagctgcaggcgtgcaatcgggagaacgagtctccgaacaagcagcgcggggtggactacaaggtggcccgcatcgagcggctgctggccgagaaggaggaagccctggatcgactgcggatcgagctggaaacggtcgccgagaacaaccggaactcgacggagatgatcaactaccgcaacgttcagatcgtcaagctcaaggaccaaatccaggagctggagaactcgctcgggtcgctgtcggagtgcatcgccgagaaggatgaggtgatcaagtgtctgcgcgaaaacaacgaggaactgcagcgcttcatcgaggagagtcgcttcaaacagaacggacccctgccggagaacttgaacacctcgttcgacgggatgatggaactgagttccggtggcagcagcaatggcaacggaaccggccgaagctacaacattacgccggagaatatggcccatgcggttgttgatgtgcagctgaaggagaaggaagcggagaactgtctgctgaagcgttcgctggagataatcgaacaggagaaggttcgggtttccggcctggtcggaagcttcttccgattgtacggtgaccttgtcggagcgatgccgtacggaagtacgaatccacaggatgttggatttgtggagaagatgaacattttcaagtcgtgctatgagtcgttgttcgaggagctgggaaagttcaaggaaagcaaggagatgctggaggagaaaagcgacgcactggaaaaggatgtgcgggcgttgaagacggaacttctggctcgcacggaggtgctggaaaatcttgagcggcactcggcggatattgaaaggcagctggagctggtgaagcagacagcaaacgaatatcagcggaaaaatcaggttctggatgaagatgtgaacaggcagaagcgcgatttgttaaagttgatatcggagaaagattccctgagtcagcagaatctcacgttgaatgtggagttcaagattgactatttaatgctgtcgctgaacgaagattacgagggcagtgacttctcctcgtggtccgacaagatggacgatctgaaagaacgtgtgcgaacattgaaggaggacaaagaacgtttgacgggcatgaacatgaagattacaatggaaaaagttggcttggaaaaacacatcagtgtcagtgaaatccggctcgaaggaccaaaaatgtacatgaaaatcaacactttgaattga

SEQ ID NO: 1546 - DNA, 1671 bp, Aedes aegypti
atgttcacctcgtacgactctaggacgaagatctggtcgggtgtcaagatgccaggtccttttaatccgcaagcgaatcttggtcatctaatcctgaacgttctggagcgaaatccgtccatggtggctcaggtcagtgtagagtccggagtggagctaacatgtgcagagttacggatccgttcgattcgagctgcgcagaacttgaccaagctgggctacaagaaaggtgacatggttgggtttgccgtgagaaatcgagaaaacgtggcaccgttggtgtatggctgcttcctgataggagcacccgtcaattgtctcgatccggatttcacaacgaaggatatggcgcacatgttgcgtatcagtaaaccgatgctagtgatggccgacgaagataatatggaaaccgtaaaaactgcttgccgcgatgctgagatcagcccaaagatcgttgtagtagcggatgcacgtggtccgtgtgatccggaagatctatctatttgggatgtaattggagaaacggggaacgaacagttcttcttcccgccatatcttggtgactcggagaagcttatcgctgctgtggtttgctcatctggaactactggaatgcctaaggggatatgtctgtcgcatgctcatatcatacatcaaagtgcgttgatatgcaatatccacatgtaccagacaccattttcgttcagctcactctactgggtatcgggattctatcaattgattcaaagcccgttcaacaactgcacgcgctacatctcaactcgtcgattcagtccggaagcgttgttcgagatcgttgagcagtactcgatcacccatgttttttgtccacccgctcaaatagctatgatgcttcaaagccctctattggaagaagcgaacctatccagtctgaaaactttctattcaggtggcggacctgtttcgccaggacttcgccagtcgttagaaaaagccttaccgtcatgtaaaactgcagtaggatacggaacatcggagatcggatatgcctctacagatgcgtttggcttcatgcgagagggatcgggagctattatcttgagtgtagggatgttggccccgaacattgaagccaagttgctcgacgatgacaacaatcaggttggagtgaatgaaaatggtgttctttggctgcgttatcccatcaaacccttgggttacctgtacaataaggctgcaactgatgaacttctaacggatgatggctgggttggcactggtgacgtgggatatttcgacgcagataattttctgtttctgatcgatagaaaaaaggaaattatcaaatacaagggatatcaaatatctccggcggaaattgaagccacaatcgcgcagcttccggaggttgctcaagtatgcgtggttggtctgtttgatccagtgatgcacgatgacctgcccgctgcagtggttcaagtgcggcaaaattgcacccttagtgagcaacgtgtgatcgagcatgtttcggaaaaactcgccgatttcaaacatcttcggggtggagtgttctttgcggatgagctacccacaaccaaatcgggaaagcttcagaggcatgacattagaaagtatgcagaaatgatggtcgctaatagtgagaacaaaacatgtagaactaatggctaa

SEQ ID NO: 1547 - DNA, 955 bp, Aedes aegypti
ccagaaaacttgcagttctaagaaaatcttcgccgcacatgtttatcagtatcgtataaaacccggaatcgaattcatggacaaaatgcatcgtccattagctgctccacaatgcactgtcttcctgtcctggtattcatctgtcacttgctttacatcacccaagcccagatagatgttcctggtgtaagattgaatcgcagttcgctgcttcgcacatttactcccggaaactgctcggatggaaccgggaagacctcaatctgcagcagctgttcgtcgcaatcgctttgcttcggaggaaatgcaatcgcagaagtggcttgcccgggatccaatccgtactgcaatccaggaaatgtggaagcaagctgttcgaatttaccagcggtgggttgtggagctactggtggggcccaagtaagttcgatagtctgtccggcgcttggcgttcttcctgatccagccaactgtaaagtgtaccacgtttgccgcaacttacaacaaaattccgacgtataccagtgcccaccggggtatcacttcaatcttaccacgaaatggtgtcgatcggatcaagttgatcagtgtgtccgtgtgacctgtgggactaccagtgggttcgtctactacggaaactccagacagtactttgcgctttgtgtagttgccaatggcgtaacaacgtcgtacatcatgaagtgtcccgacagagctaccttcagcatgacttccaacagctgtgtctaccagtgcgccggtcagggcaacttcgagaattccaatgacccaacgagcttctaccagtgctatgtggtcaatggcagttacgtggtagcactgcaaagatgtcctgctaacacgaccttcaaggaatcgttgcagtattgctcttagaagtgaaataaagcacagtttattgtgatcaaataaaacgaaactgaatttcaatttg

SEQ ID NO: 1548 - DNA, 805 bp, Aedes aegypti
gcaagatgaagtccatcatcggctgcttcattcttttgaagtttttagaaaatatttttgcgcaagatgttgacctgggtgaaaagctggaggacgtctcacttgccagaacattcactccaggtgtatgcggtggaggacaaagctcaatatgtgcgtcatgcacatcgctctccctttgtatttctgccagtattgtagtcgatgtgccttgtaactcaaccacatatccttactgtatcccaggagaggttgaagcaagatgctctacagaacctacgtctggttgtgctccagcgtcggacgaaatcgttgccatcacgtgttcttctgttggcgttctaccagatccttcaaactgcaacatttaccacgtttgccgaacggtgcaaggcatctcggatgtctatcaatgcccaaccggaacgagattcaatcttcgagttcggcagtgtcgagctcgtagggtaacgccttgtgtgacagtcacttgtggtgccaccagtggattcgtgtattacggaacttcaagccaatactacgcttactgtttggtagcaaacggtgtaacaagtcgctacatattcaaatgcccgtatcgtgcatcattcaacatgagcgccaagtcttgtatttatcgttgcaccggtgttggaaactttgtaaatacgaatgatccgacaacgttctaccagtgttatgtggcaaatgggcgccttgttgctgctttgagatcgtgtccagtaggaacaaataccttcaatcagacactacagtattgtgtctagcatttaatctaagctca

SEQ ID NO: 1549 - DNA, 1525 bp, Aedes aegypti
tctttcatcaacaagatgaagtgcatcatcatcatttgtttcgttctgtcagtaactctcgcaactattctttcgcaagatgctgttctgggtaataagctggagcaagtttcacttgccagaacattcactccgggagcctgcggtggtgggcaaacgtcggtttgtacatcctgtacgacgctctcggtctgcatttcggccaacgacgtaattgacgttccttgtaactcaaccaccaatgcttactgtcaaccgggggatgttgaagccagttgctcaacggaaccggccactggttgtgctgcaccgtcggacgaaactgttgccatcacgtgttcttccgttggaatgttaccagatccttcaaactgcaacatttaccacgtatgcagagcagtgcaaggaatttcggatgtctaccaatgtccagccggaacgagatttaacctgtcggttctacagtgtcgaactcagagtgtgtcgccttgcgtgacggtcacttgcggggccaccagtggattcgtgtactacgggacttcacggcaatattacgcttactgttcggtggcaaatggtgtgactaatcgctatatattcaaatgtccaaatcgagccactttcaatatggctaccaattcttgcgtctatgtctgcgccggtgttggaaactatgtcaatacgaatgatccggcaacgtattaccagtgctacgtggccaacggtcgctatgtggctgcgttgagacagtgtccagtgggaacgagcaccttcaaccagacgctgcagtattgtgtctaacagtttggcgttacaggttattttaaatattttaaacacataaacatatgaaaatttactatggttttaaaatcatgcgtatgcttcttacccggtcaaccagtcagtgattttcgatagcgaacgataccgattcgttttgaatcgttggcgatcgccatcgttggacaaagatctataaagaaatcggaaaactggttggtcgggtagtttccccttccaatatgaaaacactttctcgcatattttgtttatgaatgaattaacatcattaacattattcagtagaaatatttaaaaatagtccgcacgccttgctgaaataagatccaaaaattcacaggaaaaaaagtcggaatcaataaaattattatccttctatgctgattgtagtaaaaaaaaacgtcttaagaactaattccatcagactaatcctataggattcatcagaaatccacataaaaacccagttacgatcgtatttctgtatgaatataatattaggcactattcttaaacactaaatataagataaggcactattcttatacattaaataccctcttagagcgtgacatgatgtgaattaggaatatttgatatttatggaggaatttaaggaagaataatttgattctatagttatggaaaatttaaaatcttttgttacttgatcgaatgagctaggtaaaatacaattttattatactccaaaaactttatt

SEQ ID NO: 1550 - DNA, 1413 bp, Aedes aegypti
atggctgcagtgatgcaattggccattctattttgcacgctaaattcccacaaggtcgacatgagtaacctgctgggcggccagatcggtttgaacgatttcatcttcgcacacaaaaaaggtcgagcgaaggaggtggagatagtcaaatcggaagacgccctcggactgaccatcaccgacaacggtgccggatatgcgttcatcaagcgaatcaaaagcggaagcgtcatcgaccggattcagcatatacaggttggcgatcacattgaaaagctggacggtatcaacgtggttggaaagcgacactatgaggtggcccgtatgctgaaggacatccccaccggatcgacatttacgattcgattggtcgaaccgatgaagagcggcttccagggcattgcaccacgcaagggtggcgccaaacagtcgaaaccgggctacggcagcggaaaggagacgcttaggtttaaggccaacggcaatgccgccattgaagacgagcacgacgacgctacacaatgtggaatagatgccattaatacactgctagattcgtttatgggaattaacgacactgaattagcgacacaaatctgggacttaggaagcaataaaaccaactcgatggactttgccgaggcgattgacgcatccgacctggaagccttcggattcaccgacgactttatcatcgaactgtggggtgcaatcaccgacgctcggcagggccgtcaccgaagataaatgctgactcaaccatcaggaaacgtaaaaattaacaaatagcaaccgccaagccaatcgctgaaaaaagcgtttctgtacccctttctcctttttttcgcaaataaatcataaacgtagaatggatttagtttctgaacgtggaatatttgtgatcgctttccacagatgagtaatgcatgaatttatttataatcaacagcaacgaaagcgataacaaaaatgtccaaaatcatatattaatagcatttatgtttgtcaaaatgatcagataggaagaaacctgtaaggattgtaaagcattccttccggaagaaccaatacttatgacgaaatgtgtagctagctaacgaacagcaactcaagacaaatgaaaaagacattcatttatgtgaaagtgataatacggataattttaactactattaacgttattcagatgaaaatgcaggagaaaaaagtgtacttactgattgtcggcagagcgaccgaagaagaagaaagagtttatgtagattttatttatcgactggaaaagaacggaaatcaagtcatggatggagttattttagccgtttagaaaaaaaagaagatgaagaaagtgtcgatatgattcttgtacgattaagcaatgatcaacgtttagaaatacagagttaagattac

SEQ ID NO: 1551 - DNA, 1731 bp, Aedes aegypti
aagaaacgtctctcgttcgcaaattccagccaatcttcgacgagagacagtccagcacggcaaaaatccaaaaaagcacaacgcaacttgacttctttcgtgtcgtggatcacttttcgtccgactcgcgatactacgtggtgttgtttgcgcttcgagaaaggtccggtcttcgttaaaaattgccttttttttgtacacctcccgagaattcacagctatcaaggaggaaccagagaaaacaagacttgcaacatctattgcttatttgctgctataatcaacctcccgaccacaaatctccggaaccaagcaggcgagagcagcttctattgaaggccccagatttgcacataattcgctaacaccacaaacacacacaacctaccctagaacaatggccccacagcagagaatccgcatggccaacgagaaggctagccgcaacatcacccagcgcggcaacgtgcccaagtcgaacaagagcgccgaggagaagtaccccgtcggaccgtggctgctggcgttgttcatcttcgtcgtgtgcggttcggccatcttccagatcatccagtcgatccgtatcgcgtaatgcacgagctctggcggcggcgaagacgatgataagctgaacgcatctcacaaacataacacacgtgtgttttctttttttgtaaacaccactatttagtactatactattaccgcatacggataagtgagaaggagggagaggggtaacagattttgccaacgtccgagaaagtcttttctccactgtttttttagttttgattgtttttgtcagtgtataaccataacctcaccttccaatggaattccttttgattcgccggaggaaggctcgagggaaggtgccactggccacattttcctactataaccgtacaatgagttgacacacacaagagaacacactacaagcaaataatgggaatcaaacagcacacagagacgagcaaatattccgtttttttctggggttggcagcatttaccgttgatacggttggtacgactggtaggagacgttatgagcggtccaattctggtattgtcttgtaggaagtctgtttagatgaagatgtgaattggacattttgaacgaaattgcataagcatgaaattgaagacaaagaaacaattgtaacataatcacacacagtttgtcctttctcttgcaatatattaagagtcccggaaatggggttaaaatgctattggttatcgtgtaatacaactatgtaaatttgacaaaaacttttacctcttttgatattttttattatttttgtcgaaacatttcctttagctacttgagctctaaatgaaccgtgatccgatttgctctattccttagatataatgtattgctgacaagaaaataaagacacatacacatgaaatttgcctaacaaaaagaatcgacgattgtgaacgaatcctcatttttttcttctaacaacaaaaggaaactctataggtagaaaggtagctgaaagaacacatacaaaacaacatcctacagttggatcaggaaacaagtaaatcgaaatcggaggcacggacgagtcgtttgcaataaacacacaaaatcggaaaagaatgtgtaatatgaggaaatatatttaaatgtgcaaatctttaaattaagccaaaaataatgcgatactttgaattcattgcaaatacaacacgatagaacaaaacg

SEQ ID NO: 1552 - DNA, 669 bp, Aedes aegypti
agaggaatcccagcggtatgaaagaagtgccttccaggaaattgcccgtcttttgccgtttgtccggctgctgatgaagccaaacgagccaaacaccccgatcaaattgaaccagggacaaatatgaaccatcctgtgccacctgcaaggtatatgagggacacgcaactaaggattttgctgccgcagtgttatggtaaccgatacgttcgcaacgctctcatcggtggtcgttaagcggaattcgaaccagcagataattgtgcctccagcggaaattgtgcacaatagaaaccaaaaagcatcgacaacgccgatctctgcgaatcgatttccatagttgacgagcgtcaacaccagcagcagtaaattaagttcccttcggcaaaatgggcccacctcaatatcaacgggaagtcacactgaacaaggaagaatatatgaaaccggcaaaaactcacgcggacaattcggctgcaacaagtggattggcaacaagtgaaggagccacggaacaaaaagacgacaccgtagttaaacccaccagtgcgatgagcgaacataccgaaaaatagtcgctcaaaaggacagattgtcgatagaaatatgtcacgacctgcttgttgaaaaaataaatggttgatgatcctattctttgtatgtttggtt

SEQ ID NO: 1553 - DNA, 1137 bp, Aedes aegypti
caacagtttactttaaatttagctgtaaataattatgtcgtatcgtagtatcgccactgtcgccgtgctttgaagttgccatcgccggataccggaaatcttcatcgcgcatagttacataaattcaggagaatgaccgacaactcttgtcagcttccacccctggcaatagatatcagtcgctacaaggtccacgttgtgggcgactacgcgacgtgtcaggatttcacgcttcaacttaagctccactgcgaagattacccggttctgggattcgattgtgaatggtggtgtaccagtagcatgggcaacaaccgaaaggtagccctattgcaactagcgtccgccggaggtctctgcattctggtgcagatgacgcgtttgcacagtataccgcaagaactgagcgatctcctgcacaacgatcgtatcctcaaagtgggcattggaccgctcgctgatggtatcaagttacaccaggattacggtctggccctaagaggcacaatggatctgcaaacgctggcacaacggttggacgttccagtgccgtacggtatgaaagctttggccaagagtgtgcttgggttcgagatggacaaaaagaaaaacgtcattttatccaactgggaaagacctttgctaacgaagagacaaatcgattacgcttcgaaggatgccattgtgggattggagattttccgggcgttcaaccaaaggattcagttatgtgaaatggaaccgttccgagacgttcgttaccagattccgaaagttccgaagcttaagaaaccaccacccccaccaaaacggccccagaaaagacaaaaaccgcatgcaaaacggatgaggctagacgtacggcaggcccagcaactgcagggacatctgtatacggaattttgatgaggttgatgaaggtatttaggaactatgttcattaaggtataaggtatgatggtttctatgaatatctatcttctattttgtggggaaactgtttcaacgaatactcgtactcactgccaactgcgagcaatgagcttttgcaattaaattcgaattgttattttaatttttagtgtagtatttaaaagagataagtattaagatgaaatataaaagaatttattgttg

SEQ ID NO: 1554 - DNA, 1449 bp, Aedes aegypti
atggatgagttctctctagcgtttgatgataaccgacagagtgcggcaacggcagccacgttgcttcccccgggcactacaaccctggcccagttatcgtcccactttgaagatctccaactgaacagtccgggcagcggagggggcggtggtggtcccctgaatttggccagcactgagaaccattcctcctccggtggcaacgtggccgccgtcgacgaactgattcagcaaaactccaaagtgttcgatacgttcgtagcgatgatcaacggattggcgcccaaggtcgaagagcggccagtcaaatacaagtcgcacacagagtgcgtcccggtgccctcgtccgagcacgtggccgaaatcgtcggccgacagggctgcaagatcaaagcactgagagccaagaccaacacattcatcaaaacgccgattcggggcgaagaaccgatttttgtgatcaccggaacgaaggaggacgtaacgagagcgaagcaggaaatcctatccgcagcagatcacttcagcaccctgcggtcatcgaagaaacaggccatggcactgctggccgaaagtcggaacatgctagggtacagcacaccggacgagatcacgatccagatccgggtaccgcagaaggtggtcggcttggtagtgggacccaagggagcaaccatcaaaaacattcagctcaagaccaacacgtacatcattacgccgaagcggaaccaggagtcggtattcgagattacgggactgcccacgaacgtccacacggcgcgacaactgatcgaggaacacattgcaacccgggccggaacgtcggccaccagcagctccagtgcgagttcgagcagctcgagcagttccagttcgagcagttcgagtagtagcagttccagcagcgggggcagcagcactgccaacacttccccccagagctccctgaccaacggacatcacgatttgctgcagcagcatggcgtcaacggggccggtgtcaacggtctgcatggtctgcatggactacaaggtcatcaggacttcgacacgaaccagttcatcatcgacaacctgctggagtacttcaacaacatgagcacggcgtacaactcgccgacaaacggcggggcacccaccctgaacggcctggtcaatcaccatcacctaacggcggcaggcctggacaccaacggcggcaggggggtcaccagcgggcactgcggcctcggtgccggccttggcagcggaaacggcggcatcaacgggggcagccttggcgccatcgaaagcgtaccggacttccggaacatctgggagaacctgagcgaaagtcagggctccggcgccggtaccgacacggacaattcgtccctcatctggaccctgccctcgtcgtcgcgcaactccgtgtcctactcgccggacgatttcatctttcagcgataa

SEQ ID NO: 1555 - DNA, 1962 bp, Aedes aegypti
atgttcaatagagccaccaatgctgagacgaagtggcagagagcgctatctgcccgacaagctgcgagattacttttttttccaatccgaggactgccgtcaaccagatttccagaagaagttggtgaaacagtggtcggcatctacgcaacgcacctcggcgacgtgtccaacatgatccggacggacaccggtctgaacagtctgctcacccacaaaccgccagacgccctgctgacgcaaagctcgctgaacccgttgactatgtccaccccctccagtttgcttgggcacgccctattcaacccatcgacgacggccacaatgtccacgagtggcggcgtgtccaacatcatgagcagcagtgccgttgggggggtgcacggttcggcccactccggactggaactggccggcattggcgtgggcgatggaaccggaatcgacatcggcgatcagttggacctcaccggaacgaatctaattaccatcgacggtacgctggatgatcggttgcatgcggacgatgtctaagaagcactgcgcgcgcaccggtcggtggtgtatgttggtaacacgttttgcgacttctacactgttttagacttttagccttggttagttcataatcgtataatatttgttttgttcgaggagcagaccctcgttgcaagtagggtcagaactcttccaattgctcccgttcatccacgaataatgcattgattattgtcccgtcccagggactccccagctgaacctacaaatgtcatttcattcactgtcatccacttgtccttcgaattataggaatatgtaatgctttattaggtttcgctcgctaatttgtcgatatactgtaatattataattctacgcgtaaaacaaacacaaaaaatggtagtttggtaggcttttttgtactattacgattactctcatacatgtgtaacaaacagcaacaacaggaaacaatgaaacaaacgagcagttctaagatatagttatacctaagtagcaagcaaacccaagtcaatcgtcggtcgcccaccggatccacaacggtgggtggggaagctaaacgacgaatgcattgccatcgcacgcagatggcgtctgtagtagtgagatgttcgattttaagtaatccaaaccccgcccttcccaaggaaattcctctattcatacactttgttttcctacttgtttcttatagaacactgtgcaacattttcgaggtcatcaaaattatttcttcagatcctgaaagtatagacccatactagcaaaatttagagttacgccctttccaattttcagcttgatttttcctaaatacggctatatctcacaaactactgagaatttccccatgcaaccttcggacgaaatgttcttcccataaaaagacataactattgtaaaaatgtcctggcgatattcccatttttttgtgatattttggtacaaaaactctgaaaaaaaaaatcgcatcccaatagtttatgagatatgggcgtactaaggaaaaatctagctgaaaaaaagaaaaaggcgtaacatcaaatttcgaactaatctttcaaaccctaaagagggttttgctattatgggtgtgtactttcaagaatcgacgtcaaaattctattcgcattttgtgtgttgcacagtgtaataaagccgcagcttaagtcccgccatctttgcgaatggacgttactagtaggttactacactgttcttaatttggcgacagttttctcggacgattgaatggatagcgtacggtgaaagtgagggtgttaaaatctaaccgaaagaagtgtgctccattcaagaataacttcttttaacagataacctactgattcagcatcaatttgtggacccttgggtttgagagtatgttcgtaccgcgtgagtgaatggtaaatgcagtatatatttcaataaactattttt

SEQ ID NO: 1556 - DNA, 1752 bp, Aedes aegypti
atggccggcttccgattcaatcttgaaccctcatcagcaggaagccagctaccgagccagcaggtgaccgtgccctccagcggaatcggcgcccaagtgcaagccaaagtccaccaaacgacaacgacgatcggagtcccgacggggccgatcaccattgtcgaaaaacaacagcatcatcatcagcaacagcagcagcacccccaccatccgaatccgaaccgtcagcaaattcatcagcaacaacctcagcaccagcagcacaaggaaataaagttccgttcggcaccgatcaaaaccgtttccaatggatcgaccatgtactcggtgctgtacgcggggaatggcaataagatcacgatcaaaaggaaaatggacccaccgcacattcaacggaaagccacaatccacacactggacaaggaaggccagatcaaactggccaaaaccctggcggacaactcggctgccatgagtgggttcaagatgccccagacgaccggactggccaccagtggcggaggaggagccatgggaggacaaggcaacgtcaccgtagttaacgccaccaatgccggagcgatgagcaaacagactgccaaacagttgctcaaacggagagggtgtcggtgtggaaatgctacggccacccccggaaaacttacgtgctgcggccagcgatgtccctgttatgtcgattccaaatcttgcgtcgattgtaagtgccgaggctgccggaatcctcatcgggctgatggcatgaaggttcgtccgcacattcccgagctgcagaatctggaaatcaatctccacaatccgaatgaagaggaagtcctcacaacggccaccacgactgttttagctcctcagcagacggtaagctcgattagcaccaacagtggaactcacataaacgtccttgggcagacttcgctagccagtacgagtgtcggtcaacagccgaatgccggcctgacggctgttagcaccggagccaaaggcctgacgcagatcagccatttgcccgggggttctacactcaaaattacacccacatcgatagccaacgtgctgaacagtacaaatcatcaattgatcggcggtcccgacggaatggaaatggtcccgagcggaggactcctggactctaatgggttcagctacataacgcaggccagcttggatacggggacaggggtcggggtggcacctactggacctaccaccactcagtacaacgtttctaacggcgggacaattcacgttcatcgaagcgtattctcgaagatggcacgaaacggtggaggtgatttagcagttgcagcagttccaggtcgaagccacaatccattgagtctgccgtcaattcagctgctccagggacgcaacaactggtctacctggaggttcgctgtgcagacatttttggagttggaagacttatgggaaactgtgaagcctgcagaaaatcccgacggaacattcgttcaagtggatgcatcaaaagatcgaagagctcgtggcaagattattttactcttggaccccgtgaactacattcatgtaaaggacgttacgacagcccgggagacgtggtcacgcctggaagcggcgttcgagaactccggtttaacaaggaaagtcggactgctcaggaagctaattacaacatctctcggaaactgcgagtccatggaagccttcgtgaatagcatcatcgaaacggcccaccagttgcggggaatcgattga

SEQ ID NO: 1557 - DNA, 719 bp, Aedes aegypti
aagccaacgcaacgagtgcaattagttaattaccgacgaccgaacggttcttggaagtttaagtttttttcttaccaacaaccccacaaccttcaaccatgttcctgttgcgaagcagtgccctagtgattctggcggtcgcgatcgctgtagcggcggcgtcgaacactaaggaagaacagcagatggtgaatctgatcaacgaaatcgaccagcaggaaagcttcccgctgttcggtgggctgagtgtagaacgcgtcgaaggtgcccgctcgtttggtggagacgctagcgaagatttggccgaacgtgccgtgcgttatctgaacacgcacagtgtgaagttcaacgtgccggaagaggagggtgagggtcgtcggatggaagaagcccgcagcagccgcctgaagaaggtcttcctgcctctgctgctcgctctgaagctgaagatgtccgttgtcttgccaattctgctcaccatcatcaagctgatctctctgaagggactgatcgccggactgctggccctgaagttctccatcttcaccttcctgaaagatctgttcaacaagaagcaggaacgtgtgaccaccgcctacatcaccagtgctcagcccgtcaacgccgaaatcgtccaccaggactggcaccgcaacgggcaggcttcgccacaggaactggcttacggtgcctacaacccttacgccaccctacagtaa

SEQ ID NO: 1558 - DNA, 960 bp, Aedes aegypti
tcttgcctcgtttgcctttcttgtgtccgtctcacagttctaaaaaaactcgcatgtgagtcgttctgccgccaaatttgccattaggaacctactaagtaatgcattctgacttatctccacatctgcatacgcccgagtgtaatcggctgattgacctgctcaaaaagtgtcacgaagagaacaaatacgccaaattcttcggagtttgcaacgatttcgaccaccaggtcgtaaactgcctgagagacgagcggaaggaacgcagccgacttaaccgggagcgatccctggagaaacaacgcctcgtccaggagcgcatgaagcagtttgataaggaggaaaaatctcggccagccgcataaaacatgacggaaattatgaagagctattacctgcaagaagagcagcaagtcatttgcggcgaaacggtttcgtcgattgtggcagatttcgtggaggattacccgtccacggtggatcgcttttttactcgttattactatgtgcaaccagggaaggaaaacgaaccccttcgagtgctgtttcattcgaataggatctgtttgattggtttggccccggagcacgtggccttcgagaaagggatccaggcagttacgttcgaggtgggccggattgatcgcagcgagaaccaggtaagtgggaagaaaaagagcggtgggatgattttgcagatggattccactttggcgctgatcacctgcaaggatggaagtgtctacaaagtgcgaggatgtgttcaagggaagctggtggaagtgaacaagcgtttggttgagaatatagatctactacgggaggaaggcgatggatatgtggcggttgttatgccaaaaccggagcagtgcgaagccgttaaggcgaaactaatgtcccgagaagagtacgataagaaatacggcaaacggatggttagcgagtgataaaagaggtaaa

SEQ ID NO: 1559 - DNA, 258 bp, Aedes aegypti
atggccccaggccattacttctgggcaatattctattttgcctgtctgtgcagtgcgtcactagccaacaacgccaaggtaaacttccgcgagaaggagaagaaaatcctcgatcagatcctaggcgctggtaaatatgacgcccgaatccgtccctcgggcatcaacggcacaggtaagacccggtccaatttgctgtttttaaccattgccaatccgtacttgtacaattcacacaccatacgtatctttgcgtaa

SEQ ID NO: 1560 - DNA, 1278 bp, Aedes aegypti
atgcgcaaatatttgccaaaccatccgaactgtacaaacgctccaaaaactgataaatgcaaaaccaaaaacaaaattttagatggccccgccgttgttcgcgtcaacatttttgtaagaagtatctcaaaaatcgatgacgtgactatggaatacagcgtacagctaacattccgagagcagtggctggacgagaggctcaagttcgacgacatcggaggccgcctcaagtacctgaccctgaccgaggccaaccgcgtctggatgccggatttgttcttctcgaatgagaaggaaggccacttccacaacatcatcatgccgaacgtgtacatccggattttcccgtacggttcggtcctgtacagcatacgaatctcgctgacgttggcctgcccgatgaacctgaagctgtaccctctggataggcaggtgtgctcgctccggatggctagctatggctggacaaccgctgatctggtattcctttggaaggaaggtgacccggtacaggtggtgaagaacttacacctaccacgcttcacactggagaaattcttaaccgattactgtaacagtaagaccaacaccggtgaatacagttgcttgaaggtggacctcctcttcaagcgagagttctcgtactacttgatccagatctacattccctgctgcatgttggtcatcgtctcgtgggtgtccttctggctggatcagggcgccgtaccagcccgtgtatccctcggagtcaccacgctgctcacaatggcaacccagacttcaggtatcaacgcctcgctaccgccggtgtcctacaccaaggccatcgatgtgtggaccggtgtctgcctcacgttcgtattcggagccctgctagagttcgctctggtcaattacgcgtcccgttcagcggacagggctgcggacattcaacgggagaatatgaagaagaaacgacgcgaaatggaacaggtcagcctagacgctgcgtccgatctactggacaccgatagcaacgccaccttcgcaatgaaacccctggtacgtcacccgggcgatcccatggcaatggaaaagctaaggcaatgcgaagtgcacatgcaagcccccaagaggcccaactgctgccgaacctggtggtccaggttccccacaagacaatgttcccgctcgaagcgcatcgacgtcatctcccggataacgttcccgctggtgtttgccctgttcaatctggtctactggagcacctatctcttccgcgaagaggaggaagattag

SEQ ID NO: 1561 - DNA, 2583 bp, Aedes aegypti
ttccaccattcgcgcgagagcagctttgaggtgaattggtggtggaaaaaatccttccagtgttgtgtttacggtgtttacctgaagcgtgtttacatgttgtcataaaattagtaaaattagattttttcattgaaaatctcttaagttacaaaaatatacaaatccattgatttaacgtgacaaaatggttgattccatagattcaagccgctgccggctttgcttctccacgtcgaatctctcgtcggcggatgaaatctttccgctggaaggcgttccgaaccagaccctgatcgcgatgatctacgagtgcacctcgatccgggtcagcttcgagcaggactaccgttgcctggtgtgcagccagtgcttgaggatgttgaagcagttccaaggcttccggaagcgttgctgggctaatgatcggcagcttcgcctcgagcgaggcacgggaacttccgacgatgataatccgcttgattgcgaagagtatgggagcatccagtgggatgacgatgatggaaatgataggacagctggtgaggatggcttctacaaccaggtgaagcagcaaatcaaggattatttatacaccaagacgaagcaaattgaggagaaaacgatggccaagttggatgaggccctgcggaatcgagaggacggaattgacaggcatgacgagaatggctcgagagttgattggaagggaaaatatgagactttgcagaaaaataacgaactactgcagaaggcgttcaaaaatctaaaagagaagctaaagcaaacagaacagatgttgaaaagccttaagagggaatcacttaacggcatagttgttccagcagaagagtttggaaatcagcaagaaggcggcatgttcacaatgcatccggctattccggaaatttcaacagaattcctacagaatctgaactacaattccggtcccggggaaaaaggtgaccggcttttcatatccaagctggcggtagccgttttcggggtagacgttttggtcaattcaagtgtcaccgggaaaccgtccaacgcacatcataacattccgccgaagccgccactctgtccggagaaaattgcagcaattgaagcgaagctctacgaacgggtcgagcaggaagtgggccgctccaaccgggcggaattgctgcagcgttccggcgagaaggtggtccgactggtcgtctgtcagaagtcggtaaacctccgtaagcaggtgcaaaagcgaagtctgtccaccgggggcggaagcggaaacgggtcttttgctgaagacgacccggaggaggttccaagaagacgcaacaaacggaaagcatcgtgagtatttcgaatacatgtatgaatgaaacaaatcaaggttttctatcgcacgtatttctagagaaagccattaataattaggtacattttgtgtgttaaaacattttaaaattaattgaaacttaaaagcatttcgtcattctggttgatttggctcattcagtgctcgcttcgctccaagttgtgtccccctcagcgcggttccttttcgcgatgtccgccttcttaaggtttccgatcttttgcgctatgtaacgtttgatgattcgttcgtcggaattctttcggatggtgtgaatatcatccagtccaatgcgcattgcagtccgttcagcgactttgtctgaaataaaagcaatcttaggaaaagaaatcccatcacaagggctggtagtgactgaatgtcttaaagcgtttcagtaaggattgctctgagaatctcactagaaacgtctggaggaattcttttactgttttcggggaaaaatcatacacgaatatcttcataaatattcaataaaccattttgaaatatttattttttttagagtaacagctaaagaagttcttagtgaagtgctgtaaaaatcataattctgcaacttgttccgtaaactactattacagcacctgtgatacctaggactcaagtttcgggaatcgaccggcacttaggtcgtaccgaaaagcttcaaatctcttcatggataataaatctagtaaagcatcataaaggtggcattttggcgataaattatacctgtccacaatagctgtattcgtttggcgaaactgttgattaattgatagcaggggaaatctgtataagaaggaggtcgaaatagcctgtgttaggagttttttttttctttaattccaacaccctgcctttctggcaactaccgcaatgcaactccgacatgactgacaactgacgaaatggcaacgatgtgggtgcattgtaccttacatttttaataaaaagagaccgattagctctaattacatatgccatgggtactccatttacacggaaaccacgcagatgaagtatgtcctacttcagagtacagctgtaatcgtttttactgaaattaatagataaatcaacatcaagagtttactgatcccaaacccaaaccgaaactgaagagaaaaaaaaaaacactcaatcgatgcggatttacaaccgccatcagtaatgagaccagaaaggtacatctcttggagaaacttcca

SEQ ID NO: 1562 - DNA, 2244 bp, Aedes aegypti
ggatcgctcgatatttctttacgtgtttatcaaatgaaaaattaattacccttccgaacggatcatgttcctgacacgggtgtgctgtttgcggagtgtcctccgcagtagaaacctactggtgccaccgtcgggtgcgagtgcgatgtcgaaaaatcgagtgatttcttcggtggtacgatttccgccactgggccagcagccgtttcctcctgcggcgggacaaagggccgacgaaggattccagatagccgatgaaagtatacagaagtacttggagaacatccggctggagtactatgcgctgaaggtgtccgaccagctggacaaaaaggacatcaaacggatggcgttgttgtctcatgtggtggaaatgtacgagcagaggcgcatcattatggacaatctcaactcgctgcaggagatgagcactgagaaggacgaggacatgctgcagttgatgagagaggaaaaggaggcatacaccaacattttacgaaaactggacggagagatcatgaatggaattttatcaatggacgacgaagaagattacaacacgctcattttggaagttgccgctggagtgggtggccaagaagcaatgctgttcagccgggagctgttcgacatgtactgcggcttcatcgattacaaagggtgggaaaccgaagtgattgaaacggaggacacagagttgggaggaatccgccacgcatcgatcgtggtgcacggaagggatgcctaccggtatctcaagttcgaagctggtgtccatcgggtgcagcgtgttccgaccacggaaaaatccgctcggatacataccagtacggcaacggtgtccgttattccacgaccggacgaattcgaaatcgagctcaaagataaagacttgaagattgaaacaaagcgcgccagtggagctgggggtcaacacgtcaacaccaccgatagcgctgtgcggatagtccatcttccaaccgggatggccgtggagtgtcaaacggagcgctcgcaagtcaagaacaaggaaatcgccaaacagaaacttttagccaaactcacccagcaggaactggagagcaaattcaacgcgactcagtcgatgaaaaagtcccaagtgggatctagcttgaggaacgagaaaatccgtacttacaactacaaccaggatcggattaccgatcacagagtcgacggtggaacaacgcataatctgaaagcattccttgaaggaggtccccagttagaagatatgattgcaaagcttcaagccatgcatcggaagaagcaattgatggacatcattaacagcacaatagaaactaagtagggcaatagtgaattcactagttattcagataacaatttctccattaaaacaattcaaacaaatcattgttaatccgttgaaaaaccgacttttatttcgctaaacttccccaatccccggcttgtcccaactgagtcacgtgctcccggacggcttgatcgatgattttctgaacctcccgacatccctgcagtgccgtttccagcaccttgggcaaatggtccagatggaaccgttgggacatttccataaatgcaatcttcccactgctgggcagagaggctacggtcagtgtcggtcctccgctcatttcctccaagttggacacatccatcaggggtatctttccggccagtgaagctgtacaagcgcagacgtactccttcaagcagattcccgcatcgatgagggccagggtagcggcgtttaccgaagcacaatagttgccaccgtccgccatcaggacttctatgtagacatcgatctgcgatttcggataaagttcggtcttgatggccgcactcaacgcttgctgcagatggatggtcatctcctggcttttcctatcgccccggggtcgccgtttccgttccccagtagaaaacgttgccatactgtactgacagttgacaatcacctcttcgtggctgctctttttagccggggcctgatggggtccgtaaacagccgccaggaccttggtgttgccctgttcgatgtaagcgctgccatccggctggctgaaaactcccaatttgcactgaatgcggcgcagttcgttggctcgccgtccgtccagccgaaggccttcgtctgataggagttccattgattacaggggaaatatatcaggcaccagaaagaatactaaagtggtgaacggagcgcgcgtggttttgtttacaattcgg

SEQ ID NO: 1563 - DNA, 1332 bp, Aedes aegypti
agcggatcgtctttggagatagaatataaaattggtttgcagttatcgaacgaaacattcaagaacgttaaatcgtaatcttacagagaagtttatctcaacataaaatgtcgctggaaatcgtttgcagattgtgcctgcaagatgggccagatctgatgtcaatttacgacgagatgatcagcagtacgggagaatcattggagctggatatagcacaacttgttctccagtatttgccaatcgaaatcgttaaagtggaaaacattgctcacccgtccatttgcagtgactgtcggttccaaattgagcagtggcatcaattctacacatcgtgcctaagcaatgacgatgtctaccaggaacgactcatggagaagcaattggacccagattattttccgatgccactgaaagaagaagtaatggatgatgatgatgatgcacagagtgatgcggaactgtatctggaagtcgaaccggtcgacgttggagtcgtcaccacgggtgactttcccgacagtgcaaatgctgacctgaagcatgacacaagcgactccaaaattaccccgccacagaaactggaaaagttgccgaaaaaacgtggtagaccaagactgacgtctaccgaacggaagttgaagcagacagcaaagcgtgatagctcaggtatcaaaccttcggccaaaaaaaactacagatatacaaaaatgtgtcccatttgtggcattttcttctcgaacctacctgaacatttgcggaaacatcaaaatgatcgaaagtatcaatgtccgcactgccccaaaaccttcattggcagatccaactatttcacccacgtgaacatgcacacccgggagaagatgtacaaatgcacgcaatgtgacaaacagtacatctacccgaaaagtctgaagatgcatctgatatcgcatgtcggggaacgaacgttcgagtgtacgatatgccacaagacgtatctgcagaagaattcgctggacaggcacaggcgtaatcatttcgaggaaccgaagatcgaatgttctgaatgtgggcataggttctacactaggggagatctgaacaagcacattacaaagcatcaaacgatcaaagcgttcagctgtgaaatctgtggccgtcccttcggtcggaaggataatctcagaacccacatgaaggtgcatcagaaatagacgacagatgcttgccatggcatgaattggagcattcctttgttagtgcctaattctacagtaacttcaaagttgcacgttgttttcaataaattgaaggcggttcaaataatatttccacaataaacggttgacc

SEQ ID NO: 1564 - DNA, 1280 bp, Aedes aegypti
atggagcgcttctgcaggttgtgcttagaaggtggttccgatctgggacccatctccttcaatgacggtaacaaggaaatcgacaatgttgacgacgcttccacagaacaaagtttggtacaactgattctacaatatctttcgattcagatcatcaaggtggaaattcccatgaacacctacatctgcacgggttgtaaatctctgatcgaggaatggcaccggttccacacctcctgcctcaaaaatgatgaaatctaccagcaacgcgttcaagagaatctcgatgcatataagcttggcaaactggtcgcaccgatggggctcaaacaagagcatttggatacgttcgacggtgagaagtctgtccaggaggaatacgatccagattacgatccacaggtttcaagcaatgaaggttatggaaattataatgatgcagcagataacgaaaatagcgatggagaagacgattccgagtactcaacatatgaatatgagattcttgaattagggtcggaatcgaaagctaaaagcagaaagggtaacaaaactgactcgagaccgctttcgacaagacgaggaagaccgagggtgaaaccattggatgacaccacatctaaaactacaaaacgggctgaagtctgtacgatctgtgggaagttcatcaaaaatctcaccgagcatatgagaattcacaacaatgaaagaaggcatcaatgtccgtactgtgcgaagtcgttcgttagtgcttccaattatagctcccacgtgaacatccatacccgtgcaaaaatgtacaaatgtgacctgtgcgataagcagtatgcgctgctgaacagcatgaagcagcaccggatgacgcacttcaaggatcgaatctatctgtgcccggtatgtgggaaggcgtactatcaaccgacagggctggccagacataagcggacccactttgagcaaccaaccatcaagtgctccgagtgtgacaaaatgtttttgactaatggggatctgaggaaacatttcaaaaagcacctcccggagaagccgttcagctgtgagatttgcagccgcgctttcaatcgaaaggataatctcaaaacgcacatgaaaacccaccgggaaaaaatacccaagccagatcctggagacaaaccagccgaagattccgtgccgcatgtcgaaatcaagttggagatctccaaggcgtaaatagctctgttttacactaagcttgttcttatataatttcaagagatttgaaatacagaatgcatgat

SEQ ID NO: 1565 - DNA, 741 bp, Aedes aegypti
tcaatggaactcctatcagacgaaggccttcggctggacggacggcgagccaacgaactgcgccgcattcagtgcaaattgggagttttcagccagccggatggcagcgcttacatcgaacagggcaacaccaaggtcctggcggctgtttacggaccccatcaggccccggctaaaaagagcagccacgaagaggtgattgtcaactgtcagtacagtatggcaacgttttctactggggaacggaaacggcgaccccggggcgataggaaaagccaggagatgaccatccatctgcagcaagcgttgagtgcggccatcaagaccgaactttatccgaaatcgcagatcgatgtctacatagaagtcctgatggcggacggtggcaactattgtgcttcggtaaacgccgctaccctggccctcatcgatgcgggaatctgcttgaaggagtacgtctgcgcttgtacagcttcactggccggaaagatacccctgatggatgtgtccaacttggaggaaatgagcggaggaccgacactgaccgtagcctctctgcccagcagtgggaagattgcatttatggaaatgtcccaacggttccatctggaccatttgcccaaggtgctggaaacggcactgcagggatgtcgggaggttcagaaaatcatcgatcaagccgtccgggagcacgtgactcagttgggacaagccggggattggggaagtttagcgaaataa

SEQ ID NO: 1566 - DNA, 1615 bp, Aedes aegypti
gtcgtcattttgacagctgcggtgcttttgattgttggaattcattacgcttttgaactcgctgcagctgaaattctgcgaataagtgtaaatttcccgaaaattgcagagaatatcggtgcaactgtgtgatattacggtagagagtaagactgtgcatcgtgttccggtgaatttctgaggaaaaagctgggatcgttggtgtaatcgcgtccgaaacggagctccttataggaagacaaaattcgccgcccgcagagcaaacccactagacagcgatggccaaggtgcacattaccaacgtcgtggtgctggacaacccgagcagcttcctgaatccgttccagttcgagctcacgttcgagtgcatcgaggagctcaaggaggacctggagtggaaaatgatctacgttggttcggccgaatccgaagaattcgaccaggttttggacacaatctacgttgggccggtccccgagggccgacacatcttcgtattccaagcggacccgcccaacgttgctcgaatccccgaacaggacgcggttggagtgacggtagtgctgctcacatgctcctaccggggccaggagttcgtacgagtaggatactttatcaataacgaatactctgaccaggatcttcgggagaacccaccggccaagccactgttccatcagatgaccagaaacatcctcgcttccaagccccgtgtcacaaggttcaaaatcaactgggacgacacgccagccaatggcagtggaacggccagcggcatggaagacgaagccggcatgaccatagacaacggagcccacgaagaagcggtcaccactgccaccacggttgccgaaatgatgtccgaggtgacgcaaggcgaaagcagtatgaccctgccgcgagagttcaatgaaaattccaactcgctggcgatggagtgttagttcttcgacacgcccaccagataagaaaaaaatgtagtttcctttgacacagctatatgtttctttctatttccccccctgaacaatgtaaggctgctgttgttttgcagttaagtattgtactagaccctttatgaagcattgtacacactactgaagtcatgagaccccaattccatgcaacatctcgattttgtgtcgttctaattttttttttgtcaataaaccaacaacagtaaaaatattgggtcctagctcaaagctgtaccgcaacaagtgtttttatcacactattaaattatatatgacactcacgcgtacgtacatcgttaagggtagccgataagaatctgtaaataataaataacaaaagcgcggaagcagttagagtaataaaatattcaaattttcaatcgtacggctcgttgatctggatgacctgacctgaccccattcctatagaagactcggcgatctgttgaagtcaatcatcttcattctaaggtaatgtgaccagatgtgtcccggaaaaaatccgggacgcttgtcagatctcatctccaataaagcgcctatatttgatgtgcaatatacattcatattcattctaaggcatgtactatatactaagttattagaaataaaaagtattgacactgtactgtcaagtt

SEQ ID NO: 1567 - DNA, 1237 bp, Aedes aegypti
gcgctttgaaaatcgcgagtgagagtcgtctgcttagcagccatttttgccaaaacaaattacacccggctgctttgatctgtttatgcccatcgctcacgccctacagcagacaccatggagagcagcggcccttccccgacgtcgttgaacaacttccgcgtggtttacttgataacgcaaatggtgggcgccgccatcgtcattctgatgggttcctggatcggagtgcacctcggaggtctctcatggacgtccaatccggccacccagttcaattggcatccgctgctgatgtcgattggaatgattttcctgtacggaaattccatactggtctatcgaggattccgctacgctcgcaagaagccactgaaggtcactcatgccgccattcacggactggcgttcgtcttcacggtcgttgctttggtggcggcattcgattcacataacctggccaaggttccgataccgaacatgtacacgctgcactcgtgggtcggaatggcagcggtggtgctgtttgggcttcagtacctgtttgggttcgtgtcctatctgttcccgggagtgcgcgaatcgatgcgatccacctacatgcccgtccacgtgttcttcggtgttttgggatttgtgctagctgtcgcggcttccctgctcggtcttctggagaaagccatatttgccatgcccgactaccggtacctaccaccgcagggagtcctggtgaacatgatcggactgcttctggtcgtctacggtggactggtggtgttcctcgtgacggatcccatgtacaagcgcaaagcattgccggaagatgcgatgctcctgacccacagtccatcatcgcaatagacggtgaaccccttttgccggtcccatctaccgcagagtaccgctatacagtgttatctgatgctatatgttatgctatgtgttaaagtctgaatatgtgacgtgcaatcgtacttaaagtctatctatacatgttgctatacaaatgaaagtgattttaaaatattatagttttgtttagtcaagtgcacaaatagaaggaagtggagaattaacagccagattttttacttcagagtgcaacacggataacaatatatgaatagcatctgtttgaatatatttatgtgatgcatcgaataccaaaacagcagatattgcttcaaaactgtaattgactgtaaatatttaacaaacaataaagtattatcgcgtc

SEQ ID NO: 1568 - DNA, 3152 bp, Aedes aegypti
atgtcgaccagcagcccaaactctccttcgctgcggagtcctctcgtggaccggacactggatttgaagctgaccgcgcgccgatcgcgggaatgcctcgtctggggctctatcaacgttggccttctgtccgtgctactgttcgatatttccaacaaatgcccctactccttttcccagtggtactatctggaatatgccgccgcggccattctcggattgagtgtggtttattactttggccgttacttctattacgtgttcagtagggagcctcttcgggggacggattaccagcggaagctgttgaagtttgatgtggatgatacgtcgttcattgccacgactcccgccaccgccaagaaagcaccgttggccagttccggtgccacgccggccaatatgtcttcggtcagtttgcactcgttcaacgacagcggaatgtctttggcctcttcggggtggattttcaatcggggaagtccaatccaacaacagccgcagcaggggaacacttcccaagccgccgggggaatggcctcgttccagcatcagtccttcgacgggtcactcaatgcgagtgcgaacaataactcgggaacgttttccccggcgattcggaagctgggcaacaagagcgatttcatcgtcgacgaaaaggggttgcagaactatctgagagaggtcacaaacgaagagaagaacaacagtgcctttctcgagcggatgaacatatcgggcagcagcttcaactcgttttggaacagctacaaactggacgatatgtccaacctattgaagacatccctgtatcagttgtcgccctcggctccgccaagcaagcaaaccatgaaggaacacgaaagtggaccgtataatccgatcgatgcggacgtcagctcggaagtgctgaagaaagtgtcttcggtgcagctgtccaactatgtcgccaatcttcgaatgtggatttcgatgaccatcctgcaacgggttgtagccgaaatgcagagcatcgatcattcgttcaaaactcggggattctccgacattcagttgggcagtgtcggtctggagcgattgaagaagacggcggaaaatcagcagctggtaacgctgtacatccccaagcttccgctattgattccgttcttggagatgtcaactaatcaggagtacctggttcagcgaatcaaagacctggccaaaggtagttgcattgctgattaccgttggaactcgggatcgtcctacaagggagtcaattgggatgaacatctgccgacggattctgccatcatcttccacctgttctgcacctacatggacagccagctgcggcctttgccgcaacccggcggccgtcccttctacaatcgctacgtggtcatctcggacaagaagagcccgaaggagacgctggcggaggtggccaccaagaacaaagccaagtgtgccatcctgtgctcgaatccgatgaagcccaagttcaactttgtttcggacgacaagattcacaattgcgctcatgatcgcaacaatctgttctacgtactcattcagttcctaatctacatgaagaatcatcaggaaggtctggtcgagggaatcaaccttggtaaaagcgtccccctcgaacgtgatcgactgatagtctcgcttatcgccttccggtaccatttcgcacagtttttcatcacatacggtaacctgttgggttttggagaccatcataactttttcttccgaaatgtgggacgagttgttcgatgcgctcacttacgccctacagcagacaccatggagagtagcggcccttccccgacgtcgttgaataacttccgcgtggtatacttgataacgcaaatggtgggcgccgccatcgtcattctgatgggttcctggatcggagtgcatctcggaggtctctcatggacgtccaatccggccactcagttcaactggcatccgctgttgatgtcgatcggaatgattttcttgtacggaaattccatactggtctatcgaggattccgttacgctcgcaagaagccactgaaggtcactcatgccgctattcacggactggcgttcgtcttcacggttgttgctttggtggcggccttcgattcacataacctggccaaggttccgataccgaacatgtacacgctgcactcgtgggtcggaatggcagcagtggtgctgtttgggcttcagtacctgtttgggttcgtgtcttatttgttcccgggagtgcgcgaatcgatgcgatccacctacatgcccgtccacaaatccctgattcctagttggttgcttgccgccgtcctgcccagccgggattattccggtcgctgtcgtagtttcgatgttgaactccgccggtttttaaataccgttagtagaccgttcctgcggtgtcccggtgtccatctgggcagcatcccggcaacgaacccgccgaaggccgatcagttaccatatcggcagaaccaggacacgcagtggatctacaaggcccataccccaagccaccttagaagtcatcgtcgtcgaggtagagctctgcaccgatctacgtcagagaagccatcgttgcagaggcccgactaccggtacctaccgccgcagggagtcctggtgaacatgatcggactgcttctggtcgtctacggtggactggtggtgttcctcgtgacggatcccatgtacaagcgcaaagcattgccggaagatgcgatgctcctgacccacagtccatcatcgcaatagacggtgaacccggtttcgccggtaccatctaccgcagagtaccgctatacaatgttatctgatgctatatgttatgctatgtgttaaagtctgaatatgtgacgtgcaatcgtacttaaagtctatctatacatgttgctatacaagtgaaagtgattttaaaatattataggtttgtttagtcaagtgcacaaataaacgggagtgaagaattaacagccagattgtttacttcagagtgcaacacggataccaatatatgaatagcatctgtttgaatatatttatgtgatgcatcgaataccaaaacagcagatattgcttcaaaactgtaattgactgtaaatatttaacgaacaataaagtattatcgcgtcaaa

SEQ ID NO: 1569 - DNA, 1908 bp, Aedes aegypti
gacaaaaaaacggcgtcaattgacatttgaatcgcatcaaaacaatcgaactttagttcgcggcttttagtcacattttcaaaaccggcataaagtccaatgcattttaaataagtaaatctcggtttttgtggcgattttgaatacttattcatcctaaacaagcaatgtcgaccagcagcccaaactctccttcgctgcggagtcctctcgtggaccggacactggatttgaagctgaccgcgcgccgctcgcgggaatgcctcgtctggggctctatcaacgttggccttctgtccgtgctactgttcgatatttccaacaaatgcccctactccttttcccagtggtactatctggaatatgccgccgcggccattctcggattgagtgtggtttattactttggccgttacttctattacgtgttcagtagggagcctctccggggaacggattaccagcggaagctgttgaagtttgatgtggatgatacgtcgttcattgccacgactcccgccgccgccaagaaagcaccgttggccagttccggtgccacgccggccaatatgtcctcggtcagtttgcactcgttcaacgacagcggaatgtctttggcctcttcggggtggattttcaatcggggaagtccaatgcaacagcagccgcagcaggggaacacttcccaggccgccgggggaatggcctcgttccagcatcagtcctttgacgggtcactcaatgcgagtgcgaacaataactcgggaacgttttccccgtcgattcggaagctgggcaacaagagcgatttcatcgtcgacgaaaagggactgcagaactatttgagagaagtcacaaacgaagagaagaacaacagtgcctttctcgagcggatgaacatatcgggcagcagcttcaactcgttttggaacagctacaagctggatgatatgtccaacctattaaagacatccctgtatcagctgtcgccttcggctccgccaagcaagcaaaccatgaaggaacacgaaagtggaccgtataatccgatcgatgcggacgtcagctcggaagtgctgaagaaagtgtcttcggtgcagctgtctaattacgttgcaaatcttcgaatgtggatttcgatgaccatcctgcaacggattgtagccgaaatgcagagcatcgatcattcgttcaaaactcggggattctccgacattcagttgggcagtgtcggtctggagcgattgaagaagacggctgagaaccagcagttggtaactctgtacatccccaagctcccactattgattccgttcttggagatgtccaccaatcaggagtacctggttcagcgaatcaaagacttggccaaaggtagttgcattgctgattaccgctggaactcgggatcgtcctataagggagtcaactgggacgaacatctgccgacggactctgccatcatcttccacctgttctgcacctacatggacagccagctgcggcctttgccgcaacccggcggccgtcccttctacaatcgctacgtggtcatctcggacaagaagagcccgaaggagacgctggcggaggtggccaccaagaacaaagccaagtgcgccatcctgtgctcgaatccgatgaagcccaagttcaactttgtttcggacgacaagattcacaactgcgctcatgatcgcaacaatctgttctacgtactcattcagttcctaatctacatgaagaatcatcaggaagggcttgtcgagggaatcaatctcggtaaaagcggtattaacattttatgtgttctcgaagattaaggctcaataggtaggtattcactcttaatagattaactaagtagttttgacattgtttctgaatttaacacgttttgtgaattgt

SEQ ID NO: 1570 - DNA, 1410 bp, Aedes aegypti
gagaattgaactggtataaagttgttcattttccattatttacctgctttcgccagagcgcgataaaaatatcaagacttgatacttagtatacctagaaatatcaagacacttattcaagtgcaccaaataataaaaaaccatggctggaacgtctcaggctgcaacgacaagtgaaagtgaagacaacatggatctgcttcaatcgccccccagacttggattatgcgaggtttgcaatgccattttagcgaaatacacgtgccccaaatgtgagatcaagtcgtgctgcctcaaatgcgtaaacatccacaaaaaggaactcagttgcgatggcatccgggaccgtaccaagtacattccgatgaagaagatgtcccaaatggacatgatgagcgattactacttcctggaggagtgcagccgcttcgtggacgaccggaagcgcgacaaaatcaagcgctacactcggtacaacaaaacccttccaccgtcgttgttccgtttgcggtgcgctgcccgggagcggggaaccactttgaagttcctgctgcagaatttcaccaagcatcagcgcaacactagccagctgaatttcaagaccctggttatcaactggcgcgtagagtggtgcttcccgaatgcggaagggttgctcttcgtggatgagagatgtgacgagaatgcttccttgtatgatctgctggggaagtatctggaggctggcaatgggcaggatttcgttgggaaaagcaagctggagttttatcaatcgcgagggatgaatcgattgcgggtgctactgaaggccgaaggggtcaagcggagcaagaatcggttcttcgagcttaaaccgaagaaatcgctcaaggagaacttgaagggaaagacgatagtggaatatccggtgatttacgtgatcttcaaggaggcatcggatggattcgatgtgatcgaatctgatgaagatgtggaagcggaaactaagctttatcagaagtatctggacaatcagtacgggctgaagaggacctattccaaacgagaagacccggaagagaaggaaagggaaacgaaagtgcttgagggaattgatagattggagattgtccggaagcgagaggagcgaaggaagaagaaggaggcagcgcagatagaaccggccaactatctgtttagcgatgaaaatctgtggaatcagtactcgtcggattcggatggacaagtgacggaagaagaggcggacgatgctgaggaaatgctttcgccgaagcgaatcaaaaccgaaagtaaatgaagaagagatttgttaagaattgttgaatacttatttgaaattgtatcaatatgcatggatttttcacaatacttcttgttgcaagtaaatgaattaaaaaaagtattaacagt

SEQ ID NO: 1571 - DNA, 3093 bp, Aedes aegypti
gcaaaaacagaatcgggtgtatcatgaacctgctcgaatttatcctggatcgcgcaatcttactccacgaactctcgcatgttagtagttgtcaaactgcggtgcattcattttgggttcatcgctttttgttgacatctctcttcgttccactgttcgcagatgacgtgttggaagtcttcaagtcgcctcatccatttatcgtcattgcaagccaagaagtggaataaaaatattcttcgcttaatttcgggttaaaacatcgttatagatggtttaaaaccacctctccatccgactcgttatagaagctatgtgaattcgtggttcgaagaaaatcattgtgcaaatatcggaagattggttgcgaaattggagtaagtgttgggtattttgttttgaaccaggcaaatcaagtgttgtccgaaaatggctttaatgacgatgattgcccgggtggtcgacggtcttccactggtcggaacgatgcaggaagatgagcagtccggaagaagcgtactggagtaccagaaccaggccaaaatgctattccgaaagttaggtcccaattctccggcgcgctgcagcatcgaaacgggtccttatctgttccactatctgatcgaaaacgaagtctgttatctggtgctctgtgataagatgttctccaagcggattgcgttcaattatctggaagacatcgcccaggaattccacaacaactatggacggaaggtaaattccgtgacgcggccgtacgccttcatcgagttcgatatctacatccagaaggcgaagaaatctttaaccgaccggcgaaggaacatcaatacgatcaacacacagctgcaggatgtccaaaggataatggtccagaacatcgatgacgtcctccagcgcggcacagtgctctcagagctggacacgaaaacgcaaaacctgtcgatgctgtcgcagaagtacaagaaggatgccacctacttgaatcggaaatctctgtacgtgaagggagccgtggccggaatcgtgatcatagtattcatcctctacttttgggttatttaatctctcgtgcgtaatgatcgtcgtcgtcgtcgccgtacaataaaattaagatgcttagccggatgataaatactgacacagtgttgaattgacctagttgataaggtgagaggtggacaaagggcgttccgaaaaagtggcgggccaaattttactgaatatgagttgaaagtgcatgaaacgtgttaatgtgttttctgttccattaatttgaaacctgcataacttaattttctgtattgcaagatggggcaacgtaaatataattattaaactttcaaagtaacttttgcagagttgctttgagtaatttaccattctctttagaaaaagttcattaaaactcaagatgtaattcagaacatctacaaatttaacagttgtatattcgttcagaaagtagcgttctctgaatttccaataatcgacaatttgccccatcttgtctacctagtatcttcagtccaatttatgttgaaaactgggcactcatagagaaatggatgtaaatatttcagatggatacttttcaataattagtgactgaaattagaaagctgtagtaacgaatggccactgggaagtttaattcgtagatagagtttgcattgatttggaatatttaaattgtcttgtgttgttatgttctagattggtgaaccattgagtttaattatactactgagaagaataaagtatctactattcataaaaaggctttttttatatggcaattgaggatttgagaaatcgggagataagcgaatgattccttgcagaatatgaccaaatatgtctatatattcccaagactttttttgggaattccccatgatattacgacaagtattactgctgtaatacgagaacaataatttctcgattttatcactgttcgttttaatatcgctttattatttctctctcaactttagcaaggtttcctgttggatttcatcacgctacaataattgtacgagtttcaaacatttattattcgaggaacacttgcagagattgttctgggaatttactcaaaatattctaagaagtcttcgacgtatttctctatacatcttttctggattttttttttcattttccagagataaatggttacttgacgttctaaaaacttcattttttgttcttagaaatgatccttagattgctcccaaatttgatgttcacttcatattttgctgcaacctttcagtaattagctagggtttacctcaatttttgcctggaaatcgtctacttattcttctaaataattccttaagaaatatttcggcgattccttcaaggattgttataataattgttacattttttccttcaaggattgtataagtaacttctgtattccctcacaagagctcattcatgaattacgttgacatatttgcaggattttattcagagatttctcaatcggttttgctcaacaacttttaaagatattatccaataaattttcaaatactgcttaaatgtttctaagttttttctttttgaaatttctcattggttttcatagtataagtggtaaaactattcttcctgtatttcctggacatttttataaaatttcttctgaggctcctccttaattaccatcacaaatttgtctatgtttgattttgcagggtttgctccatgtaaaagcccttcagagaatggattttaacaacgattcagtatttttaggcacttccacagttattaactaaaagtttcctttgcaaagttgccatttttgcattcgcaggtacgatgttagaatcaacccaagcatgacttgcacatgtcacatgctatatctgaactagcagatcctaaacaaaatcacaacttgaattgctagagtttagtatcttcataatcaattttttaataaaagtatcttatgcgattatttattttacaactttagcaaggttttctgttcgattttatcacaccacaataattgtacgaggtttacattgaaaaataaccctaaacccatctcatacgtgcttt

SEQ ID NO: 1572 - DNA, 1793 bp, Aedes aegypti
atgatgttatatttttcacgagtttcgatttatctcttagttttgtgtcttagttctgcacatggtgacaatgttcttgtattgatgggagtaccatcacctagtcatttcatttggattagaccagtaattaaccaactagcagcaaatggtcataatgtgacagtgctttctgttaacgttgatcgtgatccacctaaaaacgttacgtacatccatctagaagagacgtataatgtattgtatgggaatacaaatgttttcaacaatattatggagagatcgaaggataatccatttcaagcggtgatatcggcatacaaattttgcactctggcgtgtcgaggatgcacaacttccaaaggattcaaactgctgctcaactatccggacaattttcatttcgaccttgtcatctacgactgtagtgctggaccctgcatattaggattcttgcagaaatttggttacccacccttgatcagtgtttctgcatttggaattccacactacagcactctcatcgtcggtggatataagccatcatcacacgttccgcacttttcactcacatacgacagtcggatgagtttcatcgaaagagcaactaactttttagtgcacaacttcgactcattctaccgtagatgggtttttatgcctcgaatttggtcgattgcacaacctgctttcgagattgatcttcctgatttggaaagcttagaacgcagtcagttgatgttggtgaactcgaaccctttactggaccatcccgaagttttacctcaaaatgttattccagttggtggactccagattgcggagccaaaggatttaccacaggatatccaaaaattcatcggtgcaagcacgaaaggcgcagtattatttgcaatgggtacgaacttcaaaagtaagatgtttacctccgaaaggcaggcaatgttcatcgacgctttcgcgcaattttcggagtacagttttctgtggaagtttgacgaggataatatcacaatccctattccacccaacgtaatgatcagtaagtggttacctcaaagtgacattcttgcgcatcctcaagtaaaggtattcatctcgcattgtggtttacttggaacatatgagacaacatatttcggagttccaatagtcggaatacctgtttatattgatcagcataaaaatgctgccacactggtaagaaacggcggaggactctctttgaaactggccgatcttactgcagaatcaattgagaaaacattacgtgaagtgctggagaacagcacttttagacttaatatgcaaaatatgtcgaaacttttacgtgatcaaccagagaaacccctcaatcgtgctatctggtggattgagtgggttcttaggcatcctcatgagtaccactcacaatctccgacgctcgatttggatgtgatatctgacagtaatgcggacgtcattatatgttttctatgtattttgataactattttgtacattctattgaagctattcaaatatttaaaaacctttaaaaagtctgcagtatctgaggacaacaaaaaagtaaaataaatctcttacatttaatacaagtatgatcacttagttttcttttccctatcaatatgacgtcccttacaaaggcacttcttcagaactatgaacaccactaaaggagctagaaggaaaaatccgatgacatccactaggttactcttcaggaatccgagttttaacaccggtgactgcaaaccctcgaaatcaggatgacggagtacccattcgat

SEQ ID NO: 1573 - DNA, 1943 bp, Aedes aegypti
agtcgtgttgaggcagttgacgacgtagcaactttagctttctcgatctctcactcccaaatcgttgtcggattggttcgaaactgagtcgggtttgattgagtgttgttcgtgcaccataaggtgaaggacagctgcgagcggtgtggtggagacatatgcatgaaatataagaaggtcagcagattagagaagagagagcgaaaatccagtgcatcaataacagcggcagccgggcgacagctcgacacttattagttgcggttcaatctcgtgttacgcatcacgcgaaatagatcgttcaaggtttttggattttttcttcttaatgcattagttatcatttttatgttgaacgaatagacataaatttgaacattttaaatctacgattgttttgaaatctcgaaaaatcgagctgagaatattttactggagtgttctgttgaatgaattatttttagactgtggaacttgtgcaacagaagaaaagtagggtgatcaaccaagtgagtcaaccaaagcacatgaaggaagtttcaaaggtgattggacttgactgtcagcgtctgctgtgtacatgaagttatttctttgaattagtctgattaaagaaactgtgatcagtgccggcaaaggaaacacctaggcaagtgcgtcatatattcgtgaaaattattgagcgaaacaccggaagctataatcagcttgttttcttgaaattcgcctttgaattgaaaacttactcaaagaagtggaacgagacgagccgagctccaaaggcgggaagaaaatagagaccgacgaagtgggagaacaaggtgaacatctgcctcaggaaagacgaccgggaaacgtaaacatatacatacgggcaaaagtgcagtaatagcaacagcagcaaagccaatctatacacaccggaaaagcgagaagaaataagagaaccacaaaacagcgaacgggcgtcatacggcatcggggcctacaatcttgctgcagtcgtgcgtttacgacctactccaataacagagcgcagcgcgcttaagggcacgtgtgacgtcctacagaacacaacccagtttaagattccggccaaacagcagaaacccgcaatgcaagtagaaagtgcagcaaagtggcgcgtaccgccgttggatctatccgcggtcagtgtgctctccaacgaaagcgatcggcggtggagcaataatcacggccttcatcatgcgtccggccaagcaccgctacctccgccaccgaagaagatccaatatggtcccgatggtttgccaattgatccccgggattggacacgtgccaatgtgtggacctggctcataaatttggcccagtctgaagggttggacataagccctgagctggcgcaaaagtttcccatgaatggaaaagccctttgcctcatgagcttggatatgtacctcagtagagttccggtgggaggaaaaatgctctaccgggatttccgggtgcggcttgctcgagccatgagcttgtaaatgcctcaactatggccaactaatggcaataataaagatgtccaaatctcctcagtaacgttattagtatttagaaataagagtgttaaatccaagagtttcgacaatgcattatatacatatatctctagactagtggttaccaatctagctgacttccaaagttccacactatgctgcgaaaagcatcagaaagtttatgaaatctcaaatatatagcaaaactacgatttagcccaaatacataaaaccaatatacttaaatatacactataagtaaaagcatcgatttgaatgatgctaagtatttctttactatcctgtcgtatatcttttgaaggtacattttcgtgggaatttgtttgtgtatatataattgttagaaataagtaatctagtcaataaatcattttcaaaataaaa

SEQ ID NO: 1574 - DNA, 498 bp, Aedes aegypti
attatgtttatgtttattctgtgctgtgcagttgaaagtggaaatagaagatttcattgagaaaaggccttatattcaacgaaacgtttcggtgaatgagctcgattggtgtgacagtggcgggctgttttgcgatgcggcggcaatcttttcacgaaagattggcccattgcaacccccaaattttgccgggattaccataatagccatcttggcacagcaagatgcatcagattggccaatctacgcagtgggcgatcccctctcggcaactccgcaggtgaggaaaatgagggtatttcttcacccctcacatcttccgccggtcctgctagtcccgatattgatccccgagtttatttaagatcaaccctcagcgatgtttgccgtcggtaaccggggataatttattactcccgcgccttaccagagctgtggcaaactgccgaaaaaattggattataaaacgaaagaaaaatatacgattgaacatgaaca

SEQ ID NO: 1575 - DNA, 498 bp, Aedes aegypti; identical to SEQ ID NO: 1574

(The sequence listing continues in the following parts.)
